United States Patent Application Publication US 2011/0183924 A1 - sequence listing, part 178

SEQ ID NO: 440080 - DNA, 6703 bp, Homo sapiens
cggccgctcgctgcggggacaccccggtgaatgagctctcgccgccaggcgcacggcgtaggggagcctcgcaggcggcggcggcggcggcggctcggggggcgaggcgggccgcctgttcccggggaaggaggcgcgggcgtctgagcgaggccgggcgcggcggccttctctcacgcgccccccgagccagcgcccgcctcccgcgcccgcctctcttctcccgtcggcccagactatccgctcccaccgcgcccccggcccacctggtggccccggccctggccgccgcccccgcggctgtgcccgggagctcgtcccggacgcgcgaccgggcggcgggggctcggcggccaccgctgcctcaagggagcgagggcgggagggtgtgtgtgcgcggctgtgagcaggggtgccggcggggctgcagcggaggcactttggaagaatgactctggagtccatcatggcgtgctgcctgagcgaggaggccaaggaagcccggcggatcaacgacgagatcgagcggcagctccgcagggacaagcgggacgcccgccgggagctcaagctgctgctgctcgggacaggagagagtggcaagagtacgtttatcaagcagatgagaatcatccatgggtcaggatactctgatgaagatatgatcagagccatggacacactcaagatcccatacaagtatgagcacaataaggctcatgcacaattagttcgagaagttgatgtggagaaggtgtctgcttttgagaatccatatgtagatgcaataaagagtttatggaatgatcctggaatccaggaatgctatgatagacgacgagaatatcaattatctgactctaccaaatactatcttaatgacttggaccgcgtagctgaccctgcctacctgcctacgcaacaagatgtgcttagagttcgagtccccaccacagggatcatcgaatacccctttgacttacaaagtgtcattttcagaatggtcgatgtagggggccaaaggtcagagagaagaaaatggatacactgctttgaaaatgtcacctctatcatgtttctagtagcgcttagtgaatatgatcaagttctcgtggagtcagacaatgagaaccgaatggaggaaagcaaggctctctttagaacaattatcacatacccctggttccagaactcctcggttattctgttcttaaacaagaaagatcttctagaggagaaaatcatgtattcccatctagtcgactacttcccagaatatgatggaccccagagagatgcccaggcagcccgagaattcattctgaagatgttcgtggacctgaacccagacagtgacaaaattatctactcccacttcacgtgcgccacagacaccgagaatatccgctttgtctttgctgccgtcaaggacaccatcctccagttgaacctgaaggagtacaatctggtctaattgtgcctcctagacacccgccctgcccttccctggtgggctattgaagatacacaagagggactgtatttctgtggaaaacaatttgcataatactaatttattgccgtcctggactctgtgtgagcgtgtccacagagtttgtagtaaatattatgattttatttaaactattcagaggaaaaacagaggatgctgaagtacagtcccagcacatttcctctctatcttttttttaggcaaaaccttgtgactcagtgtattttaaattctcagtcatgcactcacaaagataagacttgtttctttctgtctctctctctttttcttttctatggagcaaaacaaagctgatttcccttttttcttcccccgctaattcatacctccctcctgatgtttttcccaggttacaatggcctttatcctagttccattcttggtcaagtttttctctcaaatgatacagtcaggacacatcgttcgatttaagccatcatcagcttaatttaagtttgtagtttttgctgaaggattatatgtattaatacttacggttttaaatgtgttgctttggatacacacatagtttcttttttaatagaatatactgtcttgtctcactttggactgggacagtggatgcccatctaaaagttaagtgtcatttcttttagatgtttaccttcagccatagcttgattgctcagagaaatatgcagaaggcaggatcaaagacacacaggagtcctttcttttgaaatgccacgtgccattgtctttcctcccttctttgcttctttttcttaccctctctttcaattgcagatgccaaaaaagatgccaacagacactacattaccctaatggctgctacccagaacctttttataggttgttcttaatttttttgttgttgttgttcaagcttttcctttcttttttttcttagtgtttgggccacgattttaaaatgacttttattatgggtatgtgttgccaaagctggctttttgtcaaataaaatgaatacgaacttaaaaaataaaagctggtatcttaaaatgtaagagagtaagactgtgaagcctaaaatgactggctgagaatgaaccagaaatgccatttgccaaacagttgtaactagaaatttgattctcacagtccattcttttctttgtccttaagatgacattgttagtgttcacgtcccatgttcagtgtccaaaccggcaatgtaaaaagtatcctgtgtggcttaacaggaaatctgtttatgtctctttatttgaaaccagttttactctcagtggttctttaagttcaatgaagtctgccaggaacattggttggtagtattattccgacacctttaatttccaaaatctgaagttcctgctagtttaccaccttcatgatcttcttgaactggtaactgattaggttgaacttatggaagatttgtggacttaactcaaaagtaacctctcagtgttctatagaacatgtatttgtgtaactgaacctaccaggagaaatgtttggaattctatatgtgcaatttttcaacaaatgcaaaaaaaatacagcacatgtattgacaagcttctgtcaagcagcttgagttgaaatttgatttaagaaaataaatcatgattgttcaaagctgctgggacgttagaattaggccatgatactggtctcattttaactacagtggtatttggcactagtgtaaacttccatataaatcactcttttggaacaacaaagggggagggagaaaaatcacggcctgttaaatgagtaccaaagccgcccaacagtaatgagatgttctcatccttgattctcccagcctcaaacaacacagcttactttttttttcccttgctcagaaagtacctgtaatttaacaaacagactgcctgtaggtatagtgcaattacaaatgctctaatcattgtacatacatctctcttgatattgcagcatccatactggctttgtaatcattaattttttggcagattgaatgtgctgtattgatatgtatctatgtaattgtattgtatgtctatagctaattcacgttttgaataatgttattttatttacttttttaagagaggagaatgtaaatttgtcagtttatttctgactagggatattttctttccatttagaaaagaagaaaaaaaaaaaaccttactgtcatacagagcggtactagcgtcgtgctgtataaaatcatttgcacattcctgagtagaggtatactgattataagacccaaaggtaatttcatagcaaaatacataaaatcagtcggagcttttatacaaacatggaaaccaactttgtagaacttttgccatttgatctaggattggaatatgagcttttatacaattcatattcttatttggcaaatgcacagtttagtattacctctctgatggcctttactagaaaggcagttttagaagctattgtgatccactaaggaaatgttttaacagctagagaccactgcttgcctgaaagggcgttcttaaatttggtgcagcaaaaaaaaaaaaaaaaaaaaaaaaaaaattaaacaacaacatttgaaggcctacagtgtgtatagagaaaacctcatcacaagatcataagtgttacagttttagggaatcaagatattctatttaatagagctatagtaaatgtagtcaattaaacctgatctcaaagcttgaagaagctgagcaaaacagggaaagattgttatatttgtctttatgaaattgggatggaatttgctatgcagaattgaggtttgtggctttgctgttcctgtagggtgcatgacaagatcccttctcttgagaaaggaaaaaattgatcaccctagcagcagtgatgcatagaaacctaattttagccacaccagtcaatcgaagctaaaggattttcttttttgtttcttcggggttttattgaaggggctaggggcgggacgggattcttttcagttttgtataaaaacaaagtttactcatgctttatattatattgtgattgcaagcgttataagcgtgtgccactggcctcctattgttgatgcttaggtaatggaggcctgtggtgagttttatggtgacttgggcatgtcttattcaaaaacaaaaacataaaacacagaaacctttcttcagcataccaaggcaagcagccatttcatgactcacttaacacattgcagtgtaccagtttacagatgatttttccctttttgcgtgacatggcagttctaacccccagagaattccttatttgtaaattggaagtttctactatgccttacagagcttaaattcaggaagtttgtgcctcatatctggaaacaaagggaaataacacacccattcaaaagtaaataaatctcctagaagtttttgtttttaacatttccatataaagagctctgttgaatgtcatgaatagactggaaaaaaaaattttaagaacctgcatatgttgtttactagcagatgacaactacaaaaggaatctgaagaacacgtaaaacttgtatttttttttttttggtagattaactagcaggcctattttaaaaaggtaattcagctaaagggcaatttacttttttgtacttcagactatcttgattgtcaaagtgtacgaactgtaattttaaaatttatactgccacatgattgtaaattttagttgtcttaagttaggaattggtgaaaagctatttatgctggatttgggtcaaaatgacttatttgcaaaaaaataaataatgggaagaaagggctgtataatgaaatactgcaagactcacatattggttggaaatttccctcaaatcacctaccgattacccttgatttccctttgttttcagtttctcaaaacgaatgaaatgaaatatagcagaatgttaacccatataaaaataaagtgtacccaaatattgtaatgtatattgctgctcttcttcaaattaaataagggtttaaaaccacttaattggtaatcaacatctcaattgatacaaataaggtgtgcttggtatacattaatattttcttccaaagatatatctttggttagaaacacaaaaaaataaaactagtaatattgtatgtttatctatctctacatatttccagcatatgtagcgttaatagatctgtcctggtaactgtgtctttgggatttcattttggttccatcaaattaggaaaagaaatggcttagttgtatatgattagctagagatttttggagccagacacctgctgtttagtagataacttagtacagaccctaaacttgtcatttgtttttctcacagaatagccatttcctgctgtcttcccaatgatcactgccctttcaataacactcttgcctctagaatcatatgttcaaagtatgaatacacacctagcacatagtaggtgctcaaatattaatttcctccttgccttccttatctaccctgtgtcctccatttccccgtatgattccaacccaatatagcaaatgacatttacatgttatgaaaacatctattgggtaaaatcagatcttggataaagaaattctgacttttatataagcttttggtagacagaaaaaacagaaaggtattcgttggtagaacatttttaagttcaggaaagaaagctggaataatactacgtaactttgtccaggttactttgactgaaacacgtttttggtggatttcttttcctcaaagaactctctaaatgcaactccttgctggattcctcacccatcatcctgttggaaacccttactagacctatgtatttagggagttttgtcagaaaacatttttaacttgcagtatttaaaagaatatttactgttcctaaaatgtcattcaaatgcatgtactgtctattgtttggggatgggaactagttttgcaaaaaacacctaatgttgtataataatgccccaatgatcttgctggttaaaaatacagtatttttggccataattttgtactatagtattcttcattgttgagttttgcttccattaaagttgcccgagcccctctcagaatgttttgtattagtaggagtactgaaatacatctttccttccttaacacaccttgtgcatattgcattttccaaaataaacaagtttaatggtttcaaaaaaaaaaaa

SEQ ID NO: 440081 - DNA, 6272 bp, Homo sapiens
ggagtggccggtgtgcatccattatcagtgccctatggggtcaggagggaatgggggaacggtgggcagactcgcagctggattcccggagcactcatgggacaggagagagtggcaagagtacgtttatcaagcagatgagaatcatccatgggtcaggatactctgatgaagataaaaggggcttcaccaagctggtgtatcagaacatcttcacggccatgcaggccatgatcagagccatggacacactcaagatcccatacaagtatgagcacaataaggctcatgcacaattagttcgagaagttgatgtggagaaggtgtctgcttttgagaatccatatgtagatgcaataaagagtttatggaatgatcctggaatccaggaatgctatgatagacgacgagaatatcaattatctgactctaccaaatactatcttaatgacttggaccgcgtagctgaccctgcctacctgcctacgcaacaagatgtgcttagagttcgagtccccaccacagggatcatcgaatacccctttgacttacaaagtgtcattttcagaatggtcgatgtagggggccaaaggtcagagagaagaaaatggatacactgctttgaaaatgtcacctctatcatgtttctagtagcgcttagtgaatatgatcaagttctcgtggagtcagacaatgagaaccgaatggaggaaagcaaggctctctttagaacaattatcacatacccctggttccagaactcctcggttattctgttcttaaacaagaaagatcttctagaggagaaaatcatgtattcccatctagtcgactacttcccagaatatgatggaccccagagagatgcccaggcagcccgagaattcattctgaagatgttcgtggacctgaacccagacagtgacaaaattatctactcccacttcacgtgcgccacagacaccgagaatatccgctttgtctttgctgccgtcaaggacaccatcctccagttgaacctgaaggagtacaatctggtctaattgtgcctcctagacacccgccctgcccttccctggtgggctattgaagatacacaagagggactgtatttctgtggaaaacaatttgcataatactaatttattgccgtcctggactctgtgtgagcgtgtccacagagtttgtagtaaatattatgattttatttaaactattcagaggaaaaacagaggatgctgaagtacagtcccagcacatttcctctctatcttttttttaggcaaaaccttgtgactcagtgtattttaaattctcagtcatgcactcacaaagataagacttgtttctttctgtctctctctctttttcttttctatggagcaaaacaaagctgatttcccttttttcttcccccgctaattcatacctccctcctgatgtttttcccaggttacaatggcctttatcctagttccattcttggtcaagtttttctctcaaatgatacagtcaggacacatcgttcgatttaagccatcatcagcttaatttaagtttgtagtttttgctgaaggattatatgtattaatacttacggttttaaatgtgttgctttggatacacacatagtttcttttttaatagaatatactgtcttgtctcactttggactgggacagtggatgcccatctaaaagttaagtgtcatttcttttagatgtttaccttcagccatagcttgattgctcagagaaatatgcagaaggcaggatcaaagacacacaggagtcctttcttttgaaatgccacgtgccattgtctttcctcccttctttgcttctttttcttaccctctctttcaattgcagatgccaaaaaagatgccaacagacactacattaccctaatggctgctacccagaacctttttataggttgttcttaatttttttgttgttgttgttcaagcttttcctttcttttttttcttagtgtttgggccacgattttaaaatgacttttattatgggtatgtgttgccaaagctggctttttgtcaaataaaatgaatacgaacttaaaaaataaaagctggtatcttaaaatgtaagagagtaagactgtgaagcctaaaatgactggctgagaatgaaccagaaatgccatttgccaaacagttgtaactagaaatttgattctcacagtccattcttttctttgtccttaagatgacattgttagtgttcacgtcccatgttcagtgtccaaaccggcaatgtaaaaagtatcctgtgtggcttaacaggaaatctgtttatgtctctttatttgaaaccagttttactctcagtggttctttaagttcaatgaagtctgccaggaacattggttggtagtattattccgacacctttaatttccaaaatctgaagttcctgctagtttaccaccttcatgatcttcttgaactggtaactgattaggttgaacttatggaagatttgtggacttaactcaaaagtaacctctcagtgttctatagaacatgtatttgtgtaactgaacctaccaggagaaatgtttggaattctatatgtgcaatttttcaacaaatgcaaaaaaaatacagcacatgtattgacaagcttctgtcaagcagcttgagttgaaatttgatttaagaaaataaatcatgattgttcaaagctgctgggacgttagaattaggccatgatactggtctcattttaactacagtggtatttggcactagtgtaaacttccatataaatcactcttttggaacaacaaagggggagggagaaaaatcacggcctgttaaatgagtaccaaagccgcccaacagtaatgagatgttctcatccttgattctcccagcctcaaacaacacagcttactttttttttcccttgctcagaaagtacctgtaatttaacaaacagactgcctgtaggtatagtgcaattacaaatgctctaatcattgtacatacatctctcttgatattgcagcatccatactggctttgtaatcattaattttttggcagattgaatgtgctgtattgatatgtatctatgtaattgtattgtatgtctatagctaattcacgttttgaataatgttattttatttacttttttaagagaggagaatgtaaatttgtcagtttatttctgactagggatattttctttccatttagaaaagaagaaaaaaaaaaaaccttactgtcatacagagcggtactagcgtcgtgctgtataaaatcatttgcacattcctgagtagaggtatactgattataagacccaaaggtaatttcatagcaaaatacataaaatcagtcggagcttttatacaaacatggaaaccaactttgtagaacttttgccatttgatctaggattggaatatgagcttttatacaattcatattcttatttggcaaatgcacagtttagtattacctctctgatggcctttactagaaaggcagttttagaagctattgtgatccactaaggaaatgttttaacagctagagaccactgcttgcctgaaagggcgttcttaaatttggtgcagcaaaaaaaaaaaaaaaaaaaaaaaaaaaattaaacaacaacatttgaaggcctacagtgtgtatagagaaaacctcatcacaagatcataagtgttacagttttagggaatcaagatattctatttaatagagctatagtaaatgtagtcaattaaacctgatctcaaagcttgaagaagctgagcaaaacagggaaagattgttatatttgtctttatgaaattgggatggaatttgctatgcagaattgaggtttgtggctttgctgttcctgtagggtgcatgacaagatcccttctcttgagaaaggaaaaaattgatcaccctagcagcagtgatgcatagaaacctaattttagccacaccagtcaatcgaagctaaaggattttcttttttgtttcttcggggttttattgaaggggctaggggcgggacgggattcttttcagttttgtataaaaacaaagtttactcatgctttatattatattgtgattgcaagcgttataagcgtgtgccactggcctcctattgttgatgcttaggtaatggaggcctgtggtgagttttatggtgacttgggcatgtcttattcaaaaacaaaaacataaaacacagaaacctttcttcagcataccaaggcaagcagccatttcatgactcacttaacacattgcagtgtaccagtttacagatgatttttccctttttgcgtgacatggcagttctaacccccagagaattccttatttgtaaattggaagtttctactatgccttacagagcttaaattcaggaagtttgtgcctcatatctggaaacaaagggaaataacacacccattcaaaagtaaataaatctcctagaagtttttgtttttaacatttccatataaagagctctgttgaatgtcatgaatagactggaaaaaaaaattttaagaacctgcatatgttgtttactagcagatgacaactacaaaaggaatctgaagaacacgtaaaacttgtatttttttttttttggtagattaactagcaggcctattttaaaaaggtaattcagctaaagggcaatttacttttttgtacttcagactatcttgattgtcaaagtgtacgaactgtaattttaaaatttatactgccacatgattgtaaattttagttgtcttaagttaggaattggtgaaaagctatttatgctggatttgggtcaaaatgacttatttgcaaaaaaataaataatgggaagaaagggctgtataatgaaatactgcaagactcacatattggttggaaatttccctcaaatcacctaccgattacccttgatttccctttgttttcagtttctcaaaacgaatgaaatgaaatatagcagaatgttaacccatataaaaataaagtgtacccaaatattgtaatgtatattgctgctcttcttcaaattaaataagggtttaaaaccacttaattggtaatcaacatctcaattgatacaaataaggtgtgcttggtatacattaatattttcttccaaagatatatctttggttagaaacacaaaaaaataaaactagtaatattgtatgtttatctatctctacatatttccagcatatgtagcgttaatagatctgtcctggtaactgtgtctttgggatttcattttggttccatcaaattaggaaaagaaatggcttagttgtatatgattagctagagatttttggagccagacacctgctgtttagtagataacttagtacagaccctaaacttgtcatttgtttttctcacagaatagccatttcctgctgtcttcccaatgatcactgccctttcaataacactcttgcctctagaatcatatgttcaaagtatgaatacacacctagcacatagtaggtgctcaaatattaatttcctccttgccttccttatctaccctgtgtcctccatttccccgtatgattccaacccaatatagcaaatgacatttacatgttatgaaaacatctattgggtaaaatcagatcttggataaagaaattctgacttttatataagcttttggtagacagaaaaaacagaaaggtattcgttggtagaacatttttaagttcaggaaagaaagctggaataatactacgtaactttgtccaggttactttgactgaaacacgtttttggtggatttcttttcctcaaagaactctctaaatgcaactccttgctggattcctcacccatcatcctgttggaaacccttactagacctatgtatttagggagttttgtcagaaaacatttttaacttgcagtatttaaaagaatatttactgttcctaaaatgtcattcaaatgcatgtactgtctattgtttggggatgggaactagttttgcaaaaaacacctaatgttgtataataatgccccaatgatcttgctggttaaaaatacagtatttttggccataattttgtactatagtattcttcattgttgagttttgcttccattaaagttgcccgagcccctctcagaatgttttgtattagtaggagtactgaaatacatctttccttccttaacacaccttgtgcatattgcattttccaaaataaacaagtttaatggtttcaaaaaaaaaaaa

SEQ ID NO: 440082 - DNA, 5859 bp, Homo sapiens
aaaagatgtaagtgagggcgtgtactggttgtactttggtcgcggggcctgggcgctgtcatagctagtttatggtacgtggatgtgcttagagttcgagtccccaccacagggatcatcgaatacccctttgacttacaaagtgtcattttcagaatggtcgatgtagggggccaaaggtcagagagaagaaaatggatacactgctttgaaaatgtcacctctatcatgtttctagtagcgcttagtgaatatgatcaagttctcgtggagtcagacaatgagaaccgaatggaggaaagcaaggctctctttagaacaattatcacatacccctggttccagaactcctcggttattctgttcttaaacaagaaagatcttctagaggagaaaatcatgtattcccatctagtcgactacttcccagaatatgatggaccccagagagatgcccaggcagcccgagaattcattctgaagatgttcgtggacctgaacccagacagtgacaaaattatctactcccacttcacgtgcgccacagacaccgagaatatccgctttgtctttgctgccgtcaaggacaccatcctccagttgaacctgaaggagtacaatctggtctaattgtgcctcctagacacccgccctgcccttccctggtgggctattgaagatacacaagagggactgtatttctgtggaaaacaatttgcataatactaatttattgccgtcctggactctgtgtgagcgtgtccacagagtttgtagtaaatattatgattttatttaaactattcagaggaaaaacagaggatgctgaagtacagtcccagcacatttcctctctatcttttttttaggcaaaaccttgtgactcagtgtattttaaattctcagtcatgcactcacaaagataagacttgtttctttctgtctctctctctttttcttttctatggagcaaaacaaagctgatttcccttttttcttcccccgctaattcatacctccctcctgatgtttttcccaggttacaatggcctttatcctagttccattcttggtcaagtttttctctcaaatgatacagtcaggacacatcgttcgatttaagccatcatcagcttaatttaagtttgtagtttttgctgaaggattatatgtattaatacttacggttttaaatgtgttgctttggatacacacatagtttcttttttaatagaatatactgtcttgtctcactttggactgggacagtggatgcccatctaaaagttaagtgtcatttcttttagatgtttaccttcagccatagcttgattgctcagagaaatatgcagaaggcaggatcaaagacacacaggagtcctttcttttgaaatgccacgtgccattgtctttcctcccttctttgcttctttttcttaccctctctttcaattgcagatgccaaaaaagatgccaacagacactacattaccctaatggctgctacccagaacctttttataggttgttcttaatttttttgttgttgttgttcaagcttttcctttcttttttttcttagtgtttgggccacgattttaaaatgacttttattatgggtatgtgttgccaaagctggctttttgtcaaataaaatgaatacgaacttaaaaaataaaagctggtatcttaaaatgtaagagagtaagactgtgaagcctaaaatgactggctgagaatgaaccagaaatgccatttgccaaacagttgtaactagaaatttgattctcacagtccattcttttctttgtccttaagatgacattgttagtgttcacgtcccatgttcagtgtccaaaccggcaatgtaaaaagtatcctgtgtggcttaacaggaaatctgtttatgtctctttatttgaaaccagttttactctcagtggttctttaagttcaatgaagtctgccaggaacattggttggtagtattattccgacacctttaatttccaaaatctgaagttcctgctagtttaccaccttcatgatcttcttgaactggtaactgattaggttgaacttatggaagatttgtggacttaactcaaaagtaacctctcagtgttctatagaacatgtatttgtgtaactgaacctaccaggagaaatgtttggaattctatatgtgcaatttttcaacaaatgcaaaaaaaatacagcacatgtattgacaagcttctgtcaagcagcttgagttgaaatttgatttaagaaaataaatcatgattgttcaaagctgctgggacgttagaattaggccatgatactggtctcattttaactacagtggtatttggcactagtgtaaacttccatataaatcactcttttggaacaacaaagggggagggagaaaaatcacggcctgttaaatgagtaccaaagccgcccaacagtaatgagatgttctcatccttgattctcccagcctcaaacaacacagcttactttttttttcccttgctcagaaagtacctgtaatttaacaaacagactgcctgtaggtatagtgcaattacaaatgctctaatcattgtacatacatctctcttgatattgcagcatccatactggctttgtaatcattaattttttggcagattgaatgtgctgtattgatatgtatctatgtaattgtattgtatgtctatagctaattcacgttttgaataatgttattttatttacttttttaagagaggagaatgtaaatttgtcagtttatttctgactagggatattttctttccatttagaaaagaagaaaaaaaaaaaaccttactgtcatacagagcggtactagcgtcgtgctgtataaaatcatttgcacattcctgagtagaggtatactgattataagacccaaaggtaatttcatagcaaaatacataaaatcagtcggagcttttatacaaacatggaaaccaactttgtagaacttttgccatttgatctaggattggaatatgagcttttatacaattcatattcttatttggcaaatgcacagtttagtattacctctctgatggcctttactagaaaggcagttttagaagctattgtgatccactaaggaaatgttttaacagctagagaccactgcttgcctgaaagggcgttcttaaatttggtgcagcaaaaaaaaaaaaaaaaaaaaaaaaaaaattaaacaacaacatttgaaggcctacagtgtgtatagagaaaacctcatcacaagatcataagtgttacagttttagggaatcaagatattctatttaatagagctatagtaaatgtagtcaattaaacctgatctcaaagcttgaagaagctgagcaaaacagggaaagattgttatatttgtctttatgaaattgggatggaatttgctatgcagaattgaggtttgtggctttgctgttcctgtagggtgcatgacaagatcccttctcttgagaaaggaaaaaattgatcaccctagcagcagtgatgcatagaaacctaattttagccacaccagtcaatcgaagctaaaggattttcttttttgtttcttcggggttttattgaaggggctaggggcgggacgggattcttttcagttttgtataaaaacaaagtttactcatgctttatattatattgtgattgcaagcgttataagcgtgtgccactggcctcctattgttgatgcttaggtaatggaggcctgtggtgagttttatggtgacttgggcatgtcttattcaaaaacaaaaacataaaacacagaaacctttcttcagcataccaaggcaagcagccatttcatgactcacttaacacattgcagtgtaccagtttacagatgatttttccctttttgcgtgacatggcagttctaacccccagagaattccttatttgtaaattggaagtttctactatgccttacagagcttaaattcaggaagtttgtgcctcatatctggaaacaaagggaaataacacacccattcaaaagtaaataaatctcctagaagtttttgtttttaacatttccatataaagagctctgttgaatgtcatgaatagactggaaaaaaaaattttaagaacctgcatatgttgtttactagcagatgacaactacaaaaggaatctgaagaacacgtaaaacttgtatttttttttttttggtagattaactagcaggcctattttaaaaaggtaattcagctaaagggcaatttacttttttgtacttcagactatcttgattgtcaaagtgtacgaactgtaattttaaaatttatactgccacatgattgtaaattttagttgtcttaagttaggaattggtgaaaagctatttatgctggatttgggtcaaaatgacttatttgcaaaaaaataaataatgggaagaaagggctgtataatgaaatactgcaagactcacatattggttggaaatttccctcaaatcacctaccgattacccttgatttccctttgttttcagtttctcaaaacgaatgaaatgaaatatagcagaatgttaacccatataaaaataaagtgtacccaaatattgtaatgtatattgctgctcttcttcaaattaaataagggtttaaaaccacttaattggtaatcaacatctcaattgatacaaataaggtgtgcttggtatacattaatattttcttccaaagatatatctttggttagaaacacaaaaaaataaaactagtaatattgtatgtttatctatctctacatatttccagcatatgtagcgttaatagatctgtcctggtaactgtgtctttgggatttcattttggttccatcaaattaggaaaagaaatggcttagttgtatatgattagctagagatttttggagccagacacctgctgtttagtagataacttagtacagaccctaaacttgtcatttgtttttctcacagaatagccatttcctgctgtcttcccaatgatcactgccctttcaataacactcttgcctctagaatcatatgttcaaagtatgaatacacacctagcacatagtaggtgctcaaatattaatttcctccttgccttccttatctaccctgtgtcctccatttccccgtatgattccaacccaatatagcaaatgacatttacatgttatgaaaacatctattgggtaaaatcagatcttggataaagaaattctgacttttatataagcttttggtagacagaaaaaacagaaaggtattcgttggtagaacatttttaagttcaggaaagaaagctggaataatactacgtaactttgtccaggttactttgactgaaacacgtttttggtggatttcttttcctcaaagaactctctaaatgcaactccttgctggattcctcacccatcatcctgttggaaacccttactagacctatgtatttagggagttttgtcagaaaacatttttaacttgcagtatttaaaagaatatttactgttcctaaaatgtcattcaaatgcatgtactgtctattgtttggggatgggaactagttttgcaaaaaacacctaatgttgtataataatgccccaatgatcttgctggttaaaaatacagtatttttggccataattttgtactatagtattcttcattgttgagttttgcttccattaaagttgcccgagcccctctcagaatgttttgtattagtaggagtactgaaatacatctttccttccttaacacaccttgtgcatattgcattttccaaaataaacaagtttaatggtttcaaaaaaaaaaaa

SEQ ID NO: 440083 - DNA, 5323 bp, Homo sapiens
cggccgctcgctgcggggacaccccggtgaatgagctctcgccgccaggcgcacggcgtaggggagcctcgcaggcggcggcggcggcggcggctcggggggcgaggcgggccgcctgttcccggggaaggaggcgcgggcgtctgagcgaggccgggcgcggcggccttctctcacgcgccccccgagccagcgcccgcctcccgcgcccgcctctcttctcccgtcggcccagactatccgctcccaccgcgcccccggcccacctggtggccccggccctggccgccgcccccgcggctgtgcccgggagctcgtcccggacgcgcgaccgggcggcgggggctcggcggccaccgctgcctcaagggagcgagggcgggagggtgtgtgtgcgcggctgtgagcaggggtgccggcggggctgcagcggaggcactttggaagaatgactctggagtccatcatggcgtgctgcctgagcgaggaggccaaggaagcccggcggatcaacgacgagatcgagcggcagctccgcagggacaagcgggacgcccgccgggagctcaagctgctgctgctcgggacaggagagagtggcaagagtacgtttatcaagcagatgagaatcatccatgggtcaggatactctgatgaagataaaaggggcttcaccaagctggtgtatcagaacatcttcacggccatgcaggccatgatcagagccatggacacactcaagatcccatacaagtatgagcacaataaggctcatgcacaattagttcgagaagttgatgtggagaaggtgtctgcttttgagaatccatatgtagatgcaataaagagtttatggaatgatcctggaatccaggaatgctatgatagacgacgagaatatcaattatctgactctaccaaatactatcttaatgacttggaccgcgtagctgaccctgcctacctgcctacgcaacaagatgtgcttagagttcgagtccccaccacagggatcatcgaatacccctttgacttacaaagtgtcattttcagaatggtcgatgtagggggccaaaggtcagagagaagaaaatggatacactgctttgaaaatgtcacctctatcatgtttctagtagcgcttagtgaatatgatcaagttctcgtggagtcagacaatgagaaccgaatggaggaaagcaaggctctctttagaacaattatcacatacccctggttccagaactcctcggttattctgttcttaaacaagaaagatcttctagaggagaaaatcatgtattcccatctagtcgactacttcccagaatatgatggaccccagagagatgcccaggcagcccgagaattcattctgaagatgttcgtggacctgaacccagacagtgacaaaattatctactcccacttcacgtgcgccacagacaccgagaatatccgctttgtctttgctgccgtcaaggacaccatcctccagttgaacctgaaggagtacaatctggtctaattgtgcctcctagacacccgccctgcccttccctggtgggctattgaagatacacaagagggactgtatttctgtggaaaacaatttgcataatactaatttattgccgtcctggatatatgtgcaatttttcaacaaatgcaaaaaaaatacagcacatgtattgacaagcttctgtcaagcagcttgagttgaaatttgatttaagaaaataaatcatgattgttcaaagctgctgggacgttagaattaggccatgatactggtctcattttaactacagtggtatttggcactagtgtaaacttccatataaatcactcttttggaacaacaaagggggagggagaaaaatcacggcctgttaaatgagtaccaaagccgcccaacagtaatgagatgttctcatccttgattctcccagcctcaaacaacacagcttactttttttttcccttgctcagaaagtacctgtaatttaacaaacagactgcctgtaggtatagtgcaattacaaatgctctaatcattgtacatacatctctcttgatattgcagcatccatactggctttgtaatcattaattttttggcagattgaatgtgctgtattgatatgtatctatgtaattgtattgtatgtctatagctaattcacgttttgaataatgttattttatttacttttttaagagaggagaatgtaaatttgtcagtttatttctgactagggatattttctttccatttagaaaagaagaaaaaaaaaaaaccttactgtcatacagagcggtactagcgtcgtgctgtataaaatcatttgcacattcctgagtagaggtatactgattataagacccaaaggtaatttcatagcaaaatacataaaatcagtcggagcttttatacaaacatggaaaccaactttgtagaacttttgccatttgatctaggattggaatatgagcttttatacaattcatattcttatttggcaaatgcacagtttagtattacctctctgatggcctttactagaaaggcagttttagaagctattgtgatccactaaggaaatgttttaacagctagagaccactgcttgcctgaaagggcgttcttaaatttggtgcagcaaaaaaaaaaaaaaaaaaaaaaaaaaaattaaacaacaacatttgaaggcctacagtgtgtatagagaaaacctcatcacaagatcataagtgttacagttttagggaatcaagatattctatttaatagagctatagtaaatgtagtcaattaaacctgatctcaaagcttgaagaagctgagcaaaacagggaaagattgttatatttgtctttatgaaattgggatggaatttgctatgcagaattgaggtttgtggctttgctgttcctgtagggtgcatgacaagatcccttctcttgagaaaggaaaaaattgatcaccctagcagcagtgatgcatagaaacctaattttagccacaccagtcaatcgaagctaaaggattttcttttttgtttcttcggggttttattgaaggggctaggggcgggacgggattcttttcagttttgtataaaaacaaagtttactcatgctttatattatattgtgattgcaagcgttataagcgtgtgccactggcctcctattgttgatgcttaggtaatggaggcctgtggtgagttttatggtgacttgggcatgtcttattcaaaaacaaaaacataaaacacagaaacctttcttcagcataccaaggcaagcagccatttcatgactcacttaacacattgcagtgtaccagtttacagatgatttttccctttttgcgtgacatggcagttctaacccccagagaattccttatttgtaaattggaagtttctactatgccttacagagcttaaattcaggaagtttgtgcctcatatctggaaacaaagggaaataacacacccattcaaaagtaaataaatctcctagaagtttttgtttttaacatttccatataaagagctctgttgaatgtcatgaatagactggaaaaaaaaattttaagaacctgcatatgttgtttactagcagatgacaactacaaaaggaatctgaagaacacgtaaaacttgtatttttttttttttggtagattaactagcaggcctattttaaaaaggtaattcagctaaagggcaatttacttttttgtacttcagactatcttgattgtcaaagtgtacgaactgtaattttaaaatttatactgccacatgattgtaaattttagttgtcttaagttaggaattggtgaaaagctatttatgctggatttgggtcaaaatgacttatttgcaaaaaaataaataatgggaagaaagggctgtataatgaaatactgcaagactcacatattggttggaaatttccctcaaatcacctaccgattacccttgatttccctttgttttcagtttctcaaaacgaatgaaatgaaatatagcagaatgttaacccatataaaaataaagtgtacccaaatattgtaatgtatattgctgctcttcttcaaattaaataagggtttaaaaccacttaattggtaatcaacatctcaattgatacaaataaggtgtgcttggtatacattaatattttcttccaaagatatatctttggttagaaacacaaaaaaataaaactagtaatattgtatgtttatctatctctacatatttccagcatatgtagcgttaatagatctgtcctggtaactgtgtctttgggatttcattttggttccatcaaattaggaaaagaaatggcttagttgtatatgattagctagagatttttggagccagacacctgctgtttagtagataacttagtacagaccctaaacttgtcatttgtttttctcacagaatagccatttcctgctgtcttcccaatgatcactgccctttcaataacactcttgcctctagaatcatatgttcaaagtatgaatacacacctagcacatagtaggtgctcaaatattaatttcctccttgccttccttatctaccctgtgtcctccatttccccgtatgattccaacccaatatagcaaatgacatttacatgttatgaaaacatctattgggtaaaatcagatcttggataaagaaattctgacttttatataagcttttggtagacagaaaaaacagaaaggtattcgttggtagaacatttttaagttcaggaaagaaagctggaataatactacgtaactttgtccaggttactttgactgaaacacgtttttggtggatttcttttcctcaaagaactctctaaatgcaactccttgctggattcctcacccatcatcctgttggaaacccttactagacctatgtatttagggagttttgtcagaaaacatttttaacttgcagtatttaaaagaatatttactgttcctaaaatgtcattcaaatgcatgtactgtctattgtttggggatgggaactagttttgcaaaaaacacctaatgttgtataataatgccccaatgatcttgctggttaaaaatacagtatttttggccataattttgtactatagtattcttcattgttgagttttgcttccattaaagttgcccgagcccctctcagaatgttttgtattagtaggagtactgaaatacatctttccttccttaacacaccttgtgcatattgcattttccaaaataaacaagtttaatggtttcaaaaaaaaaaaa

SEQ ID NO: 440084 - DNA, 4024 bp, Homo sapiens
gctaagtgacatgatggtcacgtcagtcaggtcaacgcagtaaagatcgtgtgtgctacagaaatctgtttatgtctctttatttgaaaccagttttactctcagtggttctttaagttcaatgaagtctgccaggaacattggttggtagtattattccgacacctttaatttccaaaatctgaagttcctgctagtttaccaccttcatgatcttcttgaactggtaactgattaggttgaacttatggaagatttgtggacttaactcaaaagtaacctctcagtgttctatagaacatgtatttgtgtaactgaacctaccaggagaaatgtttggaattctatatgtgcaatttttcaacaaatgcaaaaaaaatacagcacatgtattgacaagcttctgtcaagcagcttgagttgaaatttgatttaagaaaataaatcatgattgttcaaagctgctgggacgttagaattaggccatgatactggtctcattttaactacagtggtatttggcactagtgtaaacttccatataaatcactcttttggaacaacaaagggggagggagaaaaatcacggcctgttaaatgagtaccaaagccgcccaacagtaatgagatgttctcatccttgattctcccagcctcaaacaacacagcttactttttttttcccttgctcagaaagtacctgtaatttaacaaacagactgcctgtaggtatagtgcaattacaaatgctctaatcattgtacatacatctctcttgatattgcagcatccatactggctttgtaatcattaattttttggcagattgaatgtgctgtattgatatgtatctatgtaattgtattgtatgtctatagctaattcacgttttgaataatgttattttatttacttttttaagagaggagaatgtaaatttgtcagtttatttctgactagggatattttctttccatttagaaaagaagaaaaaaaaaaaaccttactgtcatacagagcggtactagcgtcgtgctgtataaaatcatttgcacattcctgagtagaggtatactgattataagacccaaaggtaatttcatagcaaaatacataaaatcagtcggagcttttatacaaacatggaaaccaactttgtagaacttttgccatttgatctaggattggaatatgagcttttatacaattcatattcttatttggcaaatgcacagtttagtattacctctctgatggcctttactagaaaggcagttttagaagctattgtgatccactaaggaaatgttttaacagctagagaccactgcttgcctgaaagggcgttcttaaatttggtgcagcaaaaaaaaaaaaaaaaaaaaaaaaaaaattaaacaacaacatttgaaggcctacagtgtgtatagagaaaacctcatcacaagatcataagtgttacagttttagggaatcaagatattctatttaatagagctatagtaaatgtagtcaattaaacctgatctcaaagcttgaagaagctgagcaaaacagggaaagattgttatatttgtctttatgaaattgggatggaatttgctatgcagaattgaggtttgtggctttgctgttcctgtagggtgcatgacaagatcccttctcttgagaaaggaaaaaattgatcaccctagcagcagtgatgcatagaaacctaattttagccacaccagtcaatcgaagctaaaggattttcttttttgtttcttcggggttttattgaaggggctaggggcgggacgggattcttttcagttttgtataaaaacaaagtttactcatgctttatattatattgtgattgcaagcgttataagcgtgtgccactggcctcctattgttgatgcttaggtaatggaggcctgtggtgagttttatggtgacttgggcatgtcttattcaaaaacaaaaacataaaacacagaaacctttcttcagcataccaaggcaagcagccatttcatgactcacttaacacattgcagtgtaccagtttacagatgatttttccctttttgcgtgacatggcagttctaacccccagagaattccttatttgtaaattggaagtttctactatgccttacagagcttaaattcaggaagtttgtgcctcatatctggaaacaaagggaaataacacacccattcaaaagtaaataaatctcctagaagtttttgtttttaacatttccatataaagagctctgttgaatgtcatgaatagactggaaaaaaaaattttaagaacctgcatatgttgtttactagcagatgacaactacaaaaggaatctgaagaacacgtaaaacttgtatttttttttttttggtagattaactagcaggcctattttaaaaaggtaattcagctaaagggcaatttacttttttgtacttcagactatcttgattgtcaaagtgtacgaactgtaattttaaaatttatactgccacatgattgtaaattttagttgtcttaagttaggaattggtgaaaagctatttatgctggatttgggtcaaaatgacttatttgcaaaaaaataaataatgggaagaaagggctgtataatgaaatactgcaagactcacatattggttggaaatttccctcaaatcacctaccgattacccttgatttccctttgttttcagtttctcaaaacgaatgaaatgaaatatagcagaatgttaacccatataaaaataaagtgtacccaaatattgtaatgtatattgctgctcttcttcaaattaaataagggtttaaaaccacttaattggtaatcaacatctcaattgatacaaataaggtgtgcttggtatacattaatattttcttccaaagatatatctttggttagaaacacaaaaaaataaaactagtaatattgtatgtttatctatctctacatatttccagcatatgtagcgttaatagatctgtcctggtaactgtgtctttgggatttcattttggttccatcaaattaggaaaagaaatggcttagttgtatatgattagctagagatttttggagccagacacctgctgtttagtagataacttagtacagaccctaaacttgtcatttgtttttctcacagaatagccatttcctgctgtcttcccaatgatcactgccctttcaataacactcttgcctctagaatcatatgttcaaagtatgaatacacacctagcacatagtaggtgctcaaatattaatttcctccttgccttccttatctaccctgtgtcctccatttccccgtatgattccaacccaatatagcaaatgacatttacatgttatgaaaacatctattgggtaaaatcagatcttggataaagaaattctgacttttatataagcttttggtagacagaaaaaacagaaaggtattcgttggtagaacatttttaagttcaggaaagaaagctggaataatactacgtaactttgtccaggttactttgactgaaacacgtttttggtggatttcttttcctcaaagaactctctaaatgcaactccttgctggattcctcacccatcatcctgttggaaacccttactagacctatgtatttagggagttttgtcagaaaacatttttaacttgcagtatttaaaagaatatttactgttcctaaaatgtcattcaaatgcatgtactgtctattgtttggggatgggaactagttttgcaaaaaacacctaatgttgtataataatgccccaatgatcttgctggttaaaaatacagtatttttggccataattttgtactatagtattcttcattgttgagttttgcttccattaaagttgcccgagcccctctcagaatgttttgtattagtaggagtactgaaatacatctttccttccttaacacaccttgtgcatattgcattttccaaaataaacaagtttaatggtttcaaaaaaaaaaaa

SEQ ID NO: 440085 - DNA, 3406 bp, Homo sapiens
ccggatccaacgttggatccgaatttggatccgaattcggatccaacggccgccctttttttttcccttgctcagaaagtacctgtaatttaacaaacagactgcctgtaggtatagtgcaattacaaatgctctaatcattgtacatacatctctcttgatattgcagcatccatactggctttgtaatcattaattttttggcagattgaatgtgctgtattgatatgtatctatgtaattgtattgtatgtctatagctaattcacgttttgaataatgttattttatttacttttttaagagaggagaatgtaaatttgtcagtttatttctgactagggatattttctttccatttagaaaagaagaaaaaaaaaaaaccttactgtcatacagagcggtactagcgtcgtgctgtataaaatcatttgcacattcctgagtagaggtatactgattataagacccaaaggtaatttcatagcaaaatacataaaatcagtcggagcttttatacaaacatggaaaccaactttgtagaacttttgccatttgatctaggattggaatatgagcttttatacaattcatattcttatttggcaaatgcacagtttagtattacctctctgatggcctttactagaaaggcagttttagaagctattgtgatccactaaggaaatgttttaacagctagagaccactgcttgcctgaaagggcgttcttaaatttggtgcagcaaaaaaaaaaaaaaaaaaaaaaaaaaaattaaacaacaacatttgaaggcctacagtgtgtatagagaaaacctcatcacaagatcataagtgttacagttttagggaatcaagatattctatttaatagagctatagtaaatgtagtcaattaaacctgatctcaaagcttgaagaagctgagcaaaacagggaaagattgttatatttgtctttatgaaattgggatggaatttgctatgcagaattgaggtttgtggctttgctgttcctgtagggtgcatgacaagatcccttctcttgagaaaggaaaaaattgatcaccctagcagcagtgatgcatagaaacctaattttagccacaccagtcaatcgaagctaaaggattttcttttttgtttcttcggggttttattgaaggggctaggggcgggacgggattcttttcagttttgtataaaaacaaagtttactcatgctttatattatattgtgattgcaagcgttataagcgtgtgccactggcctcctattgttgatgcttaggtaatggaggcctgtggtgagttttatggtgacttgggcatgtcttattcaaaaacaaaaacataaaacacagaaacctttcttcagcataccaaggcaagcagccatttcatgactcacttaacacattgcagtgtaccagtttacagatgatttttccctttttgcgtgacatggcagttctaacccccagagaattccttatttgtaaattggaagtttctactatgccttacagagcttaaattcaggaagtttgtgcctcatatctggaaacaaagggaaataacacacccattcaaaagtaaataaatctcctagaagtttttgtttttaacatttccatataaagagctctgttgaatgtcatgaatagactggaaaaaaaaattttaagaacctgcatatgttgtttactagcagatgacaactacaaaaggaatctgaagaacacgtaaaacttgtatttttttttttttggtagattaactagcaggcctattttaaaaaggtaattcagctaaagggcaatttacttttttgtacttcagactatcttgattgtcaaagtgtacgaactgtaattttaaaatttatactgccacatgattgtaaattttagttgtcttaagttaggaattggtgaaaagctatttatgctggatttgggtcaaaatgacttatttgcaaaaaaataaataatgggaagaaagggctgtataatgaaatactgcaagactcacatattggttggaaatttccctcaaatcacctaccgattacccttgatttccctttgttttcagtttctcaaaacgaatgaaatgaaatatagcagaatgttaacccatataaaaataaagtgtacccaaatattgtaatgtatattgctgctcttcttcaaattaaataagggtttaaaaccacttaattggtaatcaacatctcaattgatacaaataaggtgtgcttggtatacattaatattttcttccaaagatatatctttggttagaaacacaaaaaaataaaactagtaatattgtatgtttatctatctctacatatttccagcatatgtagcgttaatagatctgtcctggtaactgtgtctttgggatttcattttggttccatcaaattaggaaaagaaatggcttagttgtatatgattagctagagatttttggagccagacacctgctgtttagtagataacttagtacagaccctaaacttgtcatttgtttttctcacagaatagccatttcctgctgtcttcccaatgatcactgccctttcaataacactcttgcctctagaatcatatgttcaaagtatgaatacacacctagcacatagtaggtgctcaaatattaatttcctccttgccttccttatctaccctgtgtcctccatttccccgtatgattccaacccaatatagcaaatgacatttacatgttatgaaaacatctattgggtaaaatcagatcttggataaagaaattctgacttttatataagcttttggtagacagaaaaaacagaaaggtattcgttggtagaacatttttaagttcaggaaagaaagctggaataatactacgtaactttgtccaggttactttgactgaaacacgtttttggtggatttcttttcctcaaagaactctctaaatgcaactccttgctggattcctcacccatcatcctgttggaaacccttactagacctatgtatttagggagttttgtcagaaaacatttttaacttgcagtatttaaaagaatatttactgttcctaaaatgtcattcaaatgcatgtactgtctattgtttggggatgggaactagttttgcaaaaaacacctaatgttgtataataatgccccaatgatcttgctggttaaaaatacagtatttttggccataattttgtactatagtattcttcattgttgagttttgcttccattaaagttgcccgagcccctctcagaatgttttgtattagtaggagtactgaaatacatctttccttccttaacacaccttgtgcatattgcattttccaaaataaacaagtttaatggtttcaaaaaaaaaaaa

SEQ ID NO: 440086 - DNA, 1890 bp, Homo sapiens
cggccgctcgctgcggggacaccccggtgaatgagctctcgccgccaggcgcacggcgtaggggagcctcgcaggcggcggcggcggcggcggctcggggggcgaggcgggccgcctgttcccggggaaggaggcgcgggcgtctgagcgaggccgggcgcggcggccttctctcacgcgccccccgagccagcgcccgcctcccgcgcccgcctctcttctcccgtcggcccagactatccgctcccaccgcgcccccggcccacctggtggccccggccctggccgccgcccccgcggctgtgcccgggagctcgtcccggacgcgcgaccgggcggcgggggctcggcggccaccgctgcctcaagggagcgagggcgggagggtgtgtgtgcgcggctgtgagcaggggtgccggcggggctgcagcggaggcactttggaagaatgactctggagtccatcatggcgtgctgcctgagcgaggaggccaaggaagcccggcggatcaacgacgagatcgagcggcagctccgcagggacaagcgggacgcccgccgggagctcaagctgctgctgctcgggacaggagagagtggcaagagtacgtttatcaagcagatgagaatcatccatgggtcaggatactctgatgaagataaaaggggcttcaccaagctggtgtatcagaacatcttcacggccatgcaggccatgatcagagccatggacacactcaagatcccatacaagtatgagcacaataaggctcatgcacaattagttcgagaagttgatgtggagaaggtgtctgcttttgagaatccatatgtagatgcaataaagagtttatggaatgatcctggaatccaggaatgctatgatagacgacgagaatatcaattatctgactctaccaaatactatcttaatgacttggaccgcgtagctgaccctgcctacctgcctacgcaacaagatgtgcttagagttcgagtccccaccacagggatcatcgaatacccctttgacttacaaagtgtcattttcagaatggtcgatgtagggggccaaaggtcagagagaagaaaatggatacactgctttgaaaatgtcacctctatcatgtttctagtagcgcttagtgaatatgatcaagttctcgtggagtcagacaatgagaaccgaatggaggaaagcaaggctctctttagaacaattatcacatacccctggttccagaactcctcggttattctgttcttaaacaagaaagatcttctagaggagaaaatcatgtattcccatctagtcgactacttcccagaatatgatggaccccagagagatgcccaggcagcccgagaattcattctgaagatgttcgtggacctgaacccagacagtgacaaaattatctactcccacttcacgtgcgccacagacaccgagaatatccgctttgtctttgctgccgtcaaggacaccatcctccagttgaacctgaaggagtacaatctggtctaattgtgcctcctagacacccgccctgcccttccctggtgggctattgaagatacacaagagggactgtatttctgtggaaaacaatttgcataatactaatttattgccgtcctggactctgtgtgagcgtgtccacagagtttgtagtaaatattatgattttatttaaactattcagaggaaaaacagaggatgctgaagtacagtcccagcacatttcctctctatcttttttttaggcaaaacctgggaacccagggtttcaaattccccagcctggcccccaaagatagactggtcttcggtcccccttccttcaggggccaacacatcggtcctcttttcccgaaaacccccggggt

SEQ ID NO: 440087 - DNA, 6580 bp, Homo sapiens
cggccgctcgctgcggggacaccccggtgaatgagctctcgccgccaggcgcacggcgtaggggagcctcgcaggcggcggcggcggcggcggctcggggggcgaggcgggccgcctgttcccggggaaggaggcgcgggcgtctgagcgaggccgggcgcggcggccttctctcacgcgccccccgagccagcgcccgcctcccgcgcccgcctctcttctcccgtcggcccagactatccgctcccaccgcgcccccggcccacctggtggccccggccctggccgccgcccccgcggctgtgcccgggagctcgtcccggacgcgcgaccgggcggcgggggctcggcggccaccgctgcctcaagggagcgagggcgggagggtgtgtgtgcgcggctgtgagcaggggtgccggcggggctgcagcggaggcactttggaagaatgactctggagtccatcatggcgtgctgcctgagcgaggaggccaaggaagcccggcggatcaacgacgagatcgagcggcagctccgcagggacaagcgggacgcccgccgggagctcaagctgctgctgctcgggacaggagagagtggcaagagtacgtttatcaagcagatgagaatcatccatgggtcaggatactctgatgaagataaaaggggcttcaccaagctggtgtatcagaacatcttcacggccatgcaggccatgatcagagccatggacacactcaagatcccatacaagtatgagcacaataaggctcatgcacaattagttcgagaagttgatgtggagaaggtgtctgcttttgagaatccatatgtagatgcaataaagagtttatggaatgatcctggaatccaggaatgctatgatagacgacgagaatatcaattatctgactctaccaaatactatcttaatgacttggaccgcgtagctgaccctgcctacctgcctacgcaacaagatgtgcttagagttcgagtccccaccacagggatcatcgaatacccctttgacttacaaagtgtcattttcagaatggtcgatgtagggggccaaaggtcagagagaagaaaatggatacactgctttgaaaatgtcacctctatcatgtttctagtagcgcttagtgaatatgatcaagttctcgtggagtcagacaatgagaaccgaatggaggaaagcaaggctctctttagaacaattatcacatacccctggttccagaactcctcggttattctgttcttaaacaagaaagatcttctagaggagaaaatcatgtattcccatctagtcgactacttcccagaatatgatggaccccagagagatgcccaggcagcccgagaattcattctgaagatgttcgtggacctgaacccagacagtgacaaaattatctactcccacttcacgtgcgccacagacaccgagaatatccgctttgtctttgctgccgtcaaggacaccatcctccagttgaacctgaaggagtacaatctggtctaattgtgcctcctagacacccgccctgcccttccctggtgggctattgaagatacacaagagggactgtatttctgtggaaaacaatttgcataatactaatttattgccgtcctggactctgtgtgagcgtgtccacagagtttgtagtaaatattatgattttatttaaactattcagaggaaaaacagaggatgctgaagtacagtcccagcacatttcctctctatcttttttttaggcaaaaccttgtgactcagtgtattttaaattctcagtcatgcactcacaaagataagacttgtttctttctgtctctctctctttttcttttctatggagcaaaacaaagctgatttcccttttttcttcccccgctaattcatacctccctcctgatgtttttcccaggttacaatggcctttatcctagttccattcttggtcaagtttttctctcaaatgatacagtcaggacacatcgttcgatttaagccatcatcagcttaatttaagtttgtagtttttgctgaaggattatatgtattaatacttacggttttaaatgtgttgctttggatacacacatagtttcttttttaatagaatatactgtcttgtctcactttggactgggacagtggatgcccatctaaaagttaagtgtcatttcttttagatgtttaccttcagccatagcttgattgctcagagaaatatgcagaaggcaggatcaaagacacacaggagtcctttcttttgaaatgccacgtgccattgtctttcctcccttctttgcttctttttcttaccctctctttcaattgcagatgccaaaaaagatgccaacagacactacattaccctaatggctgctacccagaacctttttataggttgttcttaatttttttgttgttgttgttcaagcttttcctttcttttttttcttagtgtttgggccacgattttaaaatgacttttattatgggtatgtgttgccaaagctggctttttgtcaaataaaatgaatacgaacttaaaaaataaaagctggtatcttaaaatgtaagagagtaagactgtgaagcctaaaatgactggctgagaatgaaccagaaatgccatttgccaaacagttgtaactagaaatttgattctcacagtccattcttttctttgtccttaagatgacattgttagtgttcacgtcccatgttcagtgtccaaaccggcaatgtaaaaagtatcctgtgtggcttaacaggaaatctgtttatgtctctttatttgaaaccagttttactctcagtggttctttaagttcaatgaagtctgccaggaacattggttggtagtattattccgacacctttaatttccaaaatctgaagttcctgctagtttaccaccttcatgatcttcttgaactggtaactgattaggttgaacttatggaagatttgtggacttaactcaaaagtaacctctcagtgttctatagaacatgtatttgtgtaactgaacctaccaggagaaatgtttggaattctatatgtgcaatttttcaacaaatgcaaaaaaaatacagcacatgtattgacaagcttctgtcaagcagcttgagttgaaatttgatttaagaaaataaatcatgattgttcaaagctgctgggacgttagaattaggccatgatactggtctcattttaactacagtggtatttggcactagtgtaaacttccatataaatcactcttttggaacaacaaagggggagggagaaaaatcacggcctgttaaatgagtaccaaagccgcccaacagtaatgagatgttctcatccttgattctcccagcctcaaacaacacagcttactttttttttcccttgctcagaaagtacctgtaatttaacaaacagactgcctgtaggtatagtgcaattacaaatgctctaatcattgtacatacatctctcttgatattgcagcatccatactggctttgtaatcattaattttttggcagattgaatgtgctgtattgatatgtatctatgtaattgtattgtatgtctatagctaattcacgttttgaataatgttattttatttacttttttaagagaggagaatgtaaatttgtcagtttatttctgactagggatattttctttccatttagaaaagaagaaaaaaaaaaaaccttactgtcatacagagcggtactagcgtcgtgctgtataaaatcatttgcacattcctgagtagaggtatactgattataagacccaaaggtaatttcatagcaaaatacataaaatcagtcggagcttttatacaaacatggaaaccaactttgtagaacttttgccatttgatctaggattggaatatgagcttttatacaattcatattcttatttggcaaatgcacagtttagtattacctctctgatggcctttactagaaaggcagttttagaagctattgtgatccactaaggaaatgttttaacagctagagaccactgcttgcctgaaagggcgttcttaaatttggtgcagcaaaaaaaaaaaaaaaaaaaaaaaaaaaattaaacaacaacatttgaaggcctacagtgtgtatagagaaaacctcatcacaagatcataagtgttacagttttagggaatcaagatattctatttaatagagctatagtaaatgtagtcaattaaacctgatctcaaagcttgaagaagctgagcaaaacagggaaagattgttatatttgtctttatgaaattgggatggaatttgctatgcagaattgaggtttgtggctttgctgttcctgtagggtgcatgacaagatcccttctcttgagaaaggaaaaaattgatcaccctagcagcagtgatgcatagaaacctaattttagccacaccagtcaatcgaagctaaaggattttcttttttgtttcttcggggttttattgaaggggctaggggcgggacgggattcttttcagttttgtataaaaacaaagtttactcatgctttatattatattgtgattgcaagcgttataagcgtgtgccactggcctcctattgttgatgcttaggtaatggaggcctgtggtgagttttatggtgacttgggcatgtcttattcaaaaacaaaaacataaaacacagaaacctttcttcagcataccaaggcaagcagccatttcatgactcacttaacacattgcagtgtaccagtttacagatgatttttccctttttgcgtgacatggcagttctaacccccagagaattccttatttgtaaattggaagtttctactatgccttacagagcttaaattcaggaagtttgtgcctcatatctggaaacaaagggaaataacacacccattcaaaagtaaataaatctcctagaagtttttgtttttaacatttccatataaagagctctgttgaatgtcatgaatagactggaaaaaaaaattttaagaacctgcatatgttgtttactagcagatgacaactacaaaaggaatctgaagaacacgtaaaacttgtatttttttttttttggtagattaactagcaggcctattttaaaaaggtaattcagctaaagggcaatttacttttttgtacttcagactatcttgattgtcaaagtgtacgaactgtaattttaaaatttatactgccacatgattgtaaattttagttgtcttaagttaggaattggtgaaaagctatttatgctggatttgggtcaaaatgacttatttgcaaaaaaataaataatgggaagaaagggctgtataatgaaatactgcaagactcacatattggttggaaatttccctcaaatcacctaccgattacccttgatttccctttgttttcagtttctcaaaacgaatgaaatgaaatatagcagaatgttaacccatataaaaataaagtgtacccaaatattgtaatgtatattgctgctcttcttcaaattaaataagggtttaaaaccacttaattggtaatcaacatctcaattgatacaaataaggtgtgcttggtatacattaatattttcttccaaagatatatctttggttagaaacacaaaaaaataaaactagtaatattgtatgtttatctatctctacatatttccagcatatgtagcgttaatagatctgtcctggtaactgtgtctttgggatttcattttggttccatcaaattaggaaaagaaatggcttagttgtatatgattagctagagatttttggagccagacacctgctgtttagtagataacttagtacagaccctaaacttgtcatttgtttttctcacagaatagccatttcctgctgtcttcccaatgatcactgccctttcaataacactcttgcctctagaatcatatgttcaaagtatgaatacacacctagcacatagtaggtgctcaaatattaatttcctccttgccttccttatctaccctgtgtcctccatttccccgtatgattccaacccaatatagcaaatgacatttacatgttatgaaaacatctattgggtaaaatcagatcttggataaagaaattctgacttttatataagcttttggtagacagaaaaaacagaaaggtattcgttggtagaacatttttaagttcaggaaagaaagctggaataatactacgtaactttgtccaggttactttgactgaaacacgtttttggtggatttcttttcctcaaagaactctctaaatgcaactccttgctggattcctcacccatcatcctgttggaaacccttactagacctatgtatttagggagttttgtcagaaaacatttttaacttgcagtatttaaaagaatatttactgttcctaaaatgtcattcaaatgcatgtactgtctattgtttggggatgggaactagttttgcaaaaaacacctaatgttgtataataatgccccaatgatcttgctggttaaaaatacagtatttttggccata

SEQ ID NO: 440088 - DNA, 3776 bp, Homo sapiens
cggccgctcgctgcggggacaccccggtgaatgagctctcgccgccaggcgcacggcgtaggggagcctcgcaggcggcggcggcggcggcggctcggggggcgaggcgggccgcctgttcccggggaaggaggcgcgggcgtctgagcgaggccgggcgcggcggccttctctcacgcgccccccgagccagcgcccgcctcccgcgcccgcctctcttctcccgtcggcccagactatccgctcccaccgcgcccccggcccacctggtggccccggccctggccgccgcccccgcggctgtgcccgggagctcgtcccggacgcgcgaccgggcggcgggggctcggcggccaccgctgcctcaagggagcgagggcgggagggtgtgtgtgcgcggctgtgagcaggggtgccggcggggctgcagcggaggcactttggaagaatgactctggagtccatcatggcgtgctgcctgagcgaggaggccaaggaagcccggcggatcaacgacgagatcgagcggcagctccgcagggacaagcgggacgcccgccgggagctcaagctgctgctgctcgggacaggagagagtggcaagagtacgtttatcaagcagatgagaatcatccatgggtcaggatactctgatgaagataaaaggggcttcaccaagctggtgtatcagaacatcttcacggccatgcaggccatgatcagagccatggacacactcaagatcccatacaagtatgagcacaataaggctcatgcacaattagttcgagaagttgatgtggagaaggtgtctgcttttgagaatccatatgtagatgcaataaagagtttatggaatgatcctggaatccaggaatgctatgatagacgacgagaatatcaattatctgactctaccaaatactatcttaatgacttggaccgcgtagctgaccctgcctacctgcctacgcaacaagatgtgcttagagttcgagtccccaccacagggatcatcgaatacccctttgacttacaaagtgtcattttcagaatggtcgatgtagggggccaaaggtcagagagaagaaaatggatacactgctttgaaaatgtcacctctatcatgtttctagtagcgcttagtgaatatgatcaagttctcgtggagtcagacaatgagaaccgaatggaggaaagcaaggctctctttagaacaattatcacatacccctggttccagaactcctcggttattctgttcttaaacaagaaagatcttctagaggagaaaatcatgtattcccatctagtcgactacttcccagaatatgatggaccccagagagatgcccaggcagcccgagaattcattctgaagatgttcgtggacctgaacccagacagtgacaaaattatctactcccacttcacgtgcgccacagacaccgagaatatccgctttgtctttgctgccgtcaaggacaccatcctccagttgaacctgaaggagtacaatctggtctaattgtgcctcctagacacccgccctgcccttccctggtgggctattgaagatacacaagagggactgtatttctgtggaaaacaatttgcataatactaatttattgccgtcctggactctgtgtgagcgtgtccacagagtttgtagtaaatattatgattttatttaaactattcagaggaaaaacagaggatgctgaagtacagtcccagcacatttcctctctatcttttttttaggcaaaaccttgtgactcagtgtattttaaattctcagtcatgcactcacaaagataagacttgtttctttctgtctctctctctttttcttttctatggagcaaaacaaagctgatttcccttttttcttcccccgctaattcatacctccctcctgatgtttttcccaggttacaatggcctttatcctagttccattcttggtcaagtttttctctcaaatgatacagtcaggacacatcgttcgatttaagccatcatcagcttaatttaagtttgtagtttttgctgaaggattatatgtattaatacttacggttttaaatgtgttgctttggatacacacatagtttcttttttaatagaatatactgtcttgtctcactttggactgggacagtggatgcccatctaaaagttaagtgtcatttcttttagatgtttaccttcagccatagcttgattgctcagagaaatatgcagaaggcaggatcaaagacacacaggagtcctttcttttgaaatgccacgtgccattgtctttcctcccttctttgcttctttttcttaccctctctttcaattgcagatgccaaaaaagatgccaacagacactacattaccctaatggctgctacccagaacctttttataggttgttcttaatttttttgttgttgttgttcaagcttttcctttcttttttttcttagtgtttgggccacgattttaaaatgacttttattatgggtatgtgttgccaaagctggctttttgtcaaataaaatgaatacgaacttaaaaaataaaagctggtatcttaaaatgtaagagagtaagactgtgaagcctaaaatgactggctgagaatgaaccagaaatgccatttgccaaacagttgtaactagaaatttgattctcacagtccattcttttctttgtccttaagatgacattgttagtgttcacgtcccatgttcagtgtccaaaccggcaatgtaaaaagtatcctgtgtggcttaacaggaaatctgtttatgtctctttatttgaaaccagttttactctcagtggttctttaagttcaatgaagtctgccaggaacattggttggtagtattattccgacacctttaatttccaaaatctgaagttcctgctagtttaccaccttcatgatcttcttgaactggtaactgattaggttgaacttatggaagatttgtggacttaactcaaaagtaacctctcagtgttctatagaacatgtatttgtgtaactgaacctaccaggagaaatgtttggaattctatatgtgcaatttttcaacaaatgcaaaaaaaatacagcacatgtattgacaagcttctgtcaagcagcttgagttgaaatttgatttaagaaaataaatcatgattgttcaaagctgctgggacgttagaattaggccatgatactggtctcattttaactacagtggtatttggcactagtgtaaacttccatataaatcactcttttggaacaacaaagggggagggagaaaaatcacggcctgttaaatgagtaccaaagccgcccaacagtaatgagatgttctcatccttgattctcccagcctcaaacaacacagcttactttttttttcccttgctcagaaagtacctgtaatttaacaaacagactgcctgtaggtatagtgcaattacaaatgctctaatcattgtacatacatctctcttgatattgcagcatccatactggctttgtaatcattaattttttggcagattgaatgtgctgtattgatatgtatctatgtaattgtattgtatgtctatagctaattcacgttttgaataatgttattttatttacttttttaagagaggagaatgtaaatttgtcagtttatttctgactagggatattttctttccatttagaaaagaaaatatccctagtcagaaataaactgacaaatttacattctcctctcttaaaaaaa

SEQ ID NO: 440089 - DNA, 2427 bp, Homo sapiens
gtgcttttggcatttaaacagatttaacttggatacattggaatacaggtgaggacagaaggttctagacctgtatttccccttactgcatttctaccatggtaggaagacattcctaggtcaaaggaagaatgagaaacatgagggaatatcaacacttagagtgagagatactatgaaaatatgacatggtaggaagacattcctaggtcaaaagaagaatgagaaacacaagggaatatcaacacttagagtcagagatactatgaaaatatgaaattccacagcaaggtcttccgagcctctaactctgcaaacttcctgacctggagagccttagccagctccatctgctgtgtacatgccttgcacacttgcacctctggcactgtcctctcacgaacggctgtctgttacctttctggacctaatcgccctgctctgtagtggcccttgcccctcactcacaggcttactgaagcaaaggcaagaatagaaaacaaagcatattttccatagctagatctctctgggaaacattgctgaatatttaatttggtctccaaatttgtttatttccccagtactcttagggaattaaaattttctaggcaagacaatggcagagaagttgatataaacatgcgtaccccccttagtttccggtcaaaacatcagagttggcatgcccatctctggttttgaagagcagcagataaactccatttcagtaaaagggtttggcaacatcagtgtataaaccactttcctcaatgtagcgtttgagagagtatttactccctcatagaaacttcataggaacatggcatttctccaagggtccttaatcatcaagggcctggagactaaccagctactttggaataatacttttaaaattatgaatagatataaggtgtgtttacttaatatagtgtgtggtattcgctacatttttttcaatttgcataatagcttattgggcagaagatttgtagactttgggatcatcctatgagttctaacatcatttcgcggaaccacgtgacgcgactgcttcagaactataagaaacaggtgagtttctctgaaagcacagccaactaaatgtttttaggatcctgtttgcccgtgacaacatatctgtatggacagcaattacagttcttatcactttattttaaaattgtgcttattgtggagaatcagcttacaccagaagtggtttcccttttagcctcggaattctatgattaacaagtcatcgttcagtgtagaatttctgcctctgaactacttcattgaaattctgacagatatagagtcctccaatcaaggtaatttactcccctgttctcagggtcttaccacttttcccttgacacatcagtccttccctattcacttctttgtcttctttccaaaatccttttaacatacaagtagacccttatagcaattggtttacattagcagtaccaaatttactacctagagtaaattaccaaataatcacctctgaagttttaaaagagtcaagaggtttaaagcccatttggttgatgcaaatgttcttggtgctgaagtttaaatttaagaacacattcttaaaaaattcattttactaaaatacaattatgattttaatgagctgtgagcacaaagttataaatgtttcacggacccatggtaaccctttttccctgccctctccccatttttttccagccctgtatccttttgaaggacatgacaatgtggatgcagaatttgtagaggaagcagctctgaaacacaccgcgatgcttttaggcttatgaaaaagaaaacgcaattggatctgctgctgccattttaatcttgctcattaaccttactcctttgagaattctttaacaatatttaaaattggtaacaaaaatagtttagccataattgtttagccatgtgagtttcaggttggtacacgttcagacagaactgctgtatcacattccaattttgaatagccagtgagcaatcaagtgtagagaaatgataaatggcctaagaaggcatacagtggcataaacgatgctcttcctagtagcttaataggccacaagctagtttctgttgcactctgaaataaaatatgctttaaaaatgtagggaacagtgcttagaaaagcaaaaactaggtgtgtcattgaaataataggcataaaaattaaatgttacataagaacactatttggaaagagggtccttttaaaaactgaatttgtactaaatcagatttgccatgtccagtacagaataatttgtacttagtatttgcagcagggtttgtctttgtgaattcagatgaaacatatttatttttttttatttataaaaggttgatttaggaatattttgtcagtcattaaaaaacctgaaaacata

SEQ ID NO: 440090 - DNA, 752 bp, Homo sapiens
  misc_feature (1)..(2): n is a, c, g, or t
nnacagagcctgggctcactgaccagcccaggaggaaccagcctctgccttaccaggccatcaatccctgaagccaggggatctgccctgccagacacgggcatgtgtgtgtgtgtttcaggcttatcatccttgcattgctgggggtttcgcaacacggggaacgttgctggtctggctgaggtttctgtcgtgccacccctcctgccctgcttatggagctactgtatgtgtcagggccgtttgcatcctgttactagtcagtctatcttaatgcactttaggaaactcttccctttccttgcacgtgctttgcgtatactagttccccataaagaatgtcactgcctgaaacagaacattctgtgaaatgcagggctgttggattcacatgttaaattgtttcatctcaatcacgagggttgtgtaggatccagggaagatttatcccggggggtcaagagatatcgatgccctcccagaaggagttgccagcccactgagcagggtggttctgccctcttgcctggcactggatctcaagtatttaagaagaaaagaatggaatacaaagaagttagaagcgctttggggcagattttccagcaagactgggtttgtctgcccctagggccactacactgtagtgtggcttgtcctccggggggcacagtccccttggttacatatcattttccctttatataaacccttgtagctctgtgccccaacatcttgtgcgcttgggcccc

SEQ ID NO: 440091 - DNA, 3640 bp, Homo sapiens
  misc_feature (2121)..(2121): n is a, c, g, or t
  misc_feature (2231)..(2231): n is a, c, g, or t
tgactttgttggttgaaatccaccctgttaacaatgtgaaggttctaaaggctgtggatagctatatttgggttcagtttctctacccacatattgaaagtcatcctcttccagagaaccatctgttactgatttcagaagagaaatatattgaacaatttcgtatccatgtcgcccaagaagatggaaatagagtggtgattaaaaattctggccatctcccaagagacagaatagctgaggatttcgtttgggctcagtgggatatgtcagaacagagattatattacattgacctgaagaaatcaaggagtatcttaaaatgtatccagttttatgctgatgagagctataacttaatgtttgaagtacccttggacatatcattaagcaactcaggatttaaacttgtcaactttggatgtgattatcatcaataccgagataaattttccaaacacctgactctgtgtgtttttaccaaccatacaggaagtttgtgtgtatgttacagcccgaagtgtgcctcttggggacaaatcacatattcagtgttttacattcataaaggacacagcaagaccttcaccacttctcttgagaatgttgggtcacacatgacaaagggcattacttttctcaaccttgactattatgtggctgtttacttacctggtcatttcttccacctacttaatgttcaacatccagacctgatctgccacaatctctttctgacaggaaataatgaaatgattgatatgctacctcattgccctttacagtcattgtcagggtccctggtattggattgttgttctggaaagctctatagagcactgctcagccagtcgtctttattacagcttctgcagaacacttgcttagactgtgagaagatggctgcgttgcactgcgcgctctactgcggtcaaggtgcgcagttcctggaagcccagattattcagtggatttctgagaatgtctctgcctgccattcatttgacctcattcaggaatttataattgcttcttcatactggagtgtatattcagagacaagtaacatggacaaactattgccacattcctcagtgctcacttggaatacagaaattcctggaataactcttgtgacagaagacattgcattgcctcttatgaaggtgctcagctttaagggctactgggaaaaactgaactccaacctagaatatgttaagtacgccaagccacacttccactataacaacagtgtggtcaggagagagtggcacaacctgatctctgaagaggtatgagtgggtcagtgagaacaaagccagcagcgaggcatagtggactggatccaggtgatgcctttaaatcataaggctggcttccatgtgcagcactcttcccaattgccagggacttgatcattgtcattactgatctcaatgggcagagatgcttctatgatctctgttctcctagggaggaaactgaaaagcagaaagtttaaggggacacacagcacattcatagtagaagtatgattaatatccatgtctcagatgtgttctcaggttacttatgtagttaaaaattgatattaaaaaatctaggtgttcccaacttagtggtcattaggggttggggtagttggagggagaatagtggacgtgactcactgtccaggggtgacccagggaaatctttgggggtgatcgaagacttctatgtgttgattgtggtggtacattgtgggacatgaatctaaacatgataaaatgacatagaatgacacacacacattgtgccaatgtcaatttttgattttgatattgtgctctagttaggtaagatataagcactgaggagactgggtggagggtacattgcatctctctctagtatcgctgcatgtagattagtgttgttgtgtgtagtatatagttgactcgcagtttcctgtgaatctgtaattgtttcagaataaaatatttcttaaaactttaaaaaaaatctaggtgttctgattacctggaaagtatatttcttctctctgatgctcttaactgtattgcattatatccttgacgtgaaaagtcaccgataaaacctttaccttccacattnctgacgtgttctcactcctagaaaacaggaaaaagaaggtctgcggcatacgtgaggaatattcttgataatgcagtaaaggtgatttctaacctagaagcaagaaattnggggccaagattaacacccctcctgcaggaggaagacagccaccagcggctgctcatggggctgatggtgtctgagctaaaagaccattttttgagacacctacagggtgtagaaaagaagaaaattgaacagatggttctggactacatttcaaaactgctggatctcatttgccacatcgtagaaaccaattggaggaaacataatcttcattcctgggttctccacttcaatagtcgtggcagtgctgctgaatttgcagtttttcacatcatgaccaggattctggaagctacaaacagtttgtttttacctctgcctcctggttttcatactctgcacaccatcctcggggtccagtgtctccctttgcataacctgctgcattgcattgacagtggagtgttgcttctcactgaaacagctgtcataaggctcatgaaagatctggataatacagagaaaaatgaaaaactgaaattcagtatcattgtgcggcttcctccgcttattgggcagaagatttgtagactttgggatcatcctatgagttctaacatcatttcgcggaaccacgtgacgcgactgcttcagaactataagaaacagcctcggaattctatgattaacaagtcatcgttcagtgtagaatttctgcctctgaactacttcattgaaattctgacagatatagagtcctccaatcaagccctgtatccttttgaaggacatgacaatgtggatgcagaatttgtagaggaagcagctctgaaacacaccgcgatgcttttaggcttatgaaaaagaaaacgcaattggatctgctgctgccattttaatcttgctcattaaccttactcctttgagaattctttaacaatatttaaaattggtaacaaaaatagtttagccataattgtttagccatgtgagtttcaggttggtacacgttcagacagaactgctgtatcacattccaattttgaatagccagtgagcaatcaagtgtagagaaatgataaatggcctaagaaggcatacagtggcataaacgatgctcttcctagtagcttaataggccacaagctagtttctgttgcactctgaaataaaatatgctttaaaaatgtagggaacagtgcttagaaaagcaaaaactaggtgtgtcattgaaataataggcataaaaattaaatgttacataagaacactatttggaaagagggtccttttaaaaactgaatttgtactaaatcagatttgccatgtccagtacagaataatttgtacttagtatttgcagcagggtttgtctttgtgaattcagatgaaacatatttatttttttttatttataaaaggttgatttaggaatattttgtcagtcattaaaaaacctgaaaacata

SEQ ID NO: 440092 - DNA, 3171 bp, Homo sapiens
  misc_feature (1)..(2): n is a, c, g, or t
nnacagagcctgggctcactgaccagcccaggaggaaccagcctctgccttaccaggccatcaatccctgaagccaggggatctgccctgccagacacgggcatgtgtgtgtgtgtttcaggcttatcatccttgcattgctgggggtttcgcaacacggggaacgttgctggtctggctgaggtttctgtcgtgccacccctcctgccctgcttatggagctactgtatgtgtcagggccgtttgcatcctgttactagtcagtctatcttaatgcactttaggaaactcttccctttccttgcacgtgctttgcgtatactagttccccataaagaatgtcactgcctgaaacagaacattctgtgaaatgcagggctgttggattcacatgttaaattgtttcatctcaatcacgagggttgtgtaggatccagggaagatttatcccggggggtcaagagatatcgatgccctcccagaaggagttgccagcccactgagcagggtggttctgccctcttgcctggcactggatctcaagtatttaagaagaaaagaatggaatacaaagaagttagaagcgctttggggcagattttccagcaagactgggtttgtctgcccctagggccactacactgtagtgtgcattgcaaatcatggtggagaaggtaccatttgatttaacatatcacttttccacctttacctaactacctttgtagtctgataacttgtgccagttagtattatttgctgcagtaattgactggccccctcagctcagtaactcccaaggctactgaactacagggttcagaaagtagaagggagccatgcagtccttccaccgagcgctgttccctcaatttatgaccccagaagggttaagagaaggcccaagtccctctgtttccagtggagcagaggttcttagcagtgagttttagtgttgaacaaaaatcaaagctagagcctactggggttgaggaatgtgttggtttctttctttctcggtcattccctgtttcacacagctctgataagttcaccttgtaggactaggtcacacttaggtgatgaaaaattttcatcctgtgttatgttttctcaatgactcagagaagggaaacccaggctgattcttcttccttctaacccatctcctgaaaactgctcagagcctaactattgctctgtttcatttcagggccaagattaacacccctcctgcaggaggaagacagccaccagcggctgctcatggggctgatggtgtctgagctaaaagaccattttttgagacacctacagggtgtagaaaagaagaaaattgaacagatggttctggactacatttcaaaactgctggatctcatttgccacatcgtagaaaccaattggaggaaacataatcttcattcctgggttctccacttcaatagtcgtggcagtgctgctgaatttgcagtttttcacatcatgaccaggattctggaagctacaaacagtttgtttttacctctgcctcctggttttcatactctgcacaccatcctcggggtccagtgtctccctttgcataacctgctgcattgcattgacagtggagtgttgcttctcactgaaacagctgtcataaggctcatgaaagatctggataatacagagaaaaatgaaaaactgaaattcagtatcattgtgcggcttcctccgcttattgggcagaagatttgtagactttgggatcatcctatgagttctaacatcatttcgcggaaccacgtgacgcgactgcttcagaactataagaaacaggtgagtttctctgaaagcacagccaactaaatgtttttaggatcctgtttgcccgtgacaacatatctgtatggacagcaattacagttcttatcactttattttaaaattgtgcttattgtggagaatcagcttacaccagaagtggtttcccttttagcctcggaattctatgattaacaagtcatcgttcagtgtagaatttctgcctctgaactacttcattgaaattctgacagatatagagtcctccaatcaaggtaatttactcccctgttctcagggtcttaccacttttcccttgacacatcagtccttccctattcacttctttgtcttctttccaaaatccttttaacatacaagtagacccttatagcaattggtttacattagcagtaccaaatttactacctagagtaaattaccaaataatcacctctgaagttttaaaagagtcaagaggtttaaagcccatttggttgatgcaaatgttcttggtgctgaagtttaaatttaagaacacattcttaaaaaattcattttactaaaatacaattatgattttaatgagctgtgagcacaaagttataaatgtttcacggacccatggtaaccctttttccctgccctctccccatttttttccagccctgtatccttttgaaggacatgacaatgtggatgcagaatttgtagaggaagcagctctgaaacacaccgcgatgcttttaggcttatgaaaaagaaaacgcaattggatctgctgctgccattttaatcttgctcattaaccttactcctttgagaattctttaacaatatttaaaattggtaacaaaaatagtttagccataattgtttagccatgtgagtttcaggttggtacacgttcagacagaactgctgtatcacattccaattttgaatagccagtgagcaatcaagtgtagagaaatgataaatggcctaagaaggcatacagtggcataaacgatgctcttcctagtagcttaataggccacaagctagtttctgttgcactctgaaataaaatatgctttaaaaatgtagggaacagtgcttagaaaagcaaaaactaggtgtgtcattgaaataataggcataaaaattaaatgttacataagaacactatttggaaagagggtccttttaaaaactgaatttgtactaaatcagatttgccatgtccagtacagaataatttgtacttagtatttgcagcagggtttgtctttgtgaattcagatgaaacatatttatttttttttatttataaaaggttgatttaggaatattttgtcagtcattaaaaaacctgaaaacata

SEQ ID NO: 440093 - DNA, 1867 bp, Homo sapiens
gctgctcatgccaaacctggctttttctactgtccgcactcatttccactgataggaattgcatctgtcctttgaagctccccgcaaatgccatcacttccaagagagctgttttgattctctcctggtctgataccttctcccatgcatgatgtttttatctgttgtcagtagtagtatacttagagatctgggtttctgtgggtagctctacccgtgagacaggcttgagaatgcctgcctctcaattgaattcctataaatttactatctggccatattgtcttaattctttcttttctatactttagtccaagtagactctaaaagcctttctctagggcatacccagagataagccatataaactattgccttctggtccaaatttgtttcccttcagcaaaatggtcctcatcccaacaaccttttagtctggacatacgaaatctgaaatgcttctgtactcttttgctatcttactgtagaatcacaaacatatcaaaccgtaaaaccattgagcaggcccttgctctgtttctgtgcaggaagagacccaaggagcaaggaatgtatacttaccggaaacttactatagacccagcgtgatatttagttacgaataatacagagaaggaaacttggaccttgttttcaagaaattcagttggttccaggcaccaagcactgaactaagtgctttattaacatgatctaatccattccccgggggctgctggagatgttggctgactgtgtttaccctccagatctctcatcctaggttttcatactctgcacaccatcctcggggtccagtgtctccctttgcataacctgctgcattgcattgacagtggagtgttgcttctcactgaaacagctgtcataaggctcatgaaagatctggataatacagagaaaaatgaaaaactgaaattcagtatcattgtgcggcttcctccgcttattgggcagaagatttgtagactttgggatcatcctatgagttctaacatcatttcgcggaaccacgtgacgcgactgcttcagaactataagaaacagcctcggaattctatgattaacaagtcatcgttcagtgtagaatttctgcctctgaactacttcattgaaattctgacagatatagagtcctccaatcaagccctgtatccttttgaaggacatgacaatgtggatgcagaatttgtagaggaagcagctctgaaacacaccgcgatgcttttaggcttatgaaaaagaaaacgcaattggatctgctgctgccattttaatcttgctcattaaccttactcctttgagaattctttaacaatatttaaaattggtaacaaaaatagtttagccataattgtttagccatgtgagtttcaggttggtacacgttcagacagaactgctgtatcacattccaattttgaatagccagtgagcaatcaagtgtagagaaatgataaatggcctaagaaggcatacagtggcataaacgatgctcttcctagtagcttaataggccacaagctagtttctgttgcactctgaaataaaatatgctttaaaaatgtagggaacagtgcttagaaaagcaaaaactaggtgtgtcattgaaataataggcataaaaattaaatgttacataagaacactatttggaaagagggtccttttaaaaactgaatttgtactaaatcagatttgccatgtccagtacagaataatttgtacttagtatttgcagcagggtttgtctttgtgaattcagatgaaacatatttatttttttttatttataaaaggttgatttaggaatattttgtcagtcattaaaaaacctgaaaacata

SEQ ID NO: 440094 - DNA, 3443 bp, Homo sapiens
  misc_feature (2121)..(2121): n is a, c, g, or t
  misc_feature (2231)..(2231): n is a, c, g, or t
tgactttgttggttgaaatccaccctgttaacaatgtgaaggttctaaaggctgtggatagctatatttgggttcagtttctctacccacatattgaaagtcatcctcttccagagaaccatctgttactgatttcagaagagaaatatattgaacaatttcgtatccatgtcgcccaagaagatggaaatagagtggtgattaaaaattctggccatctcccaagagacagaatagctgaggatttcgtttgggctcagtgggatatgtcagaacagagattatattacattgacctgaagaaatcaaggagtatcttaaaatgtatccagttttatgctgatgagagctataacttaatgtttgaagtacccttggacatatcattaagcaactcaggatttaaacttgtcaactttggatgtgattatcatcaataccgagataaattttccaaacacctgactctgtgtgtttttaccaaccatacaggaagtttgtgtgtatgttacagcccgaagtgtgcctcttggggacaaatcacatattcagtgttttacattcataaaggacacagcaagaccttcaccacttctcttgagaatgttgggtcacacatgacaaagggcattacttttctcaaccttgactattatgtggctgtttacttacctggtcatttcttccacctacttaatgttcaacatccagacctgatctgccacaatctctttctgacaggaaataatgaaatgattgatatgctacctcattgccctttacagtcattgtcagggtccctggtattggattgttgttctggaaagctctatagagcactgctcagccagtcgtctttattacagcttctgcagaacacttgcttagactgtgagaagatggctgcgttgcactgcgcgctctactgcggtcaaggtgcgcagttcctggaagcccagattattcagtggatttctgagaatgtctctgcctgccattcatttgacctcattcaggaatttataattgcttcttcatactggagtgtatattcagagacaagtaacatggacaaactattgccacattcctcagtgctcacttggaatacagaaattcctggaataactcttgtgacagaagacattgcattgcctcttatgaaggtgctcagctttaagggctactgggaaaaactgaactccaacctagaatatgttaagtacgccaagccacacttccactataacaacagtgtggtcaggagagagtggcacaacctgatctctgaagaggtatgagtgggtcagtgagaacaaagccagcagcgaggcatagtggactggatccaggtgatgcctttaaatcataaggctggcttccatgtgcagcactcttcccaattgccagggacttgatcattgtcattactgatctcaatgggcagagatgcttctatgatctctgttctcctagggaggaaactgaaaagcagaaagtttaaggggacacacagcacattcatagtagaagtatgattaatatccatgtctcagatgtgttctcaggttacttatgtagttaaaaattgatattaaaaaatctaggtgttcccaacttagtggtcattaggggttggggtagttggagggagaatagtggacgtgactcactgtccaggggtgacccagggaaatctttgggggtgatcgaagacttctatgtgttgattgtggtggtacattgtgggacatgaatctaaacatgataaaatgacatagaatgacacacacacattgtgccaatgtcaatttttgattttgatattgtgctctagttaggtaagatataagcactgaggagactgggtggagggtacattgcatctctctctagtatcgctgcatgtagattagtgttgttgtgtgtagtatatagttgactcgcagtttcctgtgaatctgtaattgtttcagaataaaatatttcttaaaactttaaaaaaaatctaggtgttctgattacctggaaagtatatttcttctctctgatgctcttaactgtattgcattatatccttgacgtgaaaagtcaccgataaaacctttaccttccacattnctgacgtgttctcactcctagaaaacaggaaaaagaaggtctgcggcatacgtgaggaatattcttgataatgcagtaaaggtgatttctaacctagaagcaagaaattnggggccaagattaacacccctcctgcaggaggaagacagccaccagcggctgctcatggggctgatggtgtctgagctaaaagaccattttttgagacacctacagggtgtagaaaagaagaaaattgaacagatggttctggactacatttcaaaactggttggtcttgctttttattctcctcatatgccccttcaccccactccccatatagttctgaaaatgtggtgcagggaacccatttatgtgtttttcaaattagatttttggagatctcccgttcttaaatcagtatttggtgctgtagattgagaaaagggaaataaggaccataaacaaagagcatttggtttggaaagtggtttattgcccttccttcaaatactgattatatacccatggatgcataggacaatgaatttagtatgcttgccaaatgttaatatctcatcttggcaacttccagctccatgtagatgatttctgtacatggaggtttatgcagacaggagagaacttgaacttcaaatcttaattagttccagtagcctaagtaggccagattctagctcacttgtattaatactaccatgtgaggctgagattggcagttccttacctggtagccacttactgaaattttgtgatccagattagtaacaccactgtatgtgtaaatagtagtgataggactagattgaattttaaggttgtcttgagtctttcaaaaagcatagagagttgaggcctgatcttgcttagagtctagaaataatgtttgacaaattcaaaaaaatgtttgcacagaaagagaaagaacactccattatttctccaaatttgtataagaccagtatgcaaataagccagtgtgtgaacatatatttttccattgaactctggaagatttgttaaatttattagctataatcctgatttaatcatttcatgtttaattttcaagttttctgcctttattgcagccattagtgttgtttctacgtaatatatttgaatttctatagtaaggtttgagtttcatagtatttaatatattaggagaggttagtattctcatgtagtgatatttataatcagggatttgaatctttcttaagtctccttctcaatagcactgtaccaaggaactcacttgatgaatgtgttactgatcctccccatgttgacattaacttgctttaaaaaaaaaa

SEQ ID NO: 440095 - DNA, 1259 bp, Homo sapiens
tgactttgttggttgaaatccaccctgttaacaatgtgaaggttctaaaggctgtggatagctatatttgggttcagtttctctacccacatattgaaagtcatcctcttccagagaaccatctgttactgatttcagaagagaaatatattgaacaatttcgtatccatgtcgcccaagaagatggaaatagagtggtgattaaaaattctggccatctcccaagagacagaatagctgaggatttcgtttgggctcagtgggatatgtcagaacagagattatattacattgacctgaagaaatcaaggagtatcttaaaatgtatccagttttatgctgatgagagctataacttaatgtttgaagtacccttggacatatcattaagcaactcaggatttaaacttgtcaactttggatgtgattatcatcaataccgagataaattttccaaacacctgactctgtgtgtttttaccaaccatacaggaagtttgtgtgtatgttacagcccgaagtgtgcctcttggggacaaatcacatattcagtgttttacattcataaaggacacagcaagaccttcaccacttctcttgagaatgttgggtcacacatgacaaagggcattacttttctcaaccttgactattatgtggctgtttacttacctggtcatttcttccacctacttaatgttcaacatccagacctgatctgccacaatctctttctgacaggaaataatgaaatgattgatatgctacctcattgccctttacagtcattgtcagggtccctggtattggattgttgttctggaaagctctatagagcactgctcagccagtcgtctttattacagcttctgcagaacacttgcttagactgtgagaagatggctgcgttgcactgcgcgctctactgcggtcaaggtgcgcagttcctggaagcccagtggaggcagagagcagatttaaataccaacagagttctgtctgactttttaaagattattcagtggatttctgagaatgtctctgcctgccattcatttgacctcattcaggaatttataattgcttcttcatactggagtgtatattcagagacaagtaacatggacaaactattgccacattcctcagtgctcacttggaatacaattgtgcagggtggagcagctattgtggacacgcacagggtgacatcaggaagtccaagaagagcgatataaagaaacctgtggttataacct

SEQ ID NO: 440096 - DNA, 386 bp, Homo sapiens
caggaaaaagaaggtctgcggcatacgtgaggaatattcttgataatgcagtaaagtaagtgaaagcagaggttatcatatctgtaagatggttgacatttacaattactttgttttgttggctaccttttatagaagtagtttacttttgttgcatatccccagcaaaataatattgtcagcttcatgaatgcagccacttggaccctattctggaatttggtgctggaatttctggtgggaaaagcttatatgttgaaccttatagacttgtaacctgcggatagatgtttacaatggataattggtaaagaaatttcctattagcattttaggagagaaaggcaaatagtaggttgattttttttttttttaaagtgtcagtg

SEQ ID NO: 440097 - DNA, 297 bp, Homo sapiens
aatgcaaaagattcatgtatatttgtacttctttggtagtggaggcagagagcagatttaaataccaacagagttctgtctgactttttaaagattattcagtggatttctgagaatgtctctgcctgccattcatttgacctcattcaggaatttataattggtaagtgttgctgatgttgcagcttaagttgaatacttgacctttttgcttgagggaaagcagtaaattgatagtgaatgcctcaacctgtccaaatgctactttggagcacattaaaaaaaaaaaacaaaact

SEQ ID NO: 440098 - DNA, 392 bp, Homo sapiens
aggagatttattaaaaagatgtataaaaaggatcataaaataccgttttacctacccagaattgcattatgtatcttgaagatagtatagaagtgagtatattcttaggcaattctaaaataggtatagaatgcaaaagattcatgtatatttgtacttctttggtagtggaggcagagagcagatttaaataccaacagagttctgtctgactttttaaagattattcagtggatttctgagaatgtctctgcctgccattcatttgacctcattcaggaatttataattggtaagtgttgctgatgttgcagcttaagttgaatacttgacctttttgcttgagggaaagcagtaaattgatagtgaatgcctcaacctgtccaaatgct

SEQ ID NO: 440099 - DNA, 2620 bp, Homo sapiens
  misc_feature (1)..(2): n is a, c, g, or t
nnacagagcctgggctcactgaccagcccaggaggaaccagcctctgccttaccaggccatcaatccctgaagccaggggatctgccctgccagacacgggcatgtgtgtgtgtgtttcaggcttatcatccttgcattgctgggggtttcgcaacacggggaacgttgctggtctggctgaggtttctgtcgtgccacccctcctgccctgcttatggagctactgtatgtgtcagggccgtttgcatcctgttactagtcagtctatcttaatgcactttaggaaactcttccctttccttgcacgtgctttgcgtatactagttccccataaagaatgtcactgcctgaaacagaacattctgtgaaatgcagggctgttggattcacatgttaaattgtttcatctcaatcacgagggttgtgtaggatccagggaagatttatcccggggggtcaagagatatcgatgccctcccagaaggagttgccagcccactgagcagggtggttctgccctcttgcctggcactggatctcaagtatttaagaagaaaagaatggaatacaaagaagttagaagcgctttggggcagattttccagcaagactgggtttgtctgcccctagggccactacactgtagtgtgcattgcaaatcatggtggagaaggtaccatttgatttaacatatcacttttccacctttacctaactacctttgtagtctgataacttgtgccagttagtattatttgctgcagtaattgactggccccctcagctcagtaactcccaaggctactgaactacagggttcagaaagtagaagggagccatgcagtccttccaccgagcgctgttccctcaatttatgaccccagaagggttaagagaaggcccaagtccctctgtttccagtggagcagaggttcttagcagtgagttttagtgttgaacaaaaatcaaagctagagcctactggggttgaggaatgtgttggtttctttctttctcggtcattccctgtttcacacagctctgataagttcaccttgtaggactaggtcacacttaggtgatgaaaaattttcatcctgtgttatgttttctcaatgactcagagaagggaaacccaggctgattcttcttccttctaacccatctcctgaaaactgctcagagcctaactattgctctgtttcatttcagggccaagattaacacccctcctgcaggaggaagacagccaccagcggctgctcatggggctgatggtgtctgagctaaaagaccattttttgagacacctacagggtgtagaaaagaagaaaattgaacagatggttctggactacatttcaaaactgctggatctcatttgccacatcgtagaaaccaattggaggaaacataatcttcattcctgggttctccacttcaatagtcgtggcagtgctgctgaatttgcagtttttcacatcatgaccaggattctggaagctacaaacagtttgtttttacctctgcctcctggttttcatactctgcacaccatcctcggggtccagtgtctccctttgcataacctgctgcattgcattgacagtggagtgttgcttctcactgaaacagctgtcataaggctcatgaaagatctggataatacagagaaaaatgaaaaactgaaattcagtatcattgtgcggcttcctccgcttattgggcagaagatttgtagactttgggatcatcctatgagttctaacatcatttcgcggaaccacgtgacgcgactgcttcagaactataagaaacagcctcggaattctatgattaacaagtcatcgttcagtgtagaatttctgcctctgaactacttcattgaaattctgacagatatagagtcctccaatcaagccctgtatccttttgaaggacatgacaatgtggatgcagaatttgtagaggaagcagctctgaaacacaccgcgatgcttttaggcttatgaaaaagaaaacgcaattggatctgctgctgccattttaatcttgctcattaaccttactcctttgagaattctttaacaatatttaaaattggtaacaaaaatagtttagccataattgtttagccatgtgagtttcaggttggtacacgttcagacagaactgctgtatcacattccaattttgaatagccagtgagcaatcaagtgtagagaaatgataaatggcctaagaaggcatacagtggcataaacgatgctcttcctagtagcttaataggccacaagctagtttctgttgcactctgaaataaaatatgctttaaaaatgtagggaacagtgcttagaaaagcaaaaactaggtgtgtcattgaaataataggcataaaaattaaatgttacataagaacactatttggaaagagggtccttttaaaaactgaatttgtactaaatcagatttgccatgtccagtacagaataatttgtacttagtatttgcagcagggtttgtctttgtgaattcagatgaaacatatttatttttttttatttataaaaggttgatttaggaatattttgtcagtcattaaaaaacctgaaaacata

SEQ ID NO: 440100 - DNA, 2043 bp, Homo sapiens
gctcttgctgagcgtgttgtctgggcaaaagggagaggagggaggaggagagagaaaagcaaaaggtggggaaggctgggaatgctaatggttggggaagtggggaggcccaaggatgatcaaacaaagcgagtatagaaacaaacctatttggaggcaccagaatgaatatttcattacctttgcatgtcaaggggctgtgttcagtgtctgtggccactgtgtagagggaagtacctgattatttcccatttactcctgcttctgtccttccaaaacacccaaaactgttgcccccattggctcagtcattctatatatagagttgttcctgttaatcccccaggactctaggagaagtagactttaatcctttggtagatcccaaagcctgtgacttctaagttggtgactttcactgtcttctttggaggattctcgtcagagttagagccttactcgcagttgctcacggggctttgggtgaatcataagtaattccttttgaggcaaatgttggggaccccttatttatgctcaccagagaaatactgagagttatgcatttccattgatgggaccttcagatccagtattttttatattgatgaagaatgttaataagtggatctaattcaaaccagttgcaggtatgagtgggtaggctgtgacttatttaatgcatatcctgttttcagatggtgtctgagctaaaagaccattttttgagacacctacagggtgtagaaaagaagaaaattgaacagatggttctggactacatttcaaaactgctggatctcatttgccacatcgtagaaaccaattggaggaaacataatcttcattcctgggttctccacttcaatagtcgtggcagtgctgctgaatttgcagtttttcacatcatgaccaggattctggaagctacaaacagtttgtttttacctctgcctcctggttttcatactctgcacaccatcctcggggtccagtgtctccctttgcataacctgctgcattgcattgacagtggagtgttgcttctcactgaaacagctgtcataaggctcatgaaagatctggataatacagagaaaaatgaaaaactgaaattcagtatcattgtgcggcttcctccgcttattgggcagaagatttgtagactttgggatcatcctatgagttctaacatcatttcgcggaaccacgtgacgcgactgcttcagaactataagaaacagcctcggaattctatgattaacaagtcatcgttcagtgtagaatttctgcctctgaactacttcattgaaattctgacagatatagagtcctccaatcaagccctgtatccttttgaaggacatgacaatgtggatgcagaatttgtagaggaagcagctctgaaacacaccgcgatgcttttaggcttatgaaaaagaaaacgcaattggatctgctgctgccattttaatcttgctcattaaccttactcctttgagaattctttaacaatatttaaaattggtaacaaaaatagtttagccataattgtttagccatgtgagtttcaggttggtacacgttcagacagaactgctgtatcacattccaattttgaatagccagtgagcaatcaagtgtagagaaatgataaatggcctaagaaggcatacagtggcataaacgatgctcttcctagtagcttaataggccacaagctagtttctgttgcactctgaaataaaatatgctttaaaaatgtagggaacagtgcttagaaaagcaaaaactaggtgtgtcattgaaataataggcataaaaattaaatgttacataagaacactatttggaaagagggtccttttaaaaactgaatttgtactaaatcagatttgccatgtccagtacagaataatttgtacttagtatttgcagcagggtttgtctttgtgaattcagatgaaacatatttatttttttttatttataaaaggttgatttaggaatattttgtcagtcattaaaaaacctgaaaacata

SEQ ID NO: 440101 - DNA, 2615 bp, Homo sapiens
  misc_feature (1)..(2): n is a, c, g, or t
nnacagagcctgggctcactgaccagcccaggaggaaccagcctctgccttaccaggccatcaatccctgaagccaggggatctgccctgccagacacgggcatgtgtgtgtgtgtttcaggcttatcatccttgcattgctgggggtttcgcaacacggggaacgttgctggtctggctgaggtttctgtcgtgccacccctcctgccctgcttatggagctactgtatgtgtcagggccgtttgcatcctgttactagtcagtctatcttaatgcactttaggaaactcttccctttccttgcacgtgctttgcgtatactagttccccataaagaatgtcactgcctgaaacagaacattctgtgaaatgcagggctgttggattcacatgttaaattgtttcatctcaatcacgagggttgtgtaggatccagggaagatttatcccggggggtcaagagatatcgatgccctcccagaaggagttgccagcccactgagcagggtggttctgccctcttgcctggcactggatctcaagtatttaagaagaaaagaatggaatacaaagaagttagaagcgctttggggcagattttccagcaagactgggtttgtctgcccctagggccactacactgtagtgtgcattgcaaatcatggtggagaaggtaccatttgatttaacatatcacttttccacctttacctaactacctttgtagtctgataacttgtgccagttagtattatttgctgcagtaattgactggccccctcagctcagtaactcccaaggctactgaactacagggttcagaaagtagaagggagccatgcagtccttccaccgagcgctgttccctcaatttatgaccccagaagggttaagagaaggcccaagtccctctgtttccagtggagcagaggttcttagcagtgagttttagtgttgaacaaaaatcaaagctagagcctactggggttgaggaatgtgttggtttctttctttctcggtcattccctgtttcacacagctctgataagttcaccttgtaggactaggtcacacttaggtgatgaaaaattttcatcctgtgttatgttttctcaatgactcagagaagggaaacccaggctgattcttcttccttctaacccatctcctgaaaactgctcagagcctaactattgctctgtttcatttcagggccaagattaacacccctcctgcaggaggaagacagccaccagcggctgctcatggggctgatggtgtctgagctaaaagaccattttttgagacacctacagggtgtagaaaagaagaaaattgaacagatggttctggactacatttcaaaactgctggatctcatttgccacatcgtagaaaccaattggaggaaacataatcttcattcctgggttctccacttcaatagtcgtggcagtgctgctgaatttgcagtttttcacatcatgaccaggattctggaagctacaaacagtttgtttttacctctgcctcctggttttcatactctgcacaccatcctcggggtccagtgtctccctttgcataacctgctgcattgcattgacagtggagtgttgcttctcactgaaacagctgtcataaggctcatgaaagatctggataatacagagaaaaatgaaaaactgaaattcagtatcattgtgcggcttcctccgcttattgggcagaagatttgtagactttgggatcatcctatgagttctaacatcatttcgcggaaccacgtgacgcgactgcttcagaactataagaaacagcctcggaattctatgattaacaagtcatcgttcagtgtagaatttctgcctctgaactacttcattgaaattctgacagatatagagtcctccaatcaagccctgtatccttttgaaggacatgacaatgtggatgcagaatttgtagaggaagcagctctgaaacacaccgcgatgcttttaggcttatgaaaaagaaaacgcaattggatctgctgctgccattttaatcttgctcattaaccttactcctttgagaattctttaacaatatttaaaattggtaacaaaaatagtttagccataattgtttagccatgtgagtttcaggttggtacacgttcagacagaactgctgtatcacattccaattttgaatagccagtgagcaatcaagtgtagagaaatgataaatggcctaagaaggcatacagtggcataaacgatgctcttcctagtagcttaataggccacaagctagtttctgttgcactctgaaataaaatatgctttaaaaatgtagggaacagtgcttagaaaagcaaaaactaggtgtgtcattgaaataataggcataaaaattaaatgttacataagaacactatttggaaagagggtccttttaaaaactgaatttgtactaaatcagatttgccatgtccagtacagaataatttgtacttagtatttcaatgacacacctagtttttgcttttctaagcactgttccctacatttttaaagcatattttatttcagactgcaacagaaactagcttgtggcctagtcgagc

SEQ ID NO: 440102 - DNA, 1592 bp, Homo sapiens
tgactttgttggttgaaatccaccctgttaacaatgtgaaggttctaaaggctgtggatagctatatttgggttcagtttctctacccacatattgaaagtcatcctcttccagagaaccatctgttactgatttcagaagagaaatatattgaacaatttcgtatccatgtcgcccaagaagatggaaatagagtggtgattaaaaattctggccatctcccaagagacagaatagctgaggatttcgtttgggctcagtgggatatgtcagaacagagattatattacattgacctgaagaaatcaaggagtatcttaaaatgtatccagttttatgctgatgagagctataacttaatgtttgaagtacccttggacatatcattaagcaactcaggatttaaacttgtcaactttggatgtgattatcatcaataccgagataaattttccaaacacctgactctgtgtgtttttaccaaccatacaggaagtttgtgtgtatgttacagcccgaagtgtgcctcttggggacaaatcacatattcagtgttttacattcataaaggacacagcaagaccttcaccacttctcttgagaatgttgggtcacacatgacaaagggcattacttttctcaaccttgactattatgtggctgtttacttacctggtcatttcttccacctacttaatgttcaacatccagacctgatctgccacaatctctttctgacaggaaataatgaaatgattgatatgctacctcattgccctttacagtcattgtcagggtccctggtattggattgttgttctggaaagctctatagagcactgctcagccagtcgtctttattacagcttctgcagaacacttgcttagactgtgagaagatggctgcgttgcactgcgcgctctactgcggtcaaggtgcgcagttcctggaagcccagattattcagtggatttctgagaatgtctctgcctgccattcatttgacctcattcaggaatttataattgcttcttcatactggagtgtatattcagagacaagtaacatggacaaactattgccacattcctcagtgctcacttggaatacagaaattcctggaataactcttgtgacagaagacattgcattgcctcttatgaaggtgctcagctttaagggctactgggaaaaactgaactccaacctagaatatgttaagtacgccaagccacacttccactataacaacagtgtggtcaggagagagtggcacaacctgatctctgaagagaaaacaggaaaaagaaggtctgcggcatacgtgaggaatattcttgataatgcagtaaagtgattctaacctagaagcaagaatttggggcaagattaaagcccctcctgcaggaggaagacagcaaccagggtgtcatgggggtctgatggtgtctgagctaaagaccattttgtgagacactacgggtgtgaaccgagaacttgaccgatggttctgcataacttccaaatgtgatctcctttgccattcgttagaagccattggcggaacttatttcctcctggggtctccttc

SEQ ID NO: 440103 - DNA, 7941 bp, Homo sapiens
  misc_feature (7507)..(7507): n is a, c, g, or t
  misc_feature (7554)..(7554): n is a, c, g, or t
  misc_feature (7605)..(7605): n is a, c, g, or t
  misc_feature (7613)..(7613): n is a, c, g, or t
  misc_feature (7678)..(7678): n is a, c, g, or t
  misc_feature (7685)..(7685): n is a, c, g, or t
  misc_feature (7726)..(7726): n is a, c, g, or t
  misc_feature (7793)..(7793): n is a, c, g, or t
  misc_feature (7844)..(7844): n is a, c, g, or t
  misc_feature (7851)..(7851): n is a, c, g, or t
  misc_feature (7941)..(7941): n is a, c, g, or t
gcgcccgcccctccgcgccgcctgcccgcccgcccgccgcgctcccgcccgccgctctccgtggccccgccgcgctgccgccgccgccgctgccagcgaaggtgccggggctccgggccctccctgccggcggccgtcagcgctcggagcgggctgcgcggcgggagctccgggaggcggccgtagccagcgccgccgcgcaggaccaggaggaggagaaagggtgcgcagcccggaggcggggtgcgccggtggggtgcagcggaagagggggtccaggggggagaacttcgtagcagtcatcctttttaggaaaagagggaaaaaataaaaccctcccccaccacctccttctccccacccctcgccgcaccacacacagcgcgggcttctagcgctcggcaccggcgggccaggcgcgtcctgccttcatttatccagcagcttttcggaaaatgcatttgctgttcggagtttaatcagaagaggattcctgcctccgtccccggctccttcatcgtcccctctcccctgtctctctcctggggaggcgtgaagcgagattcatgcctgtgcccgcgcgtgtgtgcgcgcgtgtaaattgccgagaaggggaaaacatcacaggacttctgcgaataccggactgaaaattgtaattcatctgccgccgccgctgccttttttttttctcgagctcttgagatctccggttgggattcctgcggattgacatttctgtgaagcagaagtctgggaatcgatctggaaatcctcctaatttttactccctctccccccgactcctgattcattgggaagtttcaaatcagctataactggagagtgctgaagattgatgggatcgttgccttatgcatttgttttggttttacaaaaaggaaacttgacagaggatcatgctgtacttaaaaaatacaacatcacagaggaagtagactgatattaacaatacttactaataataacgtgcctcatgaaataaagatccgaaaggaattggaataaaaatttcctgcatctcatgccaagggggaaacaccagaatcaagtgttccgcgtgattgaagacaccccctcgtccaagaatgcaaagcacatccaataaaatagctggattataactcctcttctttctctgggggccgtggggtgggagctggggcgagaggtgccgttggcccccgttgcttttcctctgggaaggatggcgcacgctgggagaacggggtacgataaccgggagatagtgatgaagtacatccattataagctgtcgcagaggggctacgagtgggatgcgggagatgtgggcgccgcgcccccgggggccgcccccgcaccgggcatcttctcctcccagcccgggcacacgccccatccagccgcatcccgggacccggtcgccaggacctcgccgctgcagaccccggctgcccccggcgccgccgcggggcctgcgctcagcccggtgccacctgtggtccacctgaccctccgccaggccggcgacgacttctcccgccgctaccgccgcgacttcgccgagatgtccagccagctgcacctgacgcccttcaccgcgcggggacgctttgccacggtggtggaggagctcttcagggacggggtgaactgggggaggattgtggccttctttgagttcggtggggtcatgtgtgtggagagcgtcaaccgggagatgtcgcccctggtggacaacatcgccctgtggatgactgagtacctgaaccggcacctgcacacctggatccaggataacggaggctgggatgcctttgtggaactgtacggccccagcatgcggcctctgtttgatttctcctggctgtctctgaagactctgctcagtttggccctggtgggagcttgcatcaccctgggtgcctatctgggccacaagtgaagtcaacatgcctgccccaaacaaatatgcaaaaggttcactaaagcagtagaaataatatgcattgtcagtgatgtaccatgaaacaaagctgcaggctgtttaagaaaaaataacacacatataaacatcacacacacagacagacacacacacacacaacaattaacagtcttcaggcaaaacgtcgaatcagctatttactgccaaagggaaatatcatttattttttacattattaagaaaaaaagatttatttatttaagacagtcccatcaaaactcctgtctttggaaatccgaccactaattgccaagcaccgcttcgtgtggctccacctggatgttctgtgcctgtaaacatagattcgctttccatgttgttggccggatcaccatctgaagagcagacggatggaaaaaggacctgatcattggggaagctggctttctggctgctggaggctggggagaaggtgttcattcacttgcatttctttgccctgggggctgtgatattaacagagggagggttcctgtggggggaagtccatgcctccctggcctgaagaagagactctttgcatatgactcacatgatgcatacctggtgggaggaaaagagttgggaacttcagatggacctagtacccactgagatttccacgccgaaggacagcgatgggaaaaatgcccttaaatcataggaaagtatttttttaagctaccaattgtgccgagaaaagcattttagcaatttatacaatatcatccagtaccttaagccctgattgtgtatattcatatattttggatacgcaccccccaactcccaatactggctctgtctgagtaagaaacagaatcctctggaacttgaggaagtgaacatttcggtgacttccgcatcaggaaggctagagttacccagagcatcaggccgccacaagtgcctgcttttaggagaccgaagtccgcagaacctgcctgtgtcccagcttggaggcctggtcctggaactgagccggggccctcactggcctcctccagggatgatcaacagggcagtgtggtctccgaatgtctggaagctgatggagctcagaattccactgtcaagaaagagcagtagaggggtgtggctgggcctgtcaccctggggccctccaggtaggcccgttttcacgtggagcatgggagccacgacccttcttaagacatgtatcactgtagagggaaggaacagaggccctgggcccttcctatcagaaggacatggtgaaggctgggaacgtgaggagaggcaatggccacggcccattttggctgtagcacatggcacgttggctgtgtggccttggcccacctgtgagtttaaagcaaggctttaaatgactttggagagggtcacaaatcctaaaagaagcattgaagtgaggtgtcatggattaattgacccctgtctatggaattacatgtaaaacattatcttgtcactgtagtttggttttatttgaaaacctgacaaaaaaaaagttccaggtgtggaatatgggggttatctgtacatcctggggcattaaaaaaaaaatcaatggtggggaactataaagaagtaacaaaagaagtgacatcttcagcaaataaactaggaaatttttttttcttccagtttagaatcagccttgaaacattgatggaataactctgtggcattattgcattatataccatttatctgtattaactttggaatgtactctgttcaatgtttaatgctgtggttgatatttcgaaagctgctttaaaaaaatacatgcatctcagcgtttttttgtttttaattgtatttagttatggcctatacactatttgtgagcaaaggtgatcgttttctgtttgagatttttatctcttgattcttcaaaagcattctgagaaggtgagataagccctgagtctcagctacctaagaaaaacctggatgtcactggccactgaggagctttgtttcaaccaagtcatgtgcatttccacgtcaacagaattgtttattgtgacagttatatctgttgtccctttgaccttgtttcttgaaggtttcctcgtccctgggcaattccgcatttaattcatggtattcaggattacatgcatgtttggttaaacccatgagattcattcagttaaaaatccagatggcaaatgaccagcagattcaaatctatggtggtttgacctttagagagttgctttacgtggcctgtttcaacacagacccacccagagccctcctgccctccttccgcgggggctttctcatggctgtccttcagggtcttcctgaaatgcagtggtgcttacgctccaccaagaaagcaggaaacctgtggtatgaagccagacctccccggcgggcctcagggaacagaatgatcagacctttgaatgattctaatttttaagcaaaatattattttatgaaaggtttacattgtcaaagtgatgaatatggaatatccaatcctgtgctgctatcctgccaaaatcattttaatggagtcagtttgcagtatgctccacgtggtaagatcctccaagctgctttagaagtaacaatgaagaacgtggacgtttttaatataaagcctgttttgtcttttgttgttgttcaaacgggattcacagagtatttgaaaaatgtatatatattaagaggtcacgggggctaattgctggctggctgccttttgctgtggggttttgttacctggttttaataacagtaaatgtgcccagcctcttggccccagaactgtacagtattgtggctgcacttgctctaagagtagttgatgttgcattttccttattgttaaaaacatgttagaagcaatgaatgtatataaaagcctcaactagtcatttttttctcctcttcttttttttcattatatctaattattttgcagttgggcaacagagaaccatccctattttgtattgaagagggattcacatctgcatcttaactgctctttatgaatgaaaaaacagtcctctgtatgtactcctctttacactggccagggtcagagttaaatagagtatatgcactttccaaattggggacaagggctctaaaaaaagccccaaaaggagaagaacatctgagaacctcctcggccctcccagtccctcgctgcacaaatactccgcaagagaggccagaatgacagctgacagggtctatggccatcgggtcgtctccgaagatttggcaggggcagaaaactctggcaggcttaagatttggaataaagtcacagaattaaggaagcacctcaatttagttcaaacaagacgccaacattctctccacagctcacttacctctctgtgttcagatgtggccttccatttatatgtgatctttgttttattagtaaatgcttatcatctaaagatgtagctctggcccagtgggaaaaattaggaagtgattataaatcgagaggagttataataatcaagattaaatgtaaataatcagggcaatcccaacacatgtctagctttcacctccaggatctattgagtgaacagaattgcaaatagtctctatttgtaattgaacttatcctaaaacaaatagtttataaatgtgaacttaaactctaattaattccaactgtacttttaaggcagtggctgtttttagactttcttatcacttatagttagtaatgtacacctactctatcagagaaaaacaggaaaggctcgaaatacaagccattctaaggaaattagggagtcagttgaaattctattctgatcttattctgtggtgtcttttgcagcccagacaaatgtggttacacactttttaagaaatacaattctacattgtcaagcttatgaaggttccaatcagatctttattgttattcaatttggatctttcagggattttttttttaaattattatgggacaaaggacatttgttggaggggtgggagggaggaagaatttttaaatgtaaaacattcccaagtttggatcagggagttggaagttttcagaataaccagaactaagggtatgaaggacctgtattggggtcgatgtgatgcctctgcgaagaaccttgtgtgacaaatgagaaacattttgaagtttgtggtacgacctttagattccagagacatcagcatggctcaaagtgcagctccgtttggcagtgcaatggtataaatttcaagctggatatgtctaatgggtatttaaacaataaatgtgcagttttaactaacaggatatttaatgacaaccttctggttggtagggacatctgtttctaaatgtttattatgtacaatacagaaaaaaattttataaaattaagcaatgtgaaactgaattggagagtgataatacaagtcctttagtcttacccagtgaatcattctgttccatgtctttggacaaccatgaccttggacaatcatgaaatatgcatctcactggatgcaaagaaaatcagatggagcatgaatggtactgtaccggttcatctggactgccccagaaaaataacttcaagcaaacatcctatcaacaacaaggttgttctgcataccaagctgagcacagaagatgggaacactggtggaggatggaaaggctcgctcaatcaagaaaattctgagactattaataaataagactgtagtgtagatactgagtaaatccatgcacctaaaccttttggaaaatctgccgtgggccctccagatagctcatttcattaagtttttccctccaaggtagaatttgcaagagtgacagtggattgcatttcttttggggaagctttcttttggtggttttgtttattataccttcttaagttttcaaccaaggtttgcttttgttttgagttactggggttatttttgttttaaataaaaataagtgtacaataagtgtttttgtattgaaagcttttgttatcaagattttcatacttttaccttccatggctctttttaagattgatacttttaagaggtggctgatattctgcaacactgtacacataaaaaatacggtaaggatactttacatggttaaggtaaagtaagtctccagttggccaccattagctataatggcactttgtttgtgttgttggaaaaagtcacattgccattaaactttccttgtctgtctagttaatattgtgaagaaaaataaagtacagtgtgagatactgaaaaaaaaaaacaaaaaaacaaaaaaaaaaaaaaaacaacaacaatagttggcgaccagctgcgccactagaaaaggctttgctaaacaacactggttgtgaggacccgccgagcccacgattgagctatcgacacaccggtggcacatacagcgcgtcctcaaaagagaagacgcacgcgcgcgacaagcacagcatatggctggtgtgcgtgttgcctcacgaaagtaaaaaaaaaacctccgcctgtgcgtggaagccatctatagcgacggctgtntcatcgacgacacaactctaccataaagagggaataggccggttacngaggatcgacgcagaatgctactaggtcggagtgagactcgtaataacganagcgaacnaggtcgggacaggtgacaaggaaaaggcaaagaagaagcgcgcgaataactgataataaaagtcnttatggnccccggccctgccccgtgtcaacgggtgtgaaggctaaagnaattacgaagatgcaactgaagggaactaaggaaaagcgtagcgaaggcatcgcaatggcctagagnactaggacgatacgtacgatacgaataggtccaaatatcaggtcatcgcanaccgtancaagagtagagccaaggacagagctacgtgtaaagttgaacagtgaaaagagtgaaacaggaggcagcaagagcaatcgaagccacaggn

SEQ ID NO: 440104 - DNA, 1800 bp, Homo sapiens
  misc_feature (21)..(22): n is a, c, g, or t
  misc_feature (1366)..(1366): n is a, c, g, or t
  misc_feature (1413)..(1413): n is a, c, g, or t
  misc_feature (1464)..(1464): n is a, c, g, or t
  misc_feature (1472)..(1472): n is a, c, g, or t
  misc_feature (1537)..(1537): n is a, c, g, or t
  misc_feature (1544)..(1544): n is a, c, g, or t
  misc_feature (1585)..(1585): n is a, c, g, or t
  misc_feature (1652)..(1652): n is a, c, g, or t
  misc_feature (1703)..(1703): n is a, c, g, or t
  misc_feature (1710)..(1710): n is a, c, g, or t
  misc_feature (1800)..(1800): n is a, c, g, or t
ctcgtgcaattcggcagcggnncatggctcaaagtgcagctccgtttggcagtgcaatggtataaatttcaagctggatatgtctaatgggtatttaaacaataaatgtgcagttttaactaacaggatatttaatgacaaccttctggttggtagggacatctgtttctaaatgtttattatgtacaatacagaaaaaaattttataaaattaagcaatgtgaaactgaattggagagtgataatacaagtcctttagtcttacccagtgaatcattctgttccatgtctttggacaaccatgaccttggacaatcatgaaatatgcatctcactggatgcaaagaaaatcagatggagcatgaatggtactgtaccggttcatctggactgccccagaaaaataacttcaagcaaacatcctatcaacaacaaggttgttctgcataccaagctgagcacagaagatgggaacactggtggaggatggaaaggctcgctcaatcaagaaaattctgagactattaataaataagactgtagtgtagatactgagtaaatccatgcacctaaaccttttggaaaatctgccgtgggccctccagatagctcatttcattaagtttttccctccaaggtagaatttgcaagagtgacagtggattgcatttcttttggggaagctttcttttggtggttttgtttattataccttcttaagttttcaaccaaggtttgcttttgttttgagttactggggttatttttgttttaaataaaaataagtgtacaataagtgtttttgtattgaaagcttttgttatcaagattttcatacttttaccttccatggctctttttaagattgatacttttaagaggtggctgatattctgcaacactgtacacataaaaaatacggtaaggatactttacatggttaaggtaaagtaagtctccagttggccaccattagctataatggcactttgtttgtgttgttggaaaaagtcacattgccattaaactttccttgtctgtctagttaatattgtgaagaaaaataaagtacagtgtgagatactgaaaaaaaaaaacaaaaaaacaaaaaaaaaaaaaaaacaacaacaatagttggcgaccagctgcgccactagaaaaggctttgctaaacaacactggttgtgaggacccgccgagcccacgattgagctatcgacacaccggtggcacatacagcgcgtcctcaaaagagaagacgcacgcgcgcgacaagcacagcatatggctggtgtgcgtgttgcctcacgaaagtaaaaaaaaaacctccgcctgtgcgtggaagccatctatagcgacggctgtntcatcgacgacacaactctaccataaagagggaataggccggttacngaggatcgacgcagaatgctactaggtcggagtgagactcgtaataacganagcgaacnaggtcgggacaggtgacaaggaaaaggcaaagaagaagcgcgcgaataactgataataaaagtcnttatggnccccggccctgccccgtgtcaacgggtgtgaaggctaaagnaattacgaagatgcaactgaagggaactaaggaaaagcgtagcgaaggcatcgcaatggcctagagnactaggacgatacgtacgatacgaataggtccaaatatcaggtcatcgcanaccgtancaagagtagagccaaggacagagctacgtgtaaagttgaacagtgaaaagagtgaaacaggaggcagcaagagcaatcgaagccacaggn

SEQ ID NO: 440105 - DNA, 1413 bp, Homo sapiens
  misc_feature (979)..(979): n is a, c, g, or t
  misc_feature (1026)..(1026): n is a, c, g, or t
  misc_feature (1077)..(1077): n is a, c, g, or t
  misc_feature (1085)..(1085): n is a, c, g, or t
  misc_feature (1150)..(1150): n is a, c, g, or t
  misc_feature (1157)..(1157): n is a, c, g, or t
  misc_feature (1198)..(1198): n is a, c, g, or t
  misc_feature (1265)..(1265): n is a, c, g, or t
  misc_feature (1316)..(1316): n is a, c, g, or t
  misc_feature (1323)..(1323): n is a, c, g, or t
  misc_feature (1413)..(1413): n is a, c, g, or t
ctttctttttttgttttttctcccccccgcagaaactagctgattcgattcggctcgtacccccacgctgctcacagaagatgggaacactggtggaggatggaaaggctcgctcaatcaagaaaattctgagactattaataaataagactgtagtgtagatactgagtaaatccatgcacctaaaccttttggaaaatctgccgtgggccctccagatagctcatttcattaagtttttccctccaaggtagaatttgcaagagtgacagtggattgcatttcttttggggaagctttcttttggtggttttgtttattataccttcttaagttttcaaccaaggtttgcttttgttttgagttactggggttatttttgttttaaataaaaataagtgtacaataagtgtttttgtattgaaagcttttgttatcaagattttcatacttttaccttccatggctctttttaagattgatacttttaagaggtggctgatattctgcaacactgtacacataaaaaatacggtaaggatactttacatggttaaggtaaagtaagtctccagttggccaccattagctataatggcactttgtttgtgttgttggaaaaagtcacattgccattaaactttccttgtctgtctagttaatattgtgaagaaaaataaagtacagtgtgagatactgaaaaaaaaaaacaaaaaaacaaaaaaaaaaaaaaaacaacaacaatagttggcgaccagctgcgccactagaaaaggctttgctaaacaacactggttgtgaggacccgccgagcccacgattgagctatcgacacaccggtggcacatacagcgcgtcctcaaaagagaagacgcacgcgcgcgacaagcacagcatatggctggtgtgcgtgttgcctcacgaaagtaaaaaaaaaacctccgcctgtgcgtggaagccatctatagcgacggctgtntcatcgacgacacaactctaccataaagagggaataggccggttacngaggatcgacgcagaatgctactaggtcggagtgagactcgtaataacganagcgaacnaggtcgggacaggtgacaaggaaaaggcaaagaagaagcgcgcgaataactgataataaaagtcnttatggnccccggccctgccccgtgtcaacgggtgtgaaggctaaagnaattacgaagatgcaactgaagggaactaaggaaaagcgtagcgaaggcatcgcaatggcctagagnactaggacgatacgtacgatacgaataggtccaaatatcaggtcatcgcanaccgtancaagagtagagccaaggacagagctacgtgtaaagttgaacagtgaaaagagtgaaacaggaggcagcaagagcaatcgaagccacaggn

SEQ ID NO: 440106 - DNA, 2205 bp, Homo sapiens
gcgcccgcccctccgcgccgcctgcccgcccgcccgccgcgctcccgcccgccgctctccgtggccccgccgcgctgccgccgccgccgctgccagcgaaggtgccggggctccgggccctccctgccggcggccgtcagcgctcggagcgggctgcgcggcgggagctccgggaggcggccgtagccagcgccgccgcgcaggaccaggaggaggagaaagggtgcgcagcccggaggcggggtgcgccggtggggtgcagcggaagagggggtccaggggggagaacttcgtagcagtcatcctttttaggaaaagagggaaaaaataaaaccctcccccaccacctccttctccccacccctcgccgcaccacacacagcgcgggcttctagcgctcggcaccggcgggccaggcgcgtcctgccttcatttatccagcagcttttcggaaaatgcatttgctgttcggagtttaatcagaagaggattcctgcctccgtccccggctccttcatcgtcccctctcccctgtctctctcctggggaggcgtgaagcggtcccgtggatagagattcatgcctgtgcccgcgcgtgtgtgcgcgcgtgtaaattgccgagaaggggaaaacatcacaggacttctgcgaataccggactgaaaattgtaattcatctgccgccgccgctgccttttttttttctcgagctcttgagatctccggttgggattcctgcggattgacatttctgtgaagcagaagtctgggaatcgatctggaaatcctcctaatttttactccctctccccccgactcctgattcattgggaagtttcaaatcagctataactggagagtgctgaagattgatgggatcgttgccttatgcatttgttttggttttacaaaaaggaaacttgacagaggatcatgctgtacttaaaaaatacaacatcacagaggaagtagactgatattaacaatacttactaataataacgtgcctcatgaaataaagatccgaaaggaattggaataaaaatttcctgcatctcatgccaagggggaaacaccagaatcaagtgttccgcgtgattgaagacaccccctcgtccaagaatgcaaagcacatccaataaaatagctggattataactcctcttctttctctgggggccgtggggtgggagctggggcgagaggtgccgttggcccccgttgcttttcctctgggaaggatggcgcacgctgggagaacggggtacgataaccgggagatagtgatgaagtacatccattataagctgtcgcagaggggctacgagtgggatgcgggagatgtgggcgccgcgcccccgggggccgcccccgcaccgggcatcttctcctcccagcccgggcacacgccccatccagccgcatcccgggacccggtcgccaggacctcgccgctgcagaccccggctgcccccggcgccgccgcggggcctgcgctcagcccggtgccacctgtggtccacctgaccctccgccaggccggcgacgacttctcccgccgctaccgccgcgacttcgccgagatgtccagccagctgcacctgacgcccttcaccgcgcggggacgctttgccacggtggtggaggagctcttcagggacggggtgaactgggggaggattgtggccttctttgagttcggtggggtcatgtgtgtggagagcgtcaaccgggagatgtcgcccctggtggacaacatcgccctgtggatgactgagtacctgaaccggcacctgcacacctggatccaggataacggaggctgggatgcctttgtggaactgtacggccccagcatgcggcctctgtttgatttctcctggctgtctctgaagactctgctcagtttggccctggtgggagcttgcatcaccctgggtgcctatctgggccacaagtgaagtcaacatgcctgccccaaacaaatatgcaaaaggttcactaaagcagtagaaataatatgcattgtcagtgatgtaccatgaaacaaagctgcaggctgtttaagaaaaaataacacacatataaacatcacacacacagacagacacacacacacacaacaattttaacttgtttttttgtacataatgtacatactgtcaattttttattaaaagaaatatgctttgatgtgctagcaaa

SEQ ID NO: 440107 - DNA, 8175 bp, Homo sapiens
  misc_feature (7741)..(7741): n is a, c, g, or t
  misc_feature (7788)..(7788): n is a, c, g, or t
  misc_feature (7839)..(7839): n is a, c, g, or t
  misc_feature (7847)..(7847): n is a, c, g, or t
  misc_feature (7912)..(7912): n is a, c, g, or t
  misc_feature (7919)..(7919): n is a, c, g, or t
  misc_feature (7960)..(7960): n is a, c, g, or t
  misc_feature (8027)..(8027): n is a, c, g, or t
  misc_feature (8078)..(8078): n is a, c, g, or t
  misc_feature (8085)..(8085): n is a, c, g, or t
  misc_feature (8175)..(8175): n is a, c, g, or t
gcgcccgcccctccgcgccgcctgcccgcccgcccgccgcgctcccgcccgccgctctccgtggccccgccgcgctgccgccgccgccgctgccagcgaaggtgccggggctccgggccctccctgccggcggccgtcagcgctcggagcgggctgcgcggcgggagctccgggaggcggccgtagccagcgccgccgcgcaggaccaggaggaggagaaagggtgcgcagcccggaggcggggtgcgccggtggggtgcagcggaagagggggtccaggggggagaacttcgtagcagtcatcctttttaggaaaagagggaaaaaataaaaccctcccccaccacctccttctccccacccctcgccgcaccacacacagcgcgggcttctagcgctcggcaccggcgggccaggcgcgtcctgccttcatttatccagcagcttttcggaaaatgcatttgctgttcggagtttaatcagaagaggattcctgcctccgtccccggctccttcatcgtcccctctcccctgtctctctcctggggaggcgtgaagcggtcccgtggatagagattcatgcctgtgcccgcgcgtgtgtgcgcgcgtgtaaattgccgagaaggggaaaacatcacaggacttctgcgaataccggactgaaaattgtaattcatctgccgccgccgctgccttttttttttctcgagctcttgagatctccggttgggattcctgcggattgacatttctgtgaagcagaagtctgggaatcgatctggaaatcctcctaatttttactccctctccccccgactcctgattcattgggaagtttcaaatcagctataactggagagtgctgaagattgatgggatcgttgccttatgcatttgttttggttttacaaaaaggaaacttgacagaggatcatgctgtacttaaaaaatacaagtaagttctctgcacaggaaattggtttaatgtaactttcaatggaaacctttgagattttttacttaaagtgcattcgagtaaatttaatttccaggcagcttaatacattctttttagccgtgttacttgtagtgtgtatgccctgctttcactcagtgtgtacagggaaacgcacctgattttttacttattagtttgttttttctttaacctttcagcatcacagaggaagtagactgatattaacaatacttactaataataacgtgcctcatgaaataaagatccgaaaggaattggaataaaaatttcctgcatctcatgccaagggggaaacaccagaatcaagtgttccgcgtgattgaagacaccccctcgtccaagaatgcaaagcacatccaataaaatagctggattataactcctcttctttctctgggggccgtggggtgggagctggggcgagaggtgccgttggcccccgttgcttttcctctgggaaggatggcgcacgctgggagaacggggtacgataaccgggagatagtgatgaagtacatccattataagctgtcgcagaggggctacgagtgggatgcgggagatgtgggcgccgcgcccccgggggccgcccccgcaccgggcatcttctcctcccagcccgggcacacgccccatccagccgcatcccgggacccggtcgccaggacctcgccgctgcagaccccggctgcccccggcgccgccgcggggcctgcgctcagcccggtgccacctgtggtccacctgaccctccgccaggccggcgacgacttctcccgccgctaccgccgcgacttcgccgagatgtccagccagctgcacctgacgcccttcaccgcgcggggacgctttgccacggtggtggaggagctcttcagggacggggtgaactgggggaggattgtggccttctttgagttcggtggggtcatgtgtgtggagagcgtcaaccgggagatgtcgcccctggtggacaacatcgccctgtggatgactgagtacctgaaccggcacctgcacacctggatccaggataacggaggctgggatgcctttgtggaactgtacggccccagcatgcggcctctgtttgatttctcctggctgtctctgaagactctgctcagtttggccctggtgggagcttgcatcaccctgggtgcctatctgggccacaagtgaagtcaacatgcctgccccaaacaaatatgcaaaaggttcactaaagcagtagaaataatatgcattgtcagtgatgtaccatgaaacaaagctgcaggctgtttaagaaaaaataacacacatataaacatcacacacacagacagacacacacacacacaacaattaacagtcttcaggcaaaacgtcgaatcagctatttactgccaaagggaaatatcatttattttttacattattaagaaaaaaagatttatttatttaagacagtcccatcaaaactcctgtctttggaaatccgaccactaattgccaagcaccgcttcgtgtggctccacctggatgttctgtgcctgtaaacatagattcgctttccatgttgttggccggatcaccatctgaagagcagacggatggaaaaaggacctgatcattggggaagctggctttctggctgctggaggctggggagaaggtgttcattcacttgcatttctttgccctgggggctgtgatattaacagagggagggttcctgtggggggaagtccatgcctccctggcctgaagaagagactctttgcatatgactcacatgatgcatacctggtgggaggaaaagagttgggaacttcagatggacctagtacccactgagatttccacgccgaaggacagcgatgggaaaaatgcccttaaatcataggaaagtatttttttaagctaccaattgtgccgagaaaagcattttagcaatttatacaatatcatccagtaccttaagccctgattgtgtatattcatatattttggatacgcaccccccaactcccaatactggctctgtctgagtaagaaacagaatcctctggaacttgaggaagtgaacatttcggtgacttccgcatcaggaaggctagagttacccagagcatcaggccgccacaagtgcctgcttttaggagaccgaagtccgcagaacctgcctgtgtcccagcttggaggcctggtcctggaactgagccggggccctcactggcctcctccagggatgatcaacagggcagtgtggtctccgaatgtctggaagctgatggagctcagaattccactgtcaagaaagagcagtagaggggtgtggctgggcctgtcaccctggggccctccaggtaggcccgttttcacgtggagcatgggagccacgacccttcttaagacatgtatcactgtagagggaaggaacagaggccctgggcccttcctatcagaaggacatggtgaaggctgggaacgtgaggagaggcaatggccacggcccattttggctgtagcacatggcacgttggctgtgtggccttggcccacctgtgagtttaaagcaaggctttaaatgactttggagagggtcacaaatcctaaaagaagcattgaagtgaggtgtcatggattaattgacccctgtctatggaattacatgtaaaacattatcttgtcactgtagtttggttttatttgaaaacctgacaaaaaaaaagttccaggtgtggaatatgggggttatctgtacatcctggggcattaaaaaaaaaatcaatggtggggaactataaagaagtaacaaaagaagtgacatcttcagcaaataaactaggaaatttttttttcttccagtttagaatcagccttgaaacattgatggaataactctgtggcattattgcattatataccatttatctgtattaactttggaatgtactctgttcaatgtttaatgctgtggttgatatttcgaaagctgctttaaaaaaatacatgcatctcagcgtttttttgtttttaattgtatttagttatggcctatacactatttgtgagcaaaggtgatcgttttctgtttgagatttttatctcttgattcttcaaaagcattctgagaaggtgagataagccctgagtctcagctacctaagaaaaacctggatgtcactggccactgaggagctttgtttcaaccaagtcatgtgcatttccacgtcaacagaattgtttattgtgacagttatatctgttgtccctttgaccttgtttcttgaaggtttcctcgtccctgggcaattccgcatttaattcatggtattcaggattacatgcatgtttggttaaacccatgagattcattcagttaaaaatccagatggcaaatgaccagcagattcaaatctatggtggtttgacctttagagagttgctttacgtggcctgtttcaacacagacccacccagagccctcctgccctccttccgcgggggctttctcatggctgtccttcagggtcttcctgaaatgcagtggtgcttacgctccaccaagaaagcaggaaacctgtggtatgaagccagacctccccggcgggcctcagggaacagaatgatcagacctttgaatgattctaatttttaagcaaaatattattttatgaaaggtttacattgtcaaagtgatgaatatggaatatccaatcctgtgctgctatcctgccaaaatcattttaatggagtcagtttgcagtatgctccacgtggtaagatcctccaagctgctttagaagtaacaatgaagaacgtggacgtttttaatataaagcctgttttgtcttttgttgttgttcaaacgggattcacagagtatttgaaaaatgtatatatattaagaggtcacgggggctaattgctggctggctgccttttgctgtggggttttgttacctggttttaataacagtaaatgtgcccagcctcttggccccagaactgtacagtattgtggctgcacttgctctaagagtagttgatgttgcattttccttattgttaaaaacatgttagaagcaatgaatgtatataaaagcctcaactagtcatttttttctcctcttcttttttttcattatatctaattattttgcagttgggcaacagagaaccatccctattttgtattgaagagggattcacatctgcatcttaactgctctttatgaatgaaaaaacagtcctctgtatgtactcctctttacactggccagggtcagagttaaatagagtatatgcactttccaaattggggacaagggctctaaaaaaagccccaaaaggagaagaacatctgagaacctcctcggccctcccagtccctcgctgcacaaatactccgcaagagaggccagaatgacagctgacagggtctatggccatcgggtcgtctccgaagatttggcaggggcagaaaactctggcaggcttaagatttggaataaagtcacagaattaaggaagcacctcaatttagttcaaacaagacgccaacattctctccacagctcacttacctctctgtgttcagatgtggccttccatttatatgtgatctttgttttattagtaaatgcttatcatctaaagatgtagctctggcccagtgggaaaaattaggaagtgattataaatcgagaggagttataataatcaagattaaatgtaaataatcagggcaatcccaacacatgtctagctttcacctccaggatctattgagtgaacagaattgcaaatagtctctatttgtaattgaacttatcctaaaacaaatagtttataaatgtgaacttaaactctaattaattccaactgtacttttaaggcagtggctgtttttagactttcttatcacttatagttagtaatgtacacctactctatcagagaaaaacaggaaaggctcgaaatacaagccattctaaggaaattagggagtcagttgaaattctattctgatcttattctgtggtgtcttttgcagcccagacaaatgtggttacacactttttaagaaatacaattctacattgtcaagcttatgaaggttccaatcagatctttattgttattcaatttggatctttcagggattttttttttaaattattatgggacaaaggacatttgttggaggggtgggagggaggaagaatttttaaatgtaaaacattcccaagtttggatcagggagttggaagttttcagaataaccagaactaagggtatgaaggacctgtattggggtcgatgtgatgcctctgcgaagaaccttgtgtgacaaatgagaaacattttgaagtttgtggtacgacctttagattccagagacatcagcatggctcaaagtgcagctccgtttggcagtgcaatggtataaatttcaagctggatatgtctaatgggtatttaaacaataaatgtgcagttttaactaacaggatatttaatgacaaccttctggttggtagggacatctgtttctaaatgtttattatgtacaatacagaaaaaaattttataaaattaagcaatgtgaaactgaattggagagtgataatacaagtcctttagtcttacccagtgaatcattctgttccatgtctttggacaaccatgaccttggacaatcatgaaatatgcatctcactggatgcaaagaaaatcagatggagcatgaatggtactgtaccggttcatctggactgccccagaaaaataacttcaagcaaacatcctatcaacaacaaggttgttctgcataccaagctgagcacagaagatgggaacactggtggaggatggaaaggctcgctcaatcaagaaaattctgagactattaataaataagactgtagtgtagatactgagtaaatccatgcacctaaaccttttggaaaatctgccgtgggccctccagatagctcatttcattaagtttttccctccaaggtagaatttgcaagagtgacagtggattgcatttcttttggggaagctttcttttggtggttttgtttattataccttcttaagttttcaaccaaggtttgcttttgttttgagttactggggttatttttgttttaaataaaaataagtgtacaataagtgtttttgtattgaaagcttttgttatcaagattttcatacttttaccttccatggctctttttaagattgatacttttaagaggtggctgatattctgcaacactgtacacataaaaaatacggtaaggatactttacatggttaaggtaaagtaagtctccagttggccaccattagctataatggcactttgtttgtgttgttggaaaaagtcacattgccattaaactttccttgtctgtctagttaatattgtgaagaaaaataaagtacagtgtgagatactgaaaaaaaaaaacaaaaaaacaaaaaaaaaaaaaaaacaacaacaatagttggcgaccagctgcgccactagaaaaggctttgctaaacaacactggttgtgaggacccgccgagcccacgattgagctatcgacacaccggtggcacatacagcgcgtcctcaaaagagaagacgcacgcgcgcgacaagcacagcatatggctggtgtgcgtgttgcctcacgaaagtaaaaaaaaaacctccgcctgtgcgtggaagccatctatagcgacggctgtntcatcgacgacacaactctaccataaagagggaataggccggttacngaggatcgacgcagaatgctactaggtcggagtgagactcgtaataacganagcgaacnaggtcgggacaggtgacaaggaaaaggcaaagaagaagcgcgcgaataactgataataaaagtcnttatggnccccggccctgccccgtgtcaacgggtgtgaaggctaaagnaattacgaagatgcaactgaagggaactaaggaaaagcgtagcgaaggcatcgcaatggcctagagnactaggacgatacgtacgatacgaataggtccaaatatcaggtcatcgcanaccgtancaagagtagagccaaggacagagctacgtgtaaagttgaacagtgaaaagagtgaaacaggaggcagcaagagcaatcgaagccacaggn

SEQ ID NO: 440108 - DNA, 2009 bp, Homo sapiens
gcgcccgcccctccgcgccgcctgcccgcccgcccgccgcgctcccgcccgccgctctccgtggccccgccgcgctgccgccgccgccgctgccagcgaaggtgccggggctccgggccctccctgccggcggccgtcagcgctcggagcgggctgcgcggcgggagctccgggaggcggccgtagccagcgccgccgcgcaggaccaggaggaggagaaagggtgcgcagcccggaggcggggtgcgccggtggggtgcagcggaagagggggtccaggggggagaacttcgtagcagtcatcctttttaggaaaagagggaaaaaataaaaccctcccccaccacctccttctccccacccctcgccgcaccacacacagcgcgggcttctagcgctcggcaccggcgggccaggcgcgtcctgccttcatttatccagcagcttttcggaaaatgcatttgctgttcggagtttaatcagaagaggattcctgcctccgtccccggctccttcatcgtcccctctcccctgtctctctcctggggaggcgtgaagcggtcccgtggatagagattcatgcctgtgcccgcgcgtgtgtgcgcgcgtgtaaattgccgagaaggggaaaacatcacaggacttctgcgaataccggactgaaaattgtaattcatctgccgccgccgctgccttttttttttctcgagctcttgagatctccggttgggattcctgcggattgacatttctgtgaagcagaagtctgggaatcgatctggaaatcctcctaatttttactccctctccccccgactcctgattcattgggaagtttcaaatcagctataactggagagtgctgaagattgatgggatcgttgccttatgcatttgttttggttttacaaaaaggaaacttgacagaggatcatgctgtacttaaaaaatacaacatcacagaggaagtagactgatattaacaatacttactaataataacgtgcctcatgaaataaagatccgaaaggaattggaataaaaatttcctgcatctcatgccaagggggaaacaccagaatcaagtgttccgcgtgattgaagacaccccctcgtccaagaatgcaaagcacatccaataaaatagctggattataactcctcttctttctctgggggccgtggggtgggagctggggcgagaggtgccgttggcccccgttgcttttcctctgggaaggatggcgcacgctgggagaacggggtacgataaccgggagatagtgatgaagtacatccattataagctgtcgcagaggggctacgagtgggatgcgggagatgtgggcgccgcgcccccgggggccgcccccgcaccgggcatcttctcctcccagcccgggcacacgccccatccagccgcatcccgggacccggtcgccaggacctcgccgctgcagaccccggctgcccccggcgccgccgcggggcctgcgctcagcccggtgccacctgtggtccacctgaccctccgccaggccggcgacgacttctcccgccgctaccgccgcgacttcgccgagatgtccagccagctgcacctgacgcccttcaccgcgcggggacgctttgccacggtggtggaggagctcttcagggacggggtgaactgggggaggattgtggccttctttgagttcggtggggtcatgtgtgtggagagcgtcaaccgggagatgtcgcccctggtggacaacatcgccctgtggatgactgagtacctgaaccggcacctgcacacctggatccaggataacggaggctgggtaggtgcatcttggtgatgtgagtctgggctgaggccacaggtccgagatgcgggggttggagtgcgggtgggctcctggggcaatgggaggctgtggagccggcgaaataaaatcagagttgttgcttcccggcgtgtccctacctcctcctctggacaaagcgttcactcccaacctgac

SEQ ID NO: 440109 - DNA, 4480 bp, Homo sapiens
cagaaatagatgaagagcacgtggaggatgacgggctgtctttggacattcaggaaagtgagtacatgtgcaatgaagagacggagatcaaagaggcgcagagctaccagaactccccagtcagctctgcgactaaccaggacgccggctacgggtcgcccttcagtgagagcagcgaccagctagcccatttcaaaggctcttcctctcgagaagagaaggaggatccgcagtgtcccgacagcgtctcgtacccccaggacagcctggcacagatcaaagctgtgtatgcaaacttgttctccgagtcctgctggtccagcttagctctggatttaaagaagtcgggttccaccaccagcaccaacgatgccagccagaaggagagctccgcccccacccccacaccccccacctgccccgtcagcaccactggccccaccacgagcacgcccagcaccagctgcagctccagcaccagccacagcagtaccaccagtaccagcagcagctccgggtacgactggcaccaggctgcactggccaagacgctgcagcagacgtcctcgtatgggctgcttcctgagcccagcctgttcagcaccgtgcagctctaccgccagaacaacaagctctacggctccgtcttcacgggcgccagcaagttccggtgcaaagactgcagtgccgcgtacgacacgctggtggaactgacggtgcacatgaacgagacaggccactaccgtgacgacaacagggacaaggactccgagaagaccaagaggtggtccaagcccaggaagcgctccctgatggagatggaggggaaggaggatgcccagaaggtgctgaagtgcatgtactgtggacactcctttgagtccttgcaggacctcagcgtccacatgatcaaaaccaagcattaccagaaagtgcctctgaaggagccagtgccagccatcaccaaactggtcccctccaccaaaaagcgggcgcttcaggacctggcgcccccctgctcccctgagccagcaggaatggccgcagaggtggccctgagtgagtcagccaaggatcagaaagcagcgaacccgtacgtcacgcccaataaccgctatggctaccagaatggcgccagctacacctggcagtttgaggcccgcaaggcgcagatcctcaagtgcatggagtgtggcagctcccacgacacgctgcagcagctcaccgcccacatgatggtcaccgggcacttcctgaaagtgaccacctcggcttctaagaagggcaagcagttggtgctggaccctgtggtggaagagaagatccagtccatcccactaccgcccaccacccacacgcggctgccggcctccagcatcaaaaagcagcccgactctcccgcggggtccacgacttctgaagaaaagaaagagccagagaaggagaagccgcctgtggctggcgacgcggagaagatcaaggaggagagtgaggacagcttggagaaatttgagcccagcaccctgtacccgtacctgcgtgaggaggacctggacgacagccccaagggagggctggacattctcaagtccctggagaataccgtctccacggccattagcaaagctcagaatggtgcgccctcatggggtggctaccccagcatccatgcagcctaccagctcccgggcaccgtgaagccactgccggcggccgtgcagagcgtgcaggtgcagccgtcctatgctggcggcgtgaagtcgctgtcttccgccgagcacaacgccctcctgcactccccagggagcctcacgcccccaccgcacaagagcaacgtgtctgccatggaggagctggtggagaaggtcacgggcaaggtcaacatcaagaaggaggagagaccccctgagaaggagaagagctccctggccaaggctgcgtcccccatagcaaaagagaataaagatttcccgaaaacggaggaagtcagcggcaaaccacagaagaagggccctgaggccgagactgggaaggccaaaaaggagggaccgctggacgttcacaccccaaatggcacagagcctctcaaagcaaaggtcaccaacggctgtaacaacctggggatcatcatggaccactcaccggagccttccttcatcaacccgctgagcgctttgcagtccatcatgaacacccacctgggcaaggtgtccaagcccgtgagtccctcgctggacccgctggcgatgctgtacaagatcagcaacagcatgctggacaagccggtgtaccccgccacccctgtgaagcaggccgatgccatcgaccgctactattatgaaaacagcgaccagcccattgacttaaccaagtccaagaacaagccgctggtgtccagcgtggctgattcggtggcatcacctctgcgggagagcgcactcatggacatctccgacatggtgaaaaacctcacaggccgcctgacgcccaagtcctccacgccctccacagtttcagagaagtccgatgctgatggcagcagctttgaggaggcgttggacgagctgtcaccggtccacaagaggaagggccggcagtccaactggaacccgcagcaccttctcatcctgcaggcccagttcgcctcgagcttgcgggagaccacagagggcaagtacatcatgtcggacttgggcccgcaggagagggtgcacatctcgaagtttactgggctctccatgaccaccatcagccactggctggccaatgtgaagtaccagttgaggaggacagggggaacgaaattcctaaagaacctggacacagggcatcctgttttcttttgcaacgattgtgcctctcagttcagaactgcttctacatacataagtcatttggagacacacttgggcttcagcctgaaggatctctccaagctgccactcaatcagattcaagaacagcagaatgtttcgaaagtcctcaccaacaaaactctgggcccactgggggccaccgaggaagacttgggctccacattccaatgtaagctctgcaaccggacttttgcgagcaagcacgcagtcaaactgcaccttagtaagacccacggcaagtctcccgaggaccacctgatctatgtgactgagttggagaaacagtagcgtccaggtatgcaagagaccgcggaacattgcactaaacgtcgtcgagctgcactaggcctggcctgagcctctgaaatcagtctttcctttgttgctggcccgcctctctggaccttggttttcttacacatattttgtatatttatatgctctctgtccgatctgtgcatgttatttttctttttccgtgagtcaaagtctgacctttattttcaacatctgttcttggtgttaagctatcttttgtaggaaatagtggggcacactactcagagacattatttagcagtaaagaaagacacaaataacaatgataaaaagacatcctaaaatggtgaagttgccatgacaataaaggtcatagaacctggtagtgtcaaatttaaccctttgaggactgtaattgcatttctgtgcctttcacttgaaaaaaaaaaaagaagaaaaaaaggcttaaaggcatttcattcagatcaaaagctgtgtcagacacaaaacttatttaataattaaaaaatgagcttttatatgcagaactggtttgtgaggaaacatgcatgcagctgtgggaagatagaaagctgtctaggactcacggggttcggaagccacacctctacatgtctaaaacaaaaaacaacaacaacagataccccactcgccactatgcccaaaccctctggatgctgaaaaatgccactttcggcaaaaaaaaaaagtatgcaagctattatttaaaaatgtgtaaaaatgctatttcttttttcctgtaaaatattgcagtttatagttatttacaaatgtaagctttggtacaagctgacctttctatagcgtgctgcattggtaaatgaaaaaaaatggggcaaacgttggagtcctttccttgtaaattgccagcatcagcttaaaaactcctgtatgttacatatcgtaccattttaatctcttcaactttctttgtaccttctggctgtatgctttctcttttaactttttatattgtcattttatattaaatttctgtgtatataatgtaaaaccacaatttttgaataaaatttagttcctgcagcttgatttaaatagaggacttttactggcacctgcatctctccagatgcatgtactcagagggactgtcagacaaaaataaatacataaaaacaaagcaagcaatgcactattaattatacattttgatgttctatcattaatattgtacagtacattttggttcacacaattaaatccactgttttctcagatgtaaaataaacccacatgcagttcttgatttacacggattgtca

SEQ ID NO: 440110 - DNA, 4455 bp, Homo sapiens
cagaaatagatgaagagcacgtggaggatgacgggctgtctttggacattcaggaaagtgagtacatgtgcaatgaagagacggagatcaaagaggcgcagagctaccagaactccccagtcagctctgcgactaaccaggacgccggctacgggtcgcccttcagtgagagcagcgaccagctagcccatttcaaaggctcttcctctcgagaagagaaggaggatccgcagtgtcccgacagcgtctcgtacccccaggacagcctggcacagatcaaagctgtgtatgcaaacttgttctccgagtcctgctggtccagcttagctctggatttaaagaagtcgggttccaccaccagcaccaacgatgccagccagaaggagagctccgcccccacccccacaccccccacctgccccgtcagcaccactggccccaccacgagcacgcccagcaccagctgcagctccagcaccagccacagcagtaccaccagtaccagcagcagctccgggtacgactggcaccaggctgcactggccaagacgctgcagcagacgtcctcgtatgggctgcttcctgagcccagcctgttcagcaccgtgcagctctaccgccagaacaacaagctctacggctccgtcttcacgggcgccagcaagttccggtgcaaagactgcagtgccgcgtacgacacgctggtggaactgacggtgcacatgaacgagacaggccactaccgtgacgacaacagggacaaggactccgagaagaccaagaggtggtccaagcccaggaagcgctccctgatggagatggaggggaaggaggatgcccagaaggtgctgaagtgcatgtactgtggacactcctttgagtccttgcaggacctcagcgtccacatgatcaaaaccaagcattaccagaaagtgcctctgaaggagccagtgccagccatcaccaaactggtcccctccaccaaaaagcgggcgcttcaggacctggcgcccccctgctcccctgagccagcaggaatggccgcagaggtggccctgagtgagtcagccaaggatcagaaagcagcgaacccgtacgtcacgcccaataaccgctatggctaccagaatggcgccagctacacctggcagtttgaggcccgcaaggcgcagatcctcaagtgcatggagtgtggcagctcccacgacacgctgcagcagctcaccgcccacatgatggtcaccgggcacttcctgaaagtgaccacctcggcttctaagaagggcaagcagttggtgctggaccctgtggtggaagagaagatccagtccatcccactaccgcccaccacccacacgcggctgccggcctccagcatcaaaaagcagcccgactctcccgcggggtccacgacttctgaagaaaagaaagagccagagaaggagaagccgcctgtggctggcgacgcggagaagatcaaggaggagagtgaggacagcttggagaaatttgagcccagcaccctgtacccgtacctgcgtgaggaggactggacattctcaagtccctggagaataccgtctccacggccattagcaaagctcagaatggtgcgccctcatggggtggctaccccagcatccatgcagcctaccagctcccgggcaccgtgaagccactgccggcggccgtgcagagcgtgcaggtgcagccgtcctatgctggcggcgtgaagtcgctgtcttccgccgagcacaacgccctcctgcactccccagggagcctcacgcccccaccgcacaagagcaacgtgtctgccatggaggagctggtggagaaggtcacgggcaaggtcaacatcaagaaggaggagagaccccctgagaaggagaagagctccctggccaaggctgcgtcccccatagcaaaagagaataaagatttcccgaaaacggaggaagtcagcggcaaaccacagaagaagggccctgaggccgagactgggaaggccaaaaaggagggaccgctggacgttcacaccccaaatggcacagagcctctcaaagcaaaggtcaccaacggctgtaacaacctggggatcatcatggaccactcaccggagccttccttcatcaacccgctgagcgctttgcagtccatcatgaacacccacctgggcaaggtgtccaagcccgtgagtccctcgctggacccgctggcgatgctgtacaagatcagcaacagcatgctggacaagccggtgtaccccgccacccctgtgaagcaggccgatgccatcgaccgctactattatgaaaacagcgaccagcccattgacttaaccaagtccaagaacaagccgctggtgtccagcgtggctgattcggtggcatcacctctgcgggagagcgcactcatggacatctccgacatggtgaaaaacctcacaggccgcctgacgcccaagtcctccacgccctccacagtttcagagaagtccgatgctgatggcagcagctttgaggaggcgttggacgagctgtcaccggtccacaagaggaagggccggcagtccaactggaacccgcagcaccttctcatcctgcaggcccagttcgcctcgagcttgcgggagaccacagagggcaagtacatcatgtcggacttgggcccgcaggagagggtgcacatctcgaagtttactgggctctccatgaccaccatcagccactggctggccaatgtgaagtaccagttgaggaggacagggggaacgaaattcctaaagaacctggacacagggcatcctgttttcttttgcaacgattgtgcctctcagttcagaactgcttctacatacataagtcatttggagacacacttgggcttcagcctgaaggatctctccaagctgccactcaatcagattcaagaacagcagaatgtttcgaaagtcctcaccaacaaaactctgggcccactgggggccaccgaggaagacttgggctccacattccaatgtaagctctgcaaccggacttttgcgagcaagcacgcagtcaaactgcaccttagtaagacccacggcaagtctcccgaggaccacctgatctatgtgactgagttggagaaacagtagcgtccaggtatgcaagagaccgcggaacattgcactaaacgtcgtcgagctgcactaggcctggcctgagcctctgaaatcagtctttcctttgttgctggcccgcctctctggaccttggttttcttacacatattttgtatatttatatgctctctgtccgatctgtgcatgttatttttctttttccgtgagtcaaagtctgacctttattttcaacatctgttcttggtgttaagctatcttttgtaggaaatagtggggcacactactcagagacattatttagcagtaaagaaagacacaaataacaatgataaaaagacatcctaaaatggtgaagttgccatgacaataaaggtcatagaacctggtagtgtcaaatttaaccctttgaggactgtaattgcatttctgtgcctttcacttgaaaaaaaaaaaagaagaaaaaaaggcttaaaggcatttcattcagatcaaaagctgtgtcagacacaaaacttatttaataattaaaaaatgagcttttatatgcagaactggtttgtgaggaaacatgcatgcagctgtgggaagatagaaagctgtctaggactcacggggttcggaagccacacctctacatgtctaaaacaaaaaacaacaacaacagataccccactcgccactatgcccaaaccctctggatgctgaaaaatgccactttcggcaaaaaaaaaaagtatgcaagctattatttaaaaatgtgtaaaaatgctatttcttttttcctgtaaaatattgcagtttatagttatttacaaatgtaagctttggtacaagctgacctttctatagcgtgctgcattggtaaatgaaaaaaaatggggcaaacgttggagtcctttccttgtaaattgccagcatcagcttaaaaactcctgtatgttacatatcgtaccattttaatctcttcaactttctttgtaccttctggctgtatgctttctcttttaactttttatattgtcattttatattaaatttctgtgtatataatgtaaaaccacaatttttgaataaaatttagttcctgcagcttgatttaaatagaggacttttactggcacctgcatctctccagatgcatgtactcagagggactgtcagacaaaaataaatacataaaaacaaagcaagcaatgcactattaattatacattttgatgttctatcattaatattgtacagtacattttggttcacacaattaaatccactgttttctcagatgtaaaataaacccacatgcagttcttgatttacacggattgtca

SEQ ID NO: 440111 - DNA, 4083 bp, Homo sapiens
gaatggcgccagctacacctggcagtttgaggcccgcaaggcgcagatcctcaagtgcatggagtgtggcagctccagcaccagccacagcagtaccaccagtaccagcagcagctccgggtacgactggcaccaggctgcactggccaagacgctgcagcagacgtcctcgtatgggctgcttcctgagcccagcctgttcagcaccgtgcagctctaccgccagaacaacaagctctacggctccgtcttcacgggcgccagcaagttccggtgcaaagactgcagtgccgcgtacgacacgctggtggaactgacggtgcacatgaacgagacaggccactaccgtgacgacaacagggacaaggactccgagaagaccaagaggtggtccaagcccaggaagcgctccctgatggagatggaggggaaggaggatgcccagaaggtgctgaagtgcatgtactgtggacactcctttgagtccttgcaggacctcagcgtccacatgatcaaaaccaagcattaccagaaagtgcctctgaaggagccagtgccagccatcaccaaactggtcccctccaccaaaaagcgggcgcttcaggacctggcgcccccctgctcccctgagccagcaggaatggccgcagaggtggccctgagtgagtcagccaaggatcagaaagcagcgaacccgtacgtcacgcccaataaccgctatggctaccagaatggcgccagctacacctggcagtttgaggcccgcaaggcgcagatcctcaagtgcatggagtgtggcagctcccacgacacgctgcagcagctcaccgcccacatgatggtcaccgggcacttcctgaaagtgaccacctcggcttctaagaagggcaagcagttggtgctggaccctgtggtggaagagaagatccagtccatcccactaccgcccaccacccacacgcggctgccggcctccagcatcaaaaagcagcccgactctcccgcggggtccacgacttctgaagaaaagaaagagccagagaaggagaagccgcctgtggctggcgacgcggagaagatcaaggaggagagtgaggacagcttggagaaatttgagcccagcaccctgtacccgtacctgcgtgaggaggacctggacgacagccccaagggagggctggacattctcaagtccctggagaataccgtctccacggccattagcaaagctcagaatggtgcgccctcatggggtggctaccccagcatccatgcagcctaccagctcccgggcaccgtgaagccactgccggcggccgtgcagagcgtgcaggtgcagccgtcctatgctggcggcgtgaagtcgctgtcttccgccgagcacaacgccctcctgcactccccagggagcctcacgcccccaccgcacaagagcaacgtgtctgccatggaggagctggtggagaaggtcacgggcaaggtcaacatcaagaaggaggagagaccccctgagaaggagaagagctccctggccaaggctgcgtcccccatagcaaaagagaataaagatttcccgaaaacggaggaagtcagcggcaaaccacagaagaagggccctgaggccgagactgggaaggccaaaaaggagggaccgctggacgttcacaccccaaatggcacagagcctctcaaagcaaaggtcaccaacggctgtaacaacctggggatcatcatggaccactcaccggagccttccttcatcaacccgctgagcgctttgcagtccatcatgaacacccacctgggcaaggtgtccaagcccgtgagtccctcgctggacccgctggcgatgctgtacaagatcagcaacagcatgctggacaagccggtgtaccccgccacccctgtgaagcaggccgatgccatcgaccgctactattatgaaaacagcgaccagcccattgacttaaccaagtccaagaacaagccgctggtgtccagcgtggctgattcggtggcatcacctctgcgggagagcgcactcatggacatctccgacatggtgaaaaacctcacaggccgcctgacgcccaagtcctccacgccctccacagtttcagagaagtccgatgctgatggcagcagctttgaggaggcgttggacgagctgtcaccggtccacaagaggaagggccggcagtccaactggaacccgcagcaccttctcatcctgcaggcccagttcgcctcgagcttgcgggagaccacagagggcaagtacatcatgtcggacttgggcccgcaggagagggtgcacatctcgaagtttactgggctctccatgaccaccatcagccactggctggccaatgtgaagtaccagttgaggaggacagggggaacgaaattcctaaagaacctggacacagggcatcctgttttcttttgcaacgattgtgcctctcagttcagaactgcttctacatacataagtcatttggagacacacttgggcttcagcctgaaggatctctccaagctgccactcaatcagattcaagaacagcagaatgtttcgaaagtcctcaccaacaaaactctgggcccactgggggccaccgaggaagacttgggctccacattccaatgtaagctctgcaaccggacttttgcgagcaagcacgcagtcaaactgcaccttagtaagacccacggcaagtctcccgaggaccacctgatctatgtgactgagttggagaaacagtagcgtccaggtatgcaagagaccgcggaacattgcactaaacgtcgtcgagctgcactaggcctggcctgagcctctgaaatcagtctttcctttgttgctggcccgcctctctggaccttggttttcttacacatattttgtatatttatatgctctctgtccgatctgtgcatgttatttttctttttccgtgagtcaaagtctgacctttattttcaacatctgttcttggtgttaagctatcttttgtaggaaatagtggggcacactactcagagacattatttagcagtaaagaaagacacaaataacaatgataaaaagacatcctaaaatggtgaagttgccatgacaataaaggtcatagaacctggtagtgtcaaatttaaccctttgaggactgtaattgcatttctgtgcctttcacttgaaaaaaaaaaaagaagaaaaaaaggcttaaaggcatttcattcagatcaaaagctgtgtcagacacaaaacttatttaataattaaaaaatgagcttttatatgcagaactggtttgtgaggaaacatgcatgcagctgtgggaagatagaaagctgtctaggactcacggggttcggaagccacacctctacatgtctaaaacaaaaaacaacaacaacagataccccactcgccactatgcccaaaccctctggatgctgaaaaatgccactttcggcaaaaaaaaaaagtatgcaagctattatttaaaaatgtgtaaaaatgctatttcttttttcctgtaaaatattgcagtttatagttatttacaaatgtaagctttggtacaagctgacctttctatagcgtgctgcattggtaaatgaaaaaaaatggggcaaacgttggagtcctttccttgtaaattgccagcatcagcttaaaaactcctgtatgttacatatcgtaccattttaatctcttcaactttctttgtaccttctggctgtatgctttctcttttaactttttatattgtcattttatattaaatttctgtgtatataatgtaaaaccacaatttttgaataaaatttagttcctgcagcttgatttaaatagaggacttttactggcacctgcatctctccagatgcatgtactcagagggactgtcagacaaaaataaatacataaaaacaaagcaagcaatgcactattaattatacattttgatgttctatcattaatattgtacagtacattttggttcacacaattaaatccactgttttctcagatgtaaaataaacccacatgcagttcttgatttacacggattgtca

SEQ ID NO: 440112 - DNA, 724 bp, Homo sapiens
gtgaacccttttaaagagctctatccagtttctttttcatatacaaatataatatgaaatcatctttatctttcatagtatttgtgtttggcatttttaacattactgtttcagtctgcctcatttagttataataacacccttgaagacagaaaatcttctgtcctaaacatattcggcccaataactactttttattaattgattctttttgcatttcaggtcacctatgagatagagaccaatgggacttttggaatccagaaagtttctgtcagtttgggacaaaccaacctgactgttgagccaggcgcttccttacagcaacacttcatccttcgcttcagggttagggcccttctcttataggggatttagaggggaagaaatattgggttagaaataatttctttgcttctgtaatacatgtgaaatagaataagaatatgaaggcctagttcagtctgtcgattgaggcctcaacatttaatattccataattttactacaagttgtggttattctacaagtctttactcattaaaattttctccaattctctgtctggcccccaacaaagcaggacttcaatctaaaatcaaaactttttttatagtcattttgaatcataaattcagccaacacctacaaaaattctttaactagctgttctcatatttctgggcagtcagcattttactcatttcccacttaatctgagtgt

SEQ ID NO: 440113 - DNA, 447 bp, Homo sapiens
cttttgtgttcttccactaagctacattgccttccttattactgaataatgcttaagaaacaatggcttagtacttggtgattgactataggcaaccatcaggcaattcaagcagatgcttctttacccttctgcaggctataaactgtacttcctgctgtctcataccagtttccctggagatccaggtattgtgggcatatgtaggtctcctgtccaacccgcaagctcatgtatcaggagttcgattcctataccagtgccagtctatacaggtaagtcatggctcataaaggatcactaaaccttgcaaagcctagattgtcttatcagtcatttgttaaccaaataattttttaccttccaagagctaatttatgttagcaaccaatgtttgtttaaagtgagctgacataatttgtcaagtctattcagcctgcctgatta

SEQ ID NO: 440114 - DNA, 2564 bp, Homo sapiens
aggttgtcctgtagtaaaatccaatctttcgtcactgtaacaaaccgagagggacccggaggccctgaatgccccatgcgcaccccacagctcgcgctcctgcaagtgttctttctggtgttccccgatggcgtccggcctcagccctcttcctccccatcaggggcagtgcccacgtctttggagctgcagcgagggacggatggcggaaccctccagtccccttcagaggcgactgcaactcgcccggccgtgcctggactccctacagtggtccctactctcgtgactccctcggcccctgggaataggactgtggacctcttcccagtcttaccgatctgtgtctgtgacttgactcctggagcctgcgatataaattgctgctgcgacagggactgctatcttctccatccgaggacagttttctccttctgccttccaggcagcgtaaggtcttcaagctgggtttgtgtagacaactctgttatcttcaggagtaattccccgtttccttcaagagttttcatggattctaatggaatcaggcagttttgtgtccatgtgaacaactcaaacttaaactatttccagaagcttcaaaaggtcaatgcaaccaacttccaggccctggctgcagagtttggaggcgaatcattcacttcaacattccaaactcaatcaccaccatctttttacagggctggggaccccattcttacttacttccccaagtggtctgtaataagcttgctgagacaacctgcaggagttggagctgggggactctgtgctgaaagcaatcctgcaggtttcctagagagtaaaagtacaacttgcactcgttttttcaagaacctggctagtagctgtaccttggattcagccctcaatgctgcctcttactataacttcacagtcttaaaggttccaagaagcatgactgatccacagaatatggagttccaggttcctgtaatacttacctcacaggctaatgctcctctgttggctggaaacacttgtcagaatgtagtttctcaggtcacctatgagatagagaccaatgggacttttggaatccagaaagtttctgtcagtttgggacaaaccaacctgactgttgagccaggcgcttccttacagcaacacttcatccttcgcttcagggcttttcaacagagcacagctgcttctctcaccagtcctagaagtgggaatcctggctatatagttgggaagccactcttggctctgactgatgatataagttactcaatgaccctcttacagagccagggtaatggaagttgctctgttaaaagacatgaagtgcagtttggagtgaatgcaatatctggatgcaagctcaggttgaagaaggcagactgcagccacttgcagcaggagatttatcagactcttcatggaaggcccagaccagagtatgttgccatctttggtaatgctgacccagcccagaaaggagggtggaccaggatcctcaacaggcactgcagcatttcagctataaactgtacttcctgctgtctcataccagtttccctggagatccaggtattgtgggcatatgtaggtctcctgtccaacccgcaagctcatgtatcaggagttcgattcctataccagtgccagtctatacaggattctcagcaagttacagaagtatctttgacaactcttgtgaactttgtggacattacccagaagccacagcctccaaggggccaacccaaaatggactggaaatggccattcgacttctttcccttcaaagtggcattcagcagaggagtattctctcaaaaatgctcagtctctcccatccttatcctgtgcctcttactacttggagttctcaacctagagactatgtgaagaaaagaaaataatcagatttcagttttccctatgagaaactctgaggcagccacttatcttggctaaatagaacctcacctgctcatgaccagagagcatttaggataatagaggacctaactgaaggaatccttgtatatgaaaggagttattttagaaaagcaataaaaatattttattcatcatagctctctgctttgggctctgcaggccaccagatacacatgaggcccctacttctcaagctgggaaggccaagagccttccttcagcctttctggttatgttacacctagctgaatgtttacaaggtctggatccatcagccctcaggcacagttgggccaagcagaaagagagaaacacttctgctgtcaccttgaatgaactcaggaatagcttccctctggactgtagaggagctaactgtttggaacagaaaactgctggctgttgattttgtctggttcctttgccaacatctgggcacaccctttgcccagacacgagtggggaaagcagttctttctcctcagtttccaaagtaaatggggaatcccagctttcttttctactagcaaatgaccctaccatttatttctgcctttttcttccgttcattgtgaggaaaaataaaactggttgagagctttgttgtacta

SEQ ID NO: 440115 - DNA, 2649 bp, Homo sapiens
acggttgccaggcaacggaggcacggcccggcccgcgttaaggaggagggcgcagaccgaaggacactgaaagagctgtaacaaccccactttcgattggttgaagagctctcagccttctcatgagccaatgagaagaggcacgcggatggcgtcagacgctatgcgactcctcccacccacgctctggcaatgcgattggagaccgcggaggcctacgtcggacccggaggccctgaatgccccatgcgcaccccacagctcgcgctcctgcaagtgttctttctggtgttccccgatggcgtccggcctcagccctcttcctccccatcaggggcagtgcccacgtctttggagctgcagcgagggacggatggcggaaccctccagtccccttcagaggcgactgcaactcgcccggccgtgcctggactccctacagtggtccctactctcgtgactccctcggcccctgggaataggactgtggacctcttcccagtcttaccgatctgtgtctgtgacttgactcctggagcctgcgatataaattgctgctgcgacagggactgctatcttctccatccgaggacagttttctccttctgccttccaggcagcgtaaggtcttcaagctgggtttgtgtagacaactctgttatcttcaggagtaattccccgtttccttcaagagttttcatggattctaatggaatcaggcagttttgtgtccatgtgaacaactcaaacttaaactatttccagaagcttcaaaaggtcaatgcaaccaacttccaggccctggctgcagagtttggaggcgaatcattcacttcaacattccaaactcaatcaccaccatctttttacagggctggggaccccattcttacttacttccccaagtggtctgtaataagcttgctgagacaacctgcaggagttggagctgggggactctgtgctgaaagcaatcctgcaggtttcctagagagtaaaagtacaacttgcactcgttttttcaagaacctggctagtagctgtaccttggattcagccctcaatgctgcctcttactataacttcacagtcttaaaggttccaagaagcatgactgatccacagaatatggagttccaggttcctgtaatacttacctcacaggctaatgctcctctgttggctggaaacacttgtcagaatgtagtttctcaggtcacctatgagatagagaccaatgggacttttggaatccagaaagtttctgtcagtttgggacaaaccaacctgactgttgagccaggcgcttccttacagcaacacttcatccttcgcttcagggcttttcaacagagcacagctgcttctctcaccagtcctagaagtgggaatcctggctatatagttgggaagccactcttggctctgactgatgatataagttactcaatgaccctcttacagagccagggtaatggaagttgctctgttaaaagacatgaagtgcagtttggagtgaatgcaatatctggatgcaagctcaggttgaagaaggcagactgcagccacttgcagcaggagatttatcagactcttcatggaaggcccagaccagagtatgttgccatctttggtaatgctgacccagcccagaaaggagggtggaccaggatcctcaacaggcactgcagcatttcagctataaactgtacttcctgctgtctcataccagtttccctggagatccaggtattgtgggcatatgtaggtctcctgtccaacccgcaagctcatgtatcaggagttcgattcctataccagtgccagtctatacaggattctcagcaagttacagaagtatctttgacaactcttgtgaactttgtggacattacccagaagccacagcctccaaggggccaacccaaaatggactggaaatggccattcgacttctttcccttcaaagtggcattcagcagaggagtattctctcaaaaatgctcagtctctcccatccttatcctgtgcctcttactacttggagttctcaacctagagactatgtgaagaaaagaaaataatcagatttcagttttccctatgagaaactctgaggcagccacttatcttggctaaatagaacctcacctgctcatgaccagagagcatttaggataatagaggacctaactgaaggaatccttgtatatgaaaggagttattttagaaaagcaataaaaatattttattcatcatagctctctgctttgggctctgcaggccaccagatacacatgaggcccctacttctcaagctgggaaggccaagagccttccttcagcctttctggttatgttacacctagctgaatgtttacaaggtctggatccatcagccctcaggcacagttgggccaagcagaaagagagaaacacttctgctgtcaccttgaatgaactcaggaatagcttccctctggactgtagaggagctaactgtttggaacagaaaactgctggctgttgattttgtctggttcctttgccaacatctgggcacaccctttgcccagacacgagtggggaaagcagttctttctcctcagtttccaaagtaaatggggaatcccagctttcttttctact

SEQ ID NO: 440116 - DNA, 2782 bp, Homo sapiens
acggttgccaggcaacggaggcacggcccggcccgcgttaaggaggagggcgcagaccgaaggacactgaaagagctgtaacaaccccactttcgattggttgaagagctctcagccttctcatgagccaatgagaagaggcacgcggatggcgtcagacgctatgcgactcctcccacccacgctctggcaatgcgattggagaccgcggaggcctacgtcggacccggaggccctgaatgccccatgcgcaccccacagctcgcgctcctgcaagtgttctttctggtgttccccgatggcgtccggcctcagccctcttcctccccatcaggggcagtgcccacgtctttggagctgcagcgagggacggatggcggaaccctccagtccccttcagaggcgactgcaactcgcccggccgtgcctggactccctacagtggtccctactctcgtgactccctcggcccctgggaataggactgtggacctcttcccagtcttaccgatctgtgtctgtgacttgactcctggagcctgcgatataaattgctgctgcgacagggactgctatcttctccatccgaggacagttttctccttctgccttccaggcagcgtaaggtcttcaagctgggtttgtgtagacaactctgttatcttcaggagtaattccccgtttccttcaagagttttcatggattctaatggaatcaggcagttttgtgtccatgtgaacaactcaaacttaaactatttccagaagcttcaaaaggtcaatgcaaccaacttccaggccctggctgcagagtttggaggcgaatcattcacttcaacattccaaactcaatcaccaccatctttttacagggctggggaccccattcttacttacttccccaagtggtctgtaataagcttgctgagacaacctgcaggagttggagctgggggactctgtgctgaaagcaatcctgcaggtttcctagagagtaaaagtacaacttgcactcgttttttcaagaacctggctagtagctgtaccttggattcagccctcaatgctgcctcttactataacttcacagtcttaaaggttccaagaagcatgactgatccacagaatatggagttccaggttcctgtaatacttacctcacaggctaatgctcctctgttggctggaaacacttgtcagaatgtagtttctcaggtcacctatgagatagagaccaatgggacttttggaatccagaaagtttctgtcagtttgggacaaaccaacctgactgttgagccaggcgcttccttacagcaacacttcatccttcgcttcagggcttttcaacagagcacagctgcttctctcaccagtcctagaagtgggaatcctggctatatagttgggaagccactcttggctctgactgatgatataagttactcaatgaccctcttacagagccagggtaatggaagttgctctgttaaaagacatgaagtgcagtttggagtgaatgcaatatctggatgcaagctcaggttgaagaaggcagactgcagccacttgcagcaggagatttatcagactcttcatggaaggcccagaccagagtatgttgccatctttggtaatgctgacccagcccagaaaggagggtggaccaggatcctcaacaggcactgcagcatttcagctataaactgtacttcctgctgtctcataccagtttccctggagatccaggtattgtgggcatatgtaggtctcctgtccaacccgcaagctcatgtatcaggagttcgattcctataccagtgccagtctatacaggattctcagcaagttacagaagtatctttgacaactcttgtgaactttgtggacattacccagaagccacagcctccaaggggccaacccaaaatggactggaaatggccattcgacttctttcccttcaaagtggcattcagcagaggagtattctctcaaaaatgctcagtctctcccatccttatcctgtgcctcttactacttggagttctcaacctagagactatgtgaagaaaagaaaataatcagatttcagttttccctatgagaaactctgaggcagccacttatcttggctaaatagaacctcacctgctcatgaccagagagcatttaggataatagaggacctaactgaaggaatccttgtatatgaaaggagttattttagaaaagcaataaaaatattttattcatcatagctctctgctttgggctctgcaggccaccagatacacatgaggcccctacttctcaagctgggaaggccaagagccttccttcagcctttctggttatgttacacctagctgaatgtttacaaggtctggatccatcagccctcaggcacagttgggccaagcagaaagagagaaacacttctgctgtcaccttgaatgaactcaggaatagcttccctctggactgtagaggagctaactgtttggaacagaaaactgctggctgttgattttgtctggttcctttgccaacatctgggcacaccctttgcccagacacgagtggggaaagcagttctttctcctcagtttccaaagtaaatggggaatcccagctttcttttctactagcaaatgaccctaccatttatttctgcctttttcttccgttcattgtgaggaaaaataaaactggttgagagctttgttgtactaattccagcagcatggtagaaggcagctgacctgtggtctgcctcctg

SEQ ID NO: 440117 - DNA, 2654 bp, Homo sapiens
acggttgccaggcaacggaggcacggcccggcccgcgttaaggaggagggcgcagaccgaaggacactgaaagagctgtaacaaccccactttcgattggttgaagagctctcagccttctcatgagccaatgagaagaggcacgcggatggcgtcagacgctatgcgactcctcccacccacgctctggcaatgcgattggagaccgcggaggcctacgtcggacccggaggccctgaatgccccatgcgcaccccacagctcgcgctcctgcaagtgttctttctggtgttccccgatggcgtccggcctcagccctcttcctccccatcaggggcagtgcccacgtctttggagctgcagcgagggacggatggcggaaccctccagtccccttcagaggcgactgcaactcgcccggccgtgcctggactccctacagtggtccctactctcgtgactccctcggcccctgggaataggactgtggacctcttcccagtcttaccgatctgtgtctgtgacttgactcctggagcctgcgatataaattgctgctgcgacagggactgctatcttctccatccgaggacagttttctccttctgccttccaggcagcgtaaggtcttcaagctgggtttgtgtagacaactctgttatcttcaggagtaattccccgtttccttcaagagttttcatggattctaatggaatcaggcagttttgtgtccatgtgaacaactcaaacttaaactatttccagaagcttcaaaaggtcaatgcaaccaacttccaggccctggctgcagagtttggaggcgaatcattcacttcaacattccaaactcaatcaccaccatctttttacagggctggggaccccattcttacttacttccccaagtggtctgtaataagcttgctgagacaacctgcaggagttggagctgggggactctgtgctgaaagcaatcctgcaggtttcctagagagtaaaagtacaacttgcactcgttttttcaagaacctggctagtagctgtaccttggattcagccctcaatgctgcctcttactataacttcacagtcttaaaggttccaagaagcatgactgatccacagaatatggaggtcacctatgagatagagaccaatgggacttttggaatccagaaagtttctgtcagtttgggacaaaccaacctgactgttgagccaggcgcttccttacagcaacacttcatccttcgcttcagggcttttcaacagagcacagctgcttctctcaccagtcctagaagtgggaatcctggctatatagttgggaagccactcttggctctgactgatgatataagttactcaatgaccctcttacagagccagggtaatggaagttgctctgttaaaagacatgaagtgcagtttggagtgaatgcaatatctggatgcaagctcaggttgaagaaggcagactgcagccacttgcagcaggagatttatcagactcttcatggaaggcccagaccagagtatgttgccatctttggtaatgctgacccagcccagaaaggagggtggaccaggatcctcaacaggcactgcagcatttcagctataaactgtacttcctgctgtctcataccagtttccctggagatccaggtattgtgggcatatgtaggtctcctgtccaacccgcaagctcatgtatcaggagttcgattcctataccagtgccagtctatacaggattctcagcaagttacagaagtatctttgacaactcttgtgaactttgtggacattacccagaagccacagcctccaaggggccaacccaaaatggactggaaatggccattcgacttctttcccttcaaagtggcattcagcagaggagtattctctcaaaaatgctcagtctctcccatccttatcctgtgcctcttactacttggagttctcaacctagagactatgtgaagaaaagaaaataatcagatttcagttttccctatgagaaactctgaggcagccacttatcttggctaaatagaacctcacctgctcatgaccagagagcatttaggataatagaggacctaactgaaggaatccttgtatatgaaaggagttattttagaaaagcaataaaaatattttattcatcatagctctctgctttgggctctgcaggccaccagatacacatgaggcccctacttctcaagctgggaaggccaagagccttccttcagcctttctggttatgttacacctagctgaatgtttacaaggtctggatccatcagccctcaggcacagttgggccaagcagaaagagagaaacacttctgctgtcaccttgaatgaactcaggaatagcttccctctggactgtagaggagctaactgtttggaacagaaaactgctggctgttgattttgtctggttcctttgccaacatctgggcacaccctttgcccagacacgagtggggaaagcagttctttctcctcagtttccaaagtaaatggggaatcccagctttcttttctactagcaaatgaccctaccatttatttctgcctttttcttccgttcattgtgaggaaaaataaaactggttgagagctttgttgtacta

SEQ ID NO: 440118 - DNA, 2372 bp, Homo sapiens
cttacttctgagatctaaaattctgtgagcaaagttgagctgccacaaagcaggagtggggctgtcggaagaaggagggtgagcacctgggagagtttggggatcttcatcccactcactctgtgtcgtactttcatagtcttaccgatctgtgtctgtgacttgactcctggagcctgcgatataaattgctgctgcgacagggactgctatcttctccatccgaggacagttttctccttctgccttccaggcagcgtaaggtcttcaagctgggtttgtgtagacaactctgttatcttcaggagtaattccccgtttccttcaagagttttcatggattctaatggaatcaggcagttttgtgtccatgtgaacaactcaaacttaaactatttccagaagcttcaaaaggtcaatgcaaccaacttccaggccctggctgcagagtttggaggcgaatcattcacttcaacattccaaactcaatcaccaccatctttttacagggctggggaccccattcttacttacttccccaagtggtctgtaataagcttgctgagacaacctgcaggagttggagctgggggactctgtgctgaaagcaatcctgcaggtttcctagagagtaaaagtacaacttgcactcgttttttcaagaacctggctagtagctgtaccttggattcagccctcaatgctgcctcttactataacttcacagtcttaaaggttccaagaagcatgactgatccacagaatatggagttccaggttcctgtaatacttacctcacaggctaatgctcctctgttggctggaaacacttgtcagaatgtagtttctcaggtcacctatgagatagagaccaatgggacttttggaatccagaaagtttctgtcagtttgggacaaaccaacctgactgttgagccaggcgcttccttacagcaacacttcatccttcgcttcagggcttttcaacagagcacagctgcttctctcaccagtcctagaagtgggaatcctggctatatagttgggaagccactcttggctctgactgatgatataagttactcaatgaccctcttacagagccagggtaatggaagttgctctgttaaaagacatgaagtgcagtttggagtgaatgcaatatctggatgcaagctcaggttgaagaaggcagactgcagccacttgcagcaggagatttatcagactcttcatggaaggcccagaccagagtatgttgccatctttggtaatgctgacccagcccagaaaggagggtggaccaggatcctcaacaggcactgcagcatttcagctataaactgtacttcctgctgtctcataccagtttccctggagatccaggtattgtgggcatatgtaggtctcctgtccaacccgcaagctcatgtatcaggagttcgattcctataccagtgccagtctatacaggattctcagcaagttacagaagtatctttgacaactcttgtgaactttgtggacattacccagaagccacagcctccaaggggccaacccaaaatggactggaaatggccattcgacttctttcccttcaaagtggcattcagcagaggagtattctctcaaaaatgctcagtctctcccatccttatcctgtgcctcttactacttggagttctcaacctagagactatgtgaagaaaagaaaataatcagatttcagttttccctatgagaaactctgaggcagccacttatcttggctaaatagaacctcacctgctcatgaccagagagcatttaggataatagaggacctaactgaaggaatccttgtatatgaaaggagttattttagaaaagcaataaaaatattttattcatcatagctctctgctttgggctctgcaggccaccagatacacatgaggcccctacttctcaagctgggaaggccaagagccttccttcagcctttctggttatgttacacctagctgaatgtttacaaggtctggatccatcagccctcaggcacagttgggccaagcagaaagagagaaacacttctgctgtcaccttgaatgaactcaggaatagcttccctctggactgtagaggagctaactgtttggaacagaaaactgctggctgttgattttgtctggttcctttgccaacatctgggcacaccctttgcccagacacgagtggggaaagcagttctttctcctcagtttccaaagtaaatggggaatcccagctttcttttctactagcaaatgaccctaccatttatttctgcctttttcttccgttcattgtgaggaaaaataaaactggttgagagctttgttgtacta

SEQ ID NO: 440119 - DNA, 1789 bp, Homo sapiens
acggttgccaggcaacggaggcacggcccggcccgcgttaaggaggagggcgcagaccgaaggacactgaaagagctgtaacaaccccactttcgattggttgaagagctctcagccttctcatgagccaatgagaagaggcacgcggatggcgtcagacgctatgcgactcctcccacccacgctctggcaatgcgattggagaccgcggaggcctacgtcggacccggaggccctgaatgccccatgcgcaccccacagctcgcgctcctgcaagtgttctttctggtgttccccgatggcgtccggcctcagccctcttcctccccatcaggggcagtgcccacgtctttggagctgcagcgagggacggatggcggaaccctccagtccccttcagaggcgactgcaactcgcccggccgtgcctggactccctacagtggtccctactctcgtgactccctcggcccctgggaataggactgtggacctcttcccagtcttaccgatctgtgtctgtgacttgactcctggagcctgcgatataaattgctgctgcgacagggactgctatcttctccatccgaggacagttttctccttctgccttccaggcagcgtaaggtcttcaagctgggtttgtgtagacaactctgttatcttcaggagtaattccccgtttccttcaagagttttcatggattctaatggaatcaggcagttttgtgtccatgtgaacaactcaaacttaaactatttccagaagcttcaaaaggtcaatgcaaccaacttccaggccctggctgcagagtttggaggcgaatcattcacttcaacattccaaactcaatcaccaccatctttttacagggctggggaccccattcttacttacttccccaagtggtctgtaataagcttgctgagacaacctgcaggagttggagctgggggactctgtgctgaaagcaatcctgcaggtttcctagagagtaaaagtacaacttgcactcgttttttcaagaacctggctagtagctgtaccttggattcagccctcaatgctgcctcttactataacttcacagtcttaaaggttccaagaagcatgactgatccacagaatatggagttccaggttcctgtaatacttacctcacaggctaatgctcctctgttggctggaaacacttgtcagaatgtagtttctcaggtcacctatgagatagagaccaatgggacttttggaatccagaaagtttctgtcagtttgggacaaaccaacctgactgttgagccaggcgcttccttacagcaacacttcatccttcgcttcagggcttttcaacagagcacagctgcttctctcaccagtcctagaagtgggaatcctggctatatagttgggaagccactcttggctctgactgatgatataagttactcaatgaccctcttacagagccagggtaatggaagttgctctgttaaaagacatgaagtgcagtttggagtgaatgcaatatctggatgcaagctcaggttgaagaaggcagactgcagccacttgcagcaggagatttatcagactcttcatggaaggcccagaccagagtatgttgccatctttggtaatgctgacccagcccagaaaggagggtggaccaggatcctcaacaggcactgcagcatttcagtaaggagagaaatatactttctgatgaagactcatttttacccctttgtaaatcttggatagtaagtttaaaaccagcctgtctccatag

SEQ ID NO: 440120 - DNA, 1558 bp, Homo sapiens
acggttgccaggcaacggaggcacggcccggcccgcgttaaggaggagggcgcagaccgaaggacactgaaagagctgtaacaaccccactttcgattggttgaagagctctcagccttctcatgagccaatgagaagaggcacgcggatggcgtcagacgctatgcgactcctcccacccacgctctggcaatgcgattggagaccgcggaggcctacgtcggacccggaggccctgaatgccccatgcgcaccccacagctcgcgctcctgcaagtgttctttctggtgttccccgatggcgtccggcctcagccctcttcctccccatcaggggcagtgcccacgtctttggagctgcagcgagggacggatggcggaaccctccagtccccttcagaggcgactgcaactcgcccggccgtgcctggactccctacagtggtccctactctcgtgactccctcggcccctgggaataggactgtggacctcttcccagtcttaccgatctgtgtctgtgacttgactcctggagcctgcgatataaattgctgctgcgacagggactgctatcttctccatccgaggacagttttctccttctgccttccaggcagcgtaaggtcttcaagctgggtttgtgtagacaactctgttatcttcaggagtaattccccgtttccttcaagagttttcatggattctaatggaatcaggcagttttgtgtccatgtgaacaactcaaacttaaactatttccagaagcttcaaaaggtcaatgcaaccaacttccaggccctggctgcagagtttggaggcgaatcattcacttcaacattccaaactcaatcaccaccatctttttacagggctggggaccccattcttacttacttccccaagtggtctgtaataagcttgctgagacaacctgcaggagttggagctgggggactctgtgctgaaagcaatcctgcaggtttcctagagagtaaaagtacaacttgcactcgttttttcaagaacctggctagtagctgtaccttggattcagccctcaatgctgcctcttactataacttcacagtcttaaaggttccaagaagcatgactgatccacagaatatggaggattctcagcaagttacagaagtatctttgacaactcttgtgaactttgtggacattacccagaagccacagcctccaaggggccaacccaaaatggactggaaatggccattcgacttctttcccttcaaagtggcattcagcagaggagtattctctcaaaaatgctcagtctctcccatccttatcctgtgcctcttactacttggagttctcaacctagagactatgtgaagaaaagaaaataatcagatttcagttttccctatgagaaactctgaggcagccacttatcttggctaaatagaacctcacctgctcatgaccagagagcatttaggataatagaggacctaactgaaggaatccttgtatatgaaaggagttattttagaaaagcaataaaaatattttattcatcata

SEQ ID NO: 440121 - DNA, 1708 bp, Homo sapiens
acggttgccaggcaacggaggcacggcccggcccgcgttaaggaggagggcgcagaccgaaggacactgaaagagctgtaacaaccccactttcgattggttgaagagctctcagccttctcatgagccaatgagaagaggcacgcggatggcgtcagacgctatgcgactcctcccacccacgctctggcaatgcgattggagaccgcggaggcctacgtcggacccggaggccctgaatgccccatgcgcaccccacagctcgcgctcctgcaagtgttctttctggtgttccccgatggcgtccggcctcagccctcttcctccccatcaggggcagtgcccacgtctttggagctgcagcgagggacggatggcggaaccctccagtccccttcagaggcgactgcaactcgcccggccgtgcctggactccctacagtggtccctactctcgtgactccctcggcccctgggaataggactgtggacctcttcccagtcttaccgatctgtgtctgtgacttgactcctggagcctgcgatataaattgctgctgcgacagggactgctatcttctccatccgaggacagttttctccttctgccttccaggcagcgtaaggtcttcaagctgggtttgtgtagacaactctgttatcttcaggagtaattccccgtttccttcaagagttttcatggattctaatggaatcaggcagttttgtgtccatgtgaacaactcaaacttaaactatttccagaagcttcaaaaggtcaatgcaaccaacttccaggccctggctgcagagtttggaggcgaatcattcacttcaacattccaaactcaatcaccaccatctttttacagggctggggaccccattcttacttacttccccaagtggtctgtaataagcttgctgagacaacctgcaggagttggagctgggggactctgtgctgaaagcaatcctgcaggtttcctagagagtaaaagtacaacttgcactcgttttttcaagaacctggctagtagctgtaccttggattcagccctcaatgctgcctcttactataacttcacagtcttaaaggttccaagaagcatgactgatccacagaatatggagttccaggttcctgtaatacttacctcacaggctaatgctcctctgttggctggaaacacttgtcagaatgtagtttctcaggtcacctatgagatagagaccaatgggacttttggaatccagaaagtttctgtcagtttgggacaaaccaacctgactgttgagccaggcgcttccttacagcaacacttcatccttcgcttcagggcttttcaacagagcacagctgcttctctcaccagtcctagaagtgggaatcctggctatatagttgggaagccactcttggctctgactgatgatataagttactcagtatcctttttagagctgggtggcctgttgcagcctaatgagaaaagctgcaaaggctttcaaacttatgttagactagccaaaggtgaggaattttttgttcattataatgaggtacttatatactaatatatggttaatcatttttggaatctagttgtctctctgtggttttctgaggaaaaaaatcacaaatttgtgactcgaacattatgatagtaatacaaaataaatagcattaaaggagaatgagaacata

SEQ ID NO: 440122 - DNA, 2303 bp, Homo sapiens
cttacttctgagatctaaaattctgtgagcaaagttgagctgccacaaagcaggagtggggctgtcggaagaaggagggtgagcacctgggagagtttggggatcttcatcccactcactctgtgtcgtactttcatagtcttaccgatctgtgtctgtgacttgactcctggagcctgcgatataaattgctgctgcgacagggactgctatcttctccatccgaggacagttttctccttctgccttccaggcagcgtaaggtcttcaagctgggtttgtgtagacaactctgttatcttcaggagtaattccccgtttccttcaagagttttcatggattctaatggaatcaggcagttttgtgtccatgtgaacaactcaaacttaaactatttccagaagcttcaaaaggtcaatgcaaccaacttccaggccctggctgcagagtttggaggcgaatcattcacttcaacattccaaactcaatcaccaccatctttttacagggctggggaccccattcttacttacttccccaagtggtctgtaataagcttgctgagacaacctgcaggagttggagctgggggactctgtgctgaaagcaatcctgcagattcagccctcaatgctgcctcttactataacttcacagtcttaaaggttccaagaagcatgactgatccacagaatatggagttccaggttcctgtaatacttacctcacaggctaatgctcctctgttggctggaaacacttgtcagaatgtagtttctcaggtcacctatgagatagagaccaatgggacttttggaatccagaaagtttctgtcagtttgggacaaaccaacctgactgttgagccaggcgcttccttacagcaacacttcatccttcgcttcagggcttttcaacagagcacagctgcttctctcaccagtcctagaagtgggaatcctggctatatagttgggaagccactcttggctctgactgatgatataagttactcaatgaccctcttacagagccagggtaatggaagttgctctgttaaaagacatgaagtgcagtttggagtgaatgcaatatctggatgcaagctcaggttgaagaaggcagactgcagccacttgcagcaggagatttatcagactcttcatggaaggcccagaccagagtatgttgccatctttggtaatgctgacccagcccagaaaggagggtggaccaggatcctcaacaggcactgcagcatttcagctataaactgtacttcctgctgtctcataccagtttccctggagatccaggtattgtgggcatatgtaggtctcctgtccaacccgcaagctcatgtatcaggagttcgattcctataccagtgccagtctatacaggattctcagcaagttacagaagtatctttgacaactcttgtgaactttgtggacattacccagaagccacagcctccaaggggccaacccaaaatggactggaaatggccattcgacttctttcccttcaaagtggcattcagcagaggagtattctctcaaaaatgctcagtctctcccatccttatcctgtgcctcttactacttggagttctcaacctagagactatgtgaagaaaagaaaataatcagatttcagttttccctatgagaaactctgaggcagccacttatcttggctaaatagaacctcacctgctcatgaccagagagcatttaggataatagaggacctaactgaaggaatccttgtatatgaaaggagttattttagaaaagcaataaaaatattttattcatcatagctctctgctttgggctctgcaggccaccagatacacatgaggcccctacttctcaagctgggaaggccaagagccttccttcagcctttctggttatgttacacctagctgaatgtttacaaggtctggatccatcagccctcaggcacagttgggccaagcagaaagagagaaacacttctgctgtcaccttgaatgaactcaggaatagcttccctctggactgtagaggagctaactgtttggaacagaaaactgctggctgttgattttgtctggttcctttgccaacatctgggcacaccctttgcccagacacgagtggggaaagcagttctttctcctcagtttccaaagtaaatggggaatcccagctttcttttctactagcaaatgaccctaccatttatttctgcctttttcttccgttcattgtgaggaaaaataaaactggttgagagctttgttgtacta

SEQ ID NO: 440123 - DNA, 1604 bp, Homo sapiens
gtgaacccttttaaagagctctatccagtttctttttcatatacaaatataatatgaaatcatctttatctttcatagtatttgtgtttggcatttttaacattactgtttcagtctgcctcatttagttataataacacccttgaagacagaaaatcttctgtcctaaacatattcggcccaataactactttttattaattgattctttttgcatttcaggtcacctatgagatagagaccaatgggacttttggaatccagaaagtttctgtcagtttgggacaaaccaacctgactgttgagccaggcgcttccttacagcaacacttcatccttcgcttcagggcttttcaacagagcacagctgcttctctcaccagtcctagaagtgggaatcctggctatatagttgggaagccactcttggctctgactgatgatataagttactcaatgaccctcttacagagccagggtaatggaagttgctctgttaaaagacatgaagtgcagtttggagtgaatgcaatatctggatgcaagctcaggttgaagaaggcagactgcagccacttgcagcaggagatttatcagactcttcatggaaggcccagaccagagtatgttgccatctttggtaatgctgacccagcccagaaaggagggtggaccaggatcctcaacaggcactgcagcatttcagattctcagcaagttacagaagtatctttgacaactcttgtgaactttgtggacattacccagaagccacagcctccaaggggccaacccaaaatggactggaaatggccattcgacttctttcccttcaaagtggcattcagcagaggagtattctctcaaaaatgctcagtctctcccatccttatcctgtgcctcttactacttggagttctcaacctagagactatgtgaagaaaagaaaataatcagatttcagttttccctatgagaaactctgaggcagccacttatcttggctaaatagaacctcacctgctcatgaccagagagcatttaggataatagaggacctaactgaaggaatccttgtatatgaaaggagttattttagaaaagcaataaaaatattttattcatcatagctctctgctttgggctctgcaggccaccagatacacatgaggcccctacttctcaagctgggaaggccaagagccttccttcagcctttctggttatgttacacctagctgaatgtttacaaggtctggatccatcagccctcaggcacagttgggccaagcagaaagagagaaacacttctgctgtcaccttgaatgaactcaggaatagcttccctctggactgtagaggagctaactgtttggaacagaaaactgctggctgttgattttgtctggttcctttgccaacatctgggcacaccctttgcccagacacgagtggggaaagcagttctttctcctcagtttccaaagtaaatggggaatcccagctttcttttctactagcaaatgaccctaccatttatttctgcctttttcttccgttcattgtgaggaaaaataaaactggttgagagctttgttgtacta

SEQ ID NO: 440124 - DNA, 1171 bp, Homo sapiens
tctctgatatcaggcagctccccagctaggggaagctagagtcagggtttaggtaggtgtaactgttcagttctgctatcattgactattgctaagatattcatttccttgtgtctcactgaaagagaactacataggaccaatatgagataaaggtatatcttgcttagaataattcatttctctcttcagggaaagtaataataacagccaagttagagtgctatatgaatgggtaccaagcgctgacctgtcattgactttcttcccgtgattctcagcaagttacagaagtatctttgacaactcttgtgaactttgtggacattacccagaagccacagcctccaaggggccaacccaaaatggactggaaatggccattcgacttctttcccttcaaagtggcattcagcagaggagtattctctcaaaaatgctcagtctctcccatccttatcctgtgcctcttactacttggagttctcaacctagagactatgtgaagaaaagaaaataatcagatttcagttttccctatgagaaactctgaggcagccacttatcttggctaaatagaacctcacctgctcatgaccagagagcatttaggataatagaggacctaactgaaggaatccttgtatatgaaaggagttattttagaaaagcaataaaaatattttattcatcatagctctctgctttgggctctgcaggccaccagatacacatgaggcccctacttctcaagctgggaaggccaagagccttccttcagcctttctggttatgttacacctagctgaatgtttacaaggtctggatccatcagccctcaggcacagttgggccaagcagaaagagagaaacacttctgctgtcaccttgaatgaactcaggaatagcttccctctggactgtagaggagctaactgtttggaacagaaaactgctggctgttgattttgtctggttcctttgccaacatctgggcacaccctttgcccagacacgagtggggaaagcagttctttctcctcagtttccaaagtaaatggggaatcccagctttcttttctactagcaaatgaccctaccatttatttctgcctttttcttccgttcattgtgaggaaaaataaaactggttgagagctttgttgtacta

SEQ ID NO: 440125 - DNA, 803 bp, Homo sapiens
acggttgccaggcaacggaggcacggcccggcccgcgttaaggaggagggcgcagaccgaaggacactgaaagagctgtaacaaccccactttcgattggttgaagagctctcagccttctcatgagccaatgagaagaggcacgcggatggcgtcagacgctatgcgactcctcccacccacgctctggcaatgcgattggagaccgcggaggcctacgtcggacccggaggccctgaatgccccatgcgcaccccacagctcgcgctcctgcaagtgttctttctggtgttccccgatggcgtccggcctcagccctcttcctccccatcaggggcagtgcccacgtctttggagctgcagcgagggacggatggcggaaccctccagtccccttcagaggcgactgcaactcgcccggccgtgcctggactccctacagtggtccctactctcgtgactccctcggcccctgggaataggactgtggacctcttcccagtcttaccgatctgtgtctgtgacttgactcctggagcctgcgatataaattgctgctgcgacagggactgctatcttctccatccgaggacagttttctccttctgccttccaggcagcgtaaggtcttcaagctgggtttgtgtagacaactctgttatcttcaggagtaattccccgtttccttcaagagttttcatggattctaatggaatcaggcagttttgtgtccatgtgaacaactgtgagtagaaacatgttggttgttctcattttctaacacaggagtgttatattttgtc

SEQ ID NO: 440126 - DNA, 419 bp, Homo sapiens
ggctggccagtagaataagaccttcgtgtcgtcctataggtgcccaaggagtcctctttggcatcatctggccgatattgctgggacactcttttttggacctgccccgccccttctaaatatatcttctccctcctctttcctcacaggtcttcaagctgggtttgtgtagacaactctgttatcttcaggagtaattccccgtttccttcaagagttttcatggattctaatggaatcaggcagttttgtgtccatgtgaacaactgtgagtagaaacatgttggttgttctcattttctaacacaggagtgttatattttgtcttccctggcccacattggaagaagaattgtcttgggccacacgtaaaatacactaacgatagctgatgagttaaaaacaacaacaaaaaaaaa

SEQ ID NO: 440127 - DNA, 2735 bp, Homo sapiens
acggttgccaggcaacggaggcacggcccggcccgcgttaaggaggagggcgcagaccgaaggacactgaaagagctgtaacaaccccactttcgattggttgaagagctctcagccttctcatgagccaatgagaagaggcacgcggatggcgtcagacgctatgcgactcctcccacccacgctctggcaatgcgattggagaccgcggaggcctacgtcggacccggaggccctgaatgccccatgcgcaccccacagctcgcgctcctgcaagtgttctttctggtgttccccgatggcgtccggcctcagccctcttcctccccatcaggggcagtgcccacgtctttggagctgcagcgagggacggatggcggaaccctccagtccccttcagaggcgactgcaactcgcccggccgtgcctggactccctacagtggtccctactctcgtgactccctcggcccctgggaataggactgtggacctcttcccagtcttaccgatctgtgtctgtgacttgactcctggagcctgcgatataaattgctgctgcgacagggactgctatcttctccatccgaggacagttttctccttctgccttccaggcagcgtaaggtcttcaagctgggtttgtgtagacaactctgttatcttcaggagtaattccccgtttccttcaagagttttcatggattctaatggaatcaggcagttttgtgtccatgtgaacaactcaaacttaaactatttccagaagcttcaaaaggtcaatgcaaccaacttccaggccctggctgcagagtttggaggcgaatcattcacttcaacattccaaactcaatcaccaccatctttttacagggctggggaccccattcttacttacttccccaagtggtctgtaataagcttgctgagacaacctgcaggagttggagctgggggactctgtgctgaaagcaatcctgcaggtttcctagagagtaaaagtacaacttgcactcgttttttcaagaacctggctagtagctgtaccttggattcagccctcaatgctgcctcttactataacttcacagtcttaaaggttccaagaagcatgactgatccacagaatatggagttccaggttcctgtaatacttacctcacaggctaatgctcctctgttggctggaaacacttgtcagaatgtagtttctcaggtcacctatgagatagagaccaatgggacttttggaatccagaaagtttctgtcagtttgggacaaaccaacctgactgttgagccaggcgcttccttacagcaacacttcatccttcgcttcagggcttttcaacagagcacagctgcttctctcaccagtcctagaagtgggaatcctggctatatagttgggaagccactcttggctctgactgatgatataagttactcaatgaccctcttacagagccagggtaatggaagttgctctgttaaaagacatgaagtgcagtttggagtgaatgcaatatctggatgcaagctcaggttgaagaaggcagactgcagccacttgcagcaggagatttatcagactcttcatggaaggcccagaccagagtatgttgccatctttggtaatgctgacccagcccagaaaggagggtggaccaggatcctcaacaggcactgcagcatttcagctataaactgtacttcctgctgtctcataccagtttccctggagatccaggtattgtgggcatatgtaggtctcctgtccaacccgcaagctcatgtatcaggagttcgattcctataccagtgccagtctatacaggattctcagcaagttacagaagtatctttgacaactcttgtgaactttgtggacattacccagaagccacagcctccaaggggccaacccaaaatggactggaaatggccattcgacttctttcccttcaaagtggcattcagcagaggagtattctctcaaaaatgctcagtctctcccatccttatcctgtgcctcttactacttggagttctcaacctagagactatgtgaagaaaagaaaataatcagatttcagttttccctatgagaaactctgaggcagccacttatcttggctaaatagaacctcacctgctcatgaccagagagcatttaggataatagaggacctaactgaaggaatccttgtatatgaaaggagttattttagaaaagcaataaaaatattttattcatcatagctctctgctttgggctctgcaggccaccagatacacatgaggcccctacttctcaagctgggaaggccaagagccttccttcagcctttctggttatgttacacctagctgaatgtttacaaggtctggatccatcagccctcaggcacagttgggccaagcagaaagagagaaacacttctgctgtcaccttgaatgaactcaggaatagcttccctctggactgtagaggagctaactgtttggaacagaaaactgctggctgttgattttgtctggttcctttgccaacatctgggcacaccctttgcccagacacgagtggggaaagcagttctttctcctcagtttccaaagtaaatggggaatcccagctttcttttctactagcaaatgaccctaccatttatttctgcctttttcttccgttcattgtgaggaaaaataaaactggttgagagctttgttgtacta

SEQ ID NO: 440128 - DNA, 2260 bp, Homo sapiens
acggttgccaggcaacggaggcacggcccggcccgcgttaaggaggagggcgcagaccgaaggacactgaaagagctgtaacaaccccactttcgattggttgaagagctctcagccttctcatgagccaatgagaagaggcacgcggatggcgtcagacgctatgcgactcctcccacccacgctctggcaatgcgattggagaccgcggaggcctacgtcggacccggaggccctgaatgccccatgcgcaccccacagctcgcgctcctgcaagtgttctttctggtgttccccgatggcgtccggcctcagccctcttcctccccatcaggggcagtgcccacgtctttggagctgcagcgagggacggatggcggaaccctccagtccccttcagaggcgactgcaactcgcccggccgtgcctggactccctacagtggtccctactctcgtgactccctcggcccctgggaataggactgtggacctcttcccagtcttaccgatctgtgtctgtgacttgactcctggagcctgcgatataaattgctgctgcgacagggactgctatcttctccatccgaggacagttttctccttctgccttccaggcagcgtaaggtcttcaagctgggtttgtgtagacaactctgttatcttcaggagtaattccccgtttccttcaagagttttcatggattctaatggaatcaggcagttttgtgtccatgtgaacaactcaaacttaaactatttccagaagcttcaaaaggtcaatgcaaccaacttccaggccctggctgcagagtttggaggcgaatcattcacttcaacattccaaactcaatcaccaccatctttttacagggctggggaccccattcttacttacttccccaagtggtctgtaataagcttgctgagacaacctgcaggagttggagctgggggactctgtgctgaaagcaatcctgcaggtttcctagagagtaaaagtacaacttgcactcgttttttcaagaacctggctagtagctgtaccttggattcagccctcaatgctgcctcttactataacttcacagtcttaaaggttccaagaagcatgactgatccacagaatatggagttccaggttcctgtaatacttacctcacaggctaatgctcctctgttggctggaaacacttgtcagaatgtagtttctcaggtcacctatgagatagagaccaatgggacttttggaatccagaaagtttctgtcagtttgggacaaaccaacctgactgttgagccaggcgcttccttacagcaacacttcatccttcgcttcagggcttttcaacagagcacagctgcttctctcaccagtcctagaagtgggaatcctggctatatagttgggaagccactcttggctctgactgatgatataagttactcaatgaccctcttacagagccagggtaatggaagttgctctgttaaaagacatgaagtgcagtttggagtgaatgcaatatctggatgcaagctcaggttgaagaaggcagactgcagccacttgcagcaggagatttatcagactcttcatggaaggcccagaccagagtatgttgccatctttggtaatgctgacccagcccagaaaggagggtggaccaggatcctcaacaggcactgcagcatttcagctataaactgtacttcctgctgtctcataccagtttccctggagatccaggtattgtgggcatatgtaggtctcctgtccaacccgcaagctcatgtatcaggagttcgattcctataccagtgccagtctatacaggattctcagcaagttacagaagtatctttgacaactcttgtgaactttgtggacattacccagaagccacagcctccaaggggccaacccaaaatggactggaaatggccattcgacttctttcccttcaaagtggcattcagcagaggagtattctctcaaaaatgctcagtctctcccatccttatcctgtgcctcttactacttggagttctcaacctagagactatgtgaagaaaagaaaataatcagatttcagttttccctatgagaaactctgaggcagccacttatcttggctaaatagaacctcacctgctcatgaccagagagcatttaggataatagaggacctaactgaaggaatccttgtatatgaaaggagttattttagaaaagcaataaaaatattttattcatcata

SEQ ID NO: 440129 - DNA, 2597 bp, Homo sapiens
acggttgccaggcaacggaggcacggcccggcccgcgttaaggaggagggcgcagaccgaaggacactgaaagagctgtaacaaccccactttcgattggttgaagagctctcagccttctcatgagccaatgagaagaggcacgcggatggcgtcagacgctatgcgactcctcccacccacgctctggcaatgcgattggagaccgcggaggcctacgtcggacccggaggccctgaatgccccatgcgcaccccacagctcgcgctcctgcaagtgttctttctggtgttccccgatggcgtccggcctcagccctcttcctccccatcaggggcagtgcccacgtctttggagctgcagcgagggacggatggcggaaccctccagtccccttcagaggcgactgcaactcgcccggccgtgcctggactccctacagtggtccctactctcgtgactccctcggcccctgggaataggactgtggacctcttcccagtcttaccgatctgtgtctgtgacttgactcctggagcctgcgatataaattgctgctgcgacagggactgctatcttctccatccgaggacagttttctccttctgccttccaggcagcgtaaggtcttcaagctgggtttgtgtagacaactctgttatcttcaggagtaattccccgtttccttcaagagttttcatggattctaatggaatcaggcagttttgtgtccatgtgaacaactcaaacttaaactatttccagaagcttcaaaaggtcaatgcaaccaacttccaggccctggctgcagagtttggaggcgaatcattcacttcaacattccaaactcaatcaccaccatctttttacagggctggggaccccattcttacttacttccccaagtggtctgtaataagcttgctgagacaacctgcaggagttggagctgggggactctgtgctgaaagcaatcctgcaggtttcctagagagtaaaagtacaacttgcactcgttttttcaagaacctggctagtagctgtaccttggattcagccctcaatgctgcctcttactataacttcacagtcttaaaggttccaagaagcatgactgatccacagaatatggagttccaggttcctgtaatacttacctcacaggctaatgctcctctgttggctggaaacacttgtcagaatgtagtttctcaggtcacctatgagatagagaccaatgggacttttggaatccagaaagtttctgtcagtttgggacaaaccaacctgactgttgagccaggcgcttccttacagcaacacttcatccttcgcttcagggcttttcaacagagcacagctgcttctctcaccagtcctagaagtgggaatcctggctatatagttgggaagccactcttggctctgactgatgatataagttactcaatgaccctcttacagagccagggtaatggaagttgctctgttaaaagacatgaagtgcagtttggagtgaatgcaatatctggatgcaagctcaggttgaagaaggcagactgcagccacttgcagcaggagatttatcagactcttcatggaaggcccagaccagagtatgttgccatctttggtaatgctgacccagcccagaaaggagggtggaccaggatcctcaacaggcactgcagcatttcagattctcagcaagttacagaagtatctttgacaactcttgtgaactttgtggacattacccagaagccacagcctccaaggggccaacccaaaatggactggaaatggccattcgacttctttcccttcaaagtggcattcagcagaggagtattctctcaaaaatgctcagtctctcccatccttatcctgtgcctcttactacttggagttctcaacctagagactatgtgaagaaaagaaaataatcagatttcagttttccctatgagaaactctgaggcagccacttatcttggctaaatagaacctcacctgctcatgaccagagagcatttaggataatagaggacctaactgaaggaatccttgtatatgaaaggagttattttagaaaagcaataaaaatattttattcatcatagctctctgctttgggctctgcaggccaccagatacacatgaggcccctacttctcaagctgggaaggccaagagccttccttcagcctttctggttatgttacacctagctgaatgtttacaaggtctggatccatcagccctcaggcacagttgggccaagcagaaagagagaaacacttctgctgtcaccttgaatgaactcaggaatagcttccctctggactgtagaggagctaactgtttggaacagaaaactgctggctgttgattttgtctggttcctttgccaacatctgggcacaccctttgcccagacacgagtggggaaagcagttctttctcctcagtttccaaagtaaatggggaatcccagctttcttttctactagcaaatgaccctaccatttatttctgcctttttcttccgttcattgtgaggaaaaataaaactggttgagagctttgttgtacta

SEQ ID NO: 440130 - DNA, 2371 bp, Homo sapiens
acggttgccaggcaacggaggcacggcccggcccgcgttaaggaggagggcgcagaccgaaggacactgaaagagctgtaacaaccccactttcgattggttgaagagctctcagccttctcatgagccaatgagaagaggcacgcggatggcgtcagacgctatgcgactcctcccacccacgctctggcaatgcgattggagaccgcggaggcctacgtcggacccggaggccctgaatgccccatgcgcaccccacagctcgcgctcctgcaagtgttctttctggtgttccccgatggcgtccggcctcagccctcttcctccccatcaggggcagtgcccacgtctttggagctgcagcgagggacggatggcggaaccctccagtccccttcagaggcgactgcaactcgcccggccgtgcctggactccctacagtggtccctactctcgtgactccctcggcccctgggaataggactgtggacctcttcccagtcttaccgatctgtgtctgtgacttgactcctggagcctgcgatataaattgctgctgcgacagggactgctatcttctccatccgaggacagttttctccttctgccttccaggcagcgtaaggtcttcaagctgggtttgtgtagacaactctgttatcttcaggagtaattccccgtttccttcaagagttttcatggattctaatggaatcaggcagttttgtgtccatgtgaacaactcaaacttaaactatttccagaagcttcaaaaggtcaatgcaaccaacttccaggccctggctgcagagtttggaggcgaatcattcacttcaacattccaaactcaatcaccaccatctttttacagggctggggaccccattcttacttacttccccaagtggtctgtaataagcttgctgagacaacctgcaggagttggagctgggggactctgtgctgaaagcaatcctgcaggtttcctagagagtaaaagtacaacttgcactcgttttttcaagaacctggctagtagctgtaccttggattcagccctcaatgctgcctcttactataacttcacagtcttaaaggttccaagaagcatgactgatccacagaatatggagttccaggttcctgtaatacttacctcacaggctaatgctcctctgttggctggaaacacttgtcagaatgtagtttctcaggtcacctatgagatagagaccaatgggacttttggaatccagaaagtttctgtcagtttgggacaaaccaacctgactgttgagccaggcgcttccttacagcaacacttcatccttcgcttcagggcttttcaacagagcacagctgcttctctcaccagtcctagaagtgggaatcctggctatatagttgggaagccactcttggctctgactgatgatataagttactcaatgaccctcttacagagccagggtaatggaagttgctctgttaaaagacatgaagtgcagtttggagtgaatgcaatatctggatgcaagctcaggttgaagaaggcagactgcagccacttgcagcaggagatttatcagactcttcatggaaggcccagaccagagtatgttgccatctttggtaatgctgacccagcccagaaaggagggtggaccaggatcctcaacaggcactgcagcatttcagctataaactgtacttcctgctgtctcataccagtttccctggagatccaggtattgtgggcatatgtaggtctcctgtccaacccgcaagctcatgtatcaggagttcgattcctataccagtgccagtctatacaggtcggttattttcctcctacccccccactactctgccagtgtatttgcatcagattattaaatcagtattcaatgtttcatcatgatgtttatgtgaatatgcatgctgcggattctcagcaagttacagaagtatctttgacaactcttgtgaactttgtggacattacccagaagccacagcctccaaggggccaacccaaaatggactggaaatggccattcgacttctttcccttcaaagtggcattcagcagaggagtattctctcaaaaatgctcagtctctcccatccttatcctgtgcctcttactacttggagttctcaacctagagactatgtgaagaaaagaaaataatcagatttcagttttccctatgagaaactctgaggcagccacttatcttggctaaatagaacctcacctgctcatgaccagagagcatttaggataatagaggacctaactgaaggaatccttgtatatgaaaggagttattttagaaaagcaataaaaatattttattcatcata

SEQ ID NO: 440131 - DNA, 1595 bp, Homo sapiens
acggttgccaggcaacggaggcacggcccggcccgcgttaaggaggagggcgcagaccgaaggacactgaaagagctgtaacaaccccactttcgattggttgaagagctctcagccttctcatgagccaatgagaagaggcacgcggatggcgtcagacgctatgcgactcctcccacccacgctctggcaatgcgattggagaccgcggaggcctacgtcggacccggaggccctgaatgccccatgcgcaccccacagctcgcgctcctgcaagtgttctttctggtgttccccgatggcgtccggcctcagccctcttcctccccatcaggggcagtgcccacgtctttggagctgcagcgagggacggatggcggaaccctccagtccccttcagaggcgactgcaactcgcccggccgtgcctggactccctacagtggtccctactctcgtgactccctcggcccctgggaataggactgtggacctcttcccagtcttaccgatctgtgtctgtgacttgactcctggagcctgcgatataaattgctgctgcgacagggactgctatcttctccatccgaggacagttttctccttctgccttccaggcagcgtaaggtcttcaagctgggtttgtgtagacaactctgttatcttcaggagtaattccccgtttccttcaagagttttcatggattctaatggaatcaggcagttttgtgtccatgtgaacaactcaaacttaaactatttccagaagcttcaaaaggtcaatgcaaccaacttccaggccctggctgcagagtttggaggcgaatcattcacttcaacattccaaactcaatcaccaccatctttttacagggctggggaccccattcttacttacttccccaagtggtctgtaataagcttgctgagacaacctgcaggagttggagctgggggactctgtgctgaaagcaatcctgcaggtttcctagagagtaaaagtacaacttgcactcgttttttcaagaacctggctagtagctgtaccttggattcagccctcaatgctgcctcttactataacttcacagtcttaaaggttccaagaagcatgactgatccacagaatatggagttccaggttcctgtaatacttacctcacaggctaatggattctcagcaagttacagaagtatctttgacaactcttgtgaactttgtggacattacccagaagccacagcctccaaggggccaacccaaaatggactggaaatggccattcgacttctttcccttcaaagtggcattcagcagaggagtattctctcaaaaatgctcagtctctcccatccttatcctgtgcctcttactacttggagttctcaacctagagactatgtgaagaaaagaaaataatcagatttcagttttccctatgagaaactctgaggcagccacttatcttggctaaatagaacctcacctgctcatgaccagagagcatttaggataatagaggacctaactgaaggaatccttgtatatgaaaggagttattttagaaaagcaataaaaatattttattcatcata

SEQ ID NO: 440132 - DNA, 1717 bp, Homo sapiens
acggttgccaggcaacggaggcacggcccggcccgcgttaaggaggagggcgcagaccgaaggacactgaaagagctgtaacaaccccactttcgattggttgaagagctctcagccttctcatgagccaatgagaagaggcacgcggatggcgtcagacgctatgcgactcctcccacccacgctctggcaatgcgattggagaccgcggaggcctacgtcggacccggaggccctgaatgccccatgcgcaccccacagctcgcgctcctgcaagtgttctttctggtgttccccgatggcgtccggcctcagccctcttcctccccatcaggggcagtgcccacgtctttggagctgcagcgagggacggatggcggaaccctccagtccccttcagaggcgactgcaactcgcccggccgtgcctggactccctacagtggtccctactctcgtgactccctcggcccctgggaataggactgtggacctcttcccagtcttaccgatctgtgtctgtgacttgactcctggagcctgcgatataaattgctgctgcgacagggactgctatcttctccatccgaggacagttttctccttctgccttccaggcagcgtaaggtcttcaagctgggtttgtgtagacaactctgttatcttcaggagtaattccccgtttccttcaagagttttcatggattctaatggaatcaggcagttttgtgtccatgtgaacaactcaaacttaaactatttccagaagcttcaaaaggtcaatgcaaccaacttccaggccctggctgcagagtttggaggcgaatcattcacttcaacattccaaactcaatcaccaccatctttttacagggctggggaccccattcttacttacttccccaagtggtctgtaataagcttgctgagacaacctgcaggagttggagctgggggactctgtgctgaaagcaatcctgcaggtttcctagagagtaaaagtacaacttgcactcgttttttcaagaacctggctagtagctgtaccttggattcagccctcaatgctgcctcttactataacttcacagtcttaaaggttccaagaagcatgactgatccacagaatatggagttccaggttcctgtaatacttacctcacaggctaatgctcctctgttggctggaaacacttgtcagaatgtagtttctcaggtcacctatgagatagagaccaatgggacttttggaatccagaaagtttctgtcagtttgggacaaaccaacctgactgttgagccaggcgcttccttacagcaacacttcatccttcgcttcagggttagggcccttctcttataggggatttagaggggaagaaatattgggttagaaataatttctttgcttctgtaatacatgtgaaatagaataagaatatgaaggcctagttcagtctgtcgattgaggcctcaacatttaatattccataattttactacaagttgtggttattctacaagtctttactcattaaaattttctccaattctctgtctggcccccaacaaagcaggacttcaatctaaaatcaaaactttttttatagtcattttgaatcataaattcagccaacacctacaaaaattctttaactagctgttctcatatttctgggcagtcagcattttactcatttcccacttaatctgagtgt

SEQ ID NO: 440133 - DNA, 2070 bp, Homo sapiens
agcaggaattgcacaattaactcaataatgctgtgtgttctcaagaagctcccttagtgaggccgatcttaagatggccgattctgcccgttgaaggcatcctgggaaagaaaacaagcatcccagcgggcatctcaccacgacttctcctggagtcctcacatggccactcaatacccaaactctgcagccagggtctttttacagggctggggaccccattcttacttacttccccaagtggtctgtaataagcttgctgagacaacctgcaggagttggagctgggggactctgtgctgaaagcaatcctgcaggtttcctagagagtaaaagtacaacttgcactcgttttttcaagaacctggctagtagctgtaccttggattcagccctcaatgctgcctcttactataacttcacagtcttaaaggttccaagaagcatgactgatccacagaatatggagttccaggttcctgtaatacttacctcacaggctaatgctcctctgttggctggaaacacttgtcagaatgtagtttctcaggtcacctatgagatagagaccaatgggacttttggaatccagaaagtttctgtcagtttgggacaaaccaacctgactgttgagccaggcgcttccttacagcaacacttcatccttcgcttcagggcttttcaacagagcacagctgcttctctcaccagtcctagaagtgggaatcctggctatatagttgggaagccactcttggctctgactgatgatataagttactcaatgaccctcttacagagccagggtaatggaagttgctctgttaaaagacatgaagtgcagtttggagtgaatgcaatatctggatgcaagctcaggttgaagaaggcagactgcagccacttgcagcaggagatttatcagactcttcatggaaggcccagaccagagtatgttgccatctttggtaatgctgacccagcccagaaaggagggtggaccaggatcctcaacaggcactgcagcatttcagctataaactgtacttcctgctgtctcataccagtttccctggagatccaggtattgtgggcatatgtaggtctcctgtccaacccgcaagctcatgtatcaggagttcgattcctataccagtgccagtctatacaggattctcagcaagttacagaagtatctttgacaactcttgtgaactttgtggacattacccagaagccacagcctccaaggggccaacccaaaatggactggaaatggccattcgacttctttcccttcaaagtggcattcagcagaggagtattctctcaaaaatgctcagtctctcccatccttatcctgtgcctcttactacttggagttctcaacctagagactatgtgaagaaaagaaaataatcagatttcagttttccctatgagaaactctgaggcagccacttatcttggctaaatagaacctcacctgctcatgaccagagagcatttaggataatagaggacctaactgaaggaatccttgtatatgaaaggagttattttagaaaagcaataaaaatattttattcatcatagctctctgctttgggctctgcaggccaccagatacacatgaggcccctacttctcaagctgggaaggccaagagccttccttcagcctttctggttatgttacacctagctgaatgtttacaaggtctggatccatcagccctcaggcacagttgggccaagcagaaagagagaaacacttctgctgtcaccttgaatgaactcaggaatagcttccctctggactgtagaggagctaactgtttggaacagaaaactgctggctgttgattttgtctggttcctttgccaacatctgggcacaccctttgcccagacacgagtggggaaagcagttctttctcctcagtttccaaagtaaatggggaatcccagctttcttttctactagcaaatgaccctaccatttatttctgcctttttcttccgttcattgtgaggaaaaataaaactggttgagagctttgttgtacta

SEQ ID NO: 440134 - DNA, 1188 bp, Homo sapiens
acggttgccaggcaacggaggcacggcccggcccgcgttaaggaggagggcgcagaccgaaggacactgaaagagctgtaacaaccccactttcgattggttgaagagctctcagccttctcatgagccaatgagaagaggcacgcggatggcgtcagacgctatgcgactcctcccacccacgctctggcaatgcgattggagaccgcggaggcctacgtcggacccggaggccctgaatgccccatgcgcaccccacagctcgcgctcctgcaagtgttctttctggtgttccccgatggcgtccggcctcagccctcttcctccccatcaggggcagtgcccacgtctttggagctgcagcgagggacggatggcggaaccctccagtccccttcagaggcgactgcaactcgcccggccgtgcctggactccctacagtggtccctactctcgtgactccctcggcccctgggaataggactgtggacctcttcccagtcttaccgatctgtgtctgtgacttgactcctggagcctgcgatataaattgctgctgcgacagggactgctatcttctccatccgaggacagttttctccttctgccttccaggcagcgtaaggtcttcaagctgggtttgtgtagacaactctgttatcttcaggagtaattccccgtttccttcaagagttttcatggattctaatggaatcaggcagttttgtgtccatgtgaacaactcaaacttaaactatttccagaagcttcaaaaggtcaatgcaaccaacttccaggccctggctgcagagtttggaggcgaatcattcacttcaacattccaaactcaatcaccaccatctttttacagggctggggaccccattcttacttacttccccaagtggtctgtaataagcttgctgagacaacctgcaggagttggagctgggggactctgtgctgaaagcaatcctgcaggtttcctagagagtaaaagtacaacttgcactcgttttttcaagaacctggctagtagctgtaccttggattcagccctcaatgctgcctcttactataacttcacagtcttaaaggttccaagaagcatgactgatccacagaatatggagttccaggttcctgtaatacttacctcacatggccactcaataccgggaaccgag

SEQ ID NO: 440135 - DNA, 1067 bp, Homo sapiens
  misc_feature (1005)..(1005): n is a, c, g, or t
  misc_feature (1013)..(1013): n is a, c, g, or t
acggttgccaggcaacggaggcacggcccggcccgcgttaaggaggagggcgcagaccgaaggacactgaaagagctgtaacaaccccactttcgattggttgaagagctctcagccttctcatgagccaatgagaagaggcacgcggatggcgtcagacgctatgcgactcctcccacccacgctctggcaatgcgattggagaccgcggaggcctacgtcggacccggaggccctgaatgccccatgcgcaccccacagctcgcgctcctgcaagtgttctttctggtgttccccgatggcgtccggcctcagccctcttcctccccatcaggggcagtgcccacgtctttggagctgcagcgagggacggatggcggaaccctccagtccccttcagaggcgactgcaactcgcccggccgtgcctggactccctacagtggtccctactctcgtgactccctcggcccctgggaataggactgtggacctcttcccagtcttaccgatctgtgtctgtgacttgactcctggagcctgcgatataaattgctgctgcgacagggactgctatcttctccatccgaggacagttttctccttctgccttccaggcagcgtaaggtcttcaagctgggtttgtgtagacaactctgttatcttcaggagtaattccccgtttccttcaagagttttcatggattctaatggaatcaggcagttttgtgtccatgtgaacaactcaaacttaaactatttccagaagcttcaaaaggtcaatgcaaccaacttccaggccctggctgcagagtttggaggcgaatcattcacttcaacattccaaactcaatcaccaccatctttttacagggctggggaccccattcttacttacttccccaagtggtctgtaataagcttgctgagacaacctgcaggagttggagctgggggggaacttttgtgcttgaaaagccaaatccttgcaagggttttcccttanaagaagtnaaaaagttcccaaacctttggcaccttcggtttttttttcaaaaaaaaccccaa

SEQ ID NO: 440136 - DNA, 208 bp, Homo sapiens
gcggccgcctactactactactgctcgaattcaagcttctaacgatgtacggggacatgaaatgatacctaatttgtttttcttttctcttcatttttactcttaatctagtaggtctcattttgccaagtcactgtctgggaatttaagtggcaaatactttctttgtctcagctaattaaactctaaaattattagcaacaaaaaa

SEQ ID NO: 440137 - DNA, 2518 bp, Homo sapiens
  misc_feature (4)..(4): n is a, c, g, or t
ggcncgagtgacaattaaagatggctgcgcccatgtaacatcactagcgaccggtgacctctttttcccccttgcctggctcctgtggtggcaggctgggcacgaggaccatgctgggccggagcctccgagaagtttctgcggcactgaaacaaggccaaattacaccaacagagctctgtcaaaaatgtctctctcttatcaagaagaccaagtttctaaatgcctacattactgtgtcagaagaggtggccttaaaacaagctgaagaatcagaaaagagatataagaatggacagtcacttggggatttagatggaattcctattgcagtaaaagacaatttcagcacttctggcattgagacaacatgtgcatcaaatatgctgaaaggttatataccaccttataatgctacagtagttcagaagttgttggatcagggagctctactaatgggaaaaacaaatttagatgagtttgctatgggatctgggagcacagatggtgtatttggaccagttaaaaacccctggagttattcaaaacaatatagagaaaagaggaagcagaatccccacagcgagaatgaagattcagactggctgataactggaggaagctcaggtgggagtgcagctgctgtatcggcgttcacatgctacgcggctttaggatcagatacaggaggatcgaccagaaatcctgctgcccactgtgggcttgttggtttcaaaccaagctatggcttagtttcccgtcatggtctcattcccctggtgaattcgatggatgtgccaggaatcttaaccagatgtgtggatgatgcagcaattgtgttgggtgcactggccggacctgaccccagggactctaccacagtacatgaacctattaataaaccattcatgcttcccagtttggcagatgtgagcaaactatgtataggaattccaaaggtaactttttcctttcattactttacagaaatactgtcaagtccaatagagagcacagacttgggaggcggattgggtgggtttgaatctctgctctgccacttttattaatcatgtgagttgagtatgtgacttaatctcttttagctcaatttccccatctgtaaaataggaataataaaaatactgacttcagagaggtttgtgaggatcaattagacagtcatgttaagtctgtaaattgtttctgtaatgggcaagatagcaaatattttagattttgtggaccatgcagtctttatcataactgcttaactgccattatagtgagaaagcagccacagacaatatgtaaatgaaaaagtgtgtctctgttccaataaaactttattttcaaaaaccagctggcttgtcacatctggcctatgggccatagtttgcccatccctaatgtaaagaaaggactttagcccaaagccacaacttgcatagtaatgcctcaaaaaatgttaacatctttactgttattattattactactgcatctattacagtagcaattgagtaatgaatacatgaatgttataatgttaaattactaaccttttaaaaatattaagcattgcaatatattaatactttaaatcttttaggaagataagttaccctgcagaataatgaagtttcacaacctcagcactgttggtgtttggggctggtaattgtttgttgtgggagactgtcctgtgcattgtaagatgtttagtagcatccctggcctctacccctacatgcaagtagtaccccaccaccaaaaccacaatcccacaaccaaaaatgtctgcagacattgtcaagtgtctcctggttagggaaaaggagacaaaagtaacccccaggtaagaccactgctatagagaaatactaccttatttaaaatcttccattaaggtaatatatgtaaggccaggtgcgtacacctgtaatcccagcaccttgggaagccaaggcaggaggatcgcttgagatcaggagtttgagaccagcctgggcaacatacagagccctatgtctacaaaaagttttaaaaaaattgtggggtgtggtggtgtgcacctgtggtcctagctgtttgggaggctgaggggggaggattgcttgagtccaggaggttgagactgccgtgagccatgattgcaccactgcactccaccctaggtgacagagcaagaccctatctcaaaaaaaaaaaaaaaaaagaaggcaatatctgtgcattctttttaagcatttatttatagagagcataggctttaaaacagacccagtttgaaatcctagaccctctacttacctgctatttaacattaggaaaataacttcttatgtcaagatttttcattaacaaaatgaaggattataatacctacatcacaggcttgttaaaagcatgagatgagagagaatctttgaaaatcatctaacaggctgggcacggtggctcacgcctgtaatcccagcactttgggaggccgaggcgggcagatcacgaggtcagg

SEQ ID NO: 440138 - DNA, 854 bp, Homo sapiens
gtgggtgcctgtagtcccagctactcggaaggctaaggcaggagaatggcgtgaacccaggaggcggagcctgcagtgagctgagattgcgccactgcactccagcctgggcgacagagtgagactccgtctcaaaaaaaaaaaaaagaaaatcatctaacagggtacctgatacatgagcatttaacatatatgctgatatatgctgatatgctgttaggttcctgatacataatgagcatttaacaaatattttccccaaccagatctccaatctttaatgttgttatatccagatcataatatctagtactgtgctttgtcataccataaacactctgaaatggatttagtctttctagctacctaccagcaattttatcctattttctaatgtattaccaaaggtcctgaagtacagatttttataaaatcatctatacagatgaagtacaaatttttataaaataatctatacagttccaattttgtatcttgactttttgctataaggaatatcttgtaccggaattatcaagtgaagtacagtctctttggtccaaagctgctgacctctttgagtctgagggggccaaagtaattgaagtatcccttccgtacactctagttccctctatttgtttgtttaagcagctaaaacatttatctattgcctctcccattccaagcattataaataataaagcatttgttatagattgaactatacatgagtgtcttccaaaggccgtattctgacattccggtgaagaccgtgatcacgtctgagggggttacacataatgtacgaacaacaaaggatgaggctagataggggaacgatagcgatcccc

SEQ ID NO: 440139 - DNA, 4114 bp, Homo sapiens
  misc_feature (4)..(4): n is a, c, g, or t
ggcncgagtgacaattaaagatggctgcgcccatgtaacatcactagcgaccggtgacctctttttcccccttgcctggctcctgtggtggcaggctgggcacgaggaccatgctgggccggagcctccgagaagtttctgcggcactgaaacaaggccaaattacaccaacagagctctgtcaaaaatgtctctctcttatcaagaagaccaagtttctaaatgcctacattactgtgtcagaagaggtggccttaaaacaagctgaagaatcagaaaagagatataagaatggacagtcacttggggatttagatggaattcctattgcagtaaaagacaatttcagcacttctggcattgagacaacatgtgcatcaaatatgctgaaaggttatataccaccttataatgctacagtagttcagaagttgttggatcagggagctctactaatgggaaaaacaaatttagatgagtttgctatgggatctgggagcacagatggtgtatttggaccagttaaaaacccctggagttattcaaaacaatatagagaaaagaggaagcagaatccccacagcgagaatgaagattcagactggctgataactggaggaagctcaggtgggagtgcagctgctgtatcggcgttcacatgctacgcggctttaggatcagatacaggaggatcgaccagaaatcctgctgcccactgtgggcttgttggtttcaaaccaagctatggcttagtttcccgtcatggtctcattcccctggtgaattcgatggatgtgccaggaatcttaaccagatgtgtggatgatgcagcaattgtgttgggtgcactggccggacctgaccccagggactctaccacagtacatgaacctattaataaaccattcatgcttcccagtttggcagatgtgagcaaactatgtataggaattccaaaggaatatcttgtaccggaattatcaagtgaagtacagtctctttggtccaaagctgctgacctctttgagtctgagggggccaaagtaattgaagtatcccttcctcacaccagttattcaattgtctgctaccatgtattgtgcacatcagaagtggcatcgaatatggcaagatttgatgggctacaatatggtcacagatgtgacattgatgtgtccactgaagccatgtatgctgcaaccagacgagaagggtttaatgatgtggtgagaggaagaattctctcaggaaactttttcttattaaaagaaaactatgaaaattattttgtcaaagcacagaaagtgagacgcctcattgctaatgactttgtaaatgcttttaactctggagtagatgtcttgctaactcccaccaccttgagtgaggcagtaccatacttggagttcatcaaagaggacaacagaacccgaagtgcccaggatgatatttttacacaagctgtaaatatggcaggattgccagcagtgagtatccctgttgcactctcaaaccaagggttgccaataggactgcagtttattggacgtgcgttttgtgaccagcagcttcttacagtagccaaatggtttgaaaaacaagtacagtttcctgttattcaacttcaagaactcatggatgattgttcagcagtccttgaaaatgaaaagttagcctctgtctctctaaaacagtaaacatatcttacaaattaaaatgacttttaggctgggtgcagtggctcacacctgtaatcccagcactttgggaggccaaggcgagcggatcatgaggtcagaagatctagaacagcctggtcaacatggtgaaaccccgtctctactaaaaatacaaaaattagccaggcttagtggcgggcatctgtagtcccagctactcaggaggctgaggcaggagaatcacttgaaccctggaggtggaggttgcagtgagccgagatcatgccactgcactgcactccagcctgggtgacaaagcaagactgtgtctcaaaataaataaataaaataaaataaaatgacgtacagagattctatattctagagagtcaaatggtcttgctcaattcttgtaattaggttcttgttaatacagtcattccatggaattactttttaaaattcctgtgacaattaataataaataacgtgtcagcatttagtaagcatccactaagtgtacaatacttctacaataacacaagatacctgttcctcaaagacaatgcattctgccataatgttcattaaagagtttacagtaaaaataagattagggataaacttctcaaaaattgtacatctgtgtaactaaagcactaacaaaaacatgaatagtccttctagaggtaacttggatagcctaggcaggcaacttatcatgtggtgaaggccgcctcaggggttgttaaaaatgcacagaaacaattgagtgcgattattggcttctgagcgctgagcagagcaggtggaagaggaactttgagcacaggaggaaatgcaaccagtcagggcccagaatcatgcaaatctcaggggtatgcctctctggggaggagctccacttgcagggactccttttatttccctaagaaagagctgaaatgactgagaactttcctttcctccttagagttacaattttacttctgctattccggagcccatgcctagaagccagaacaactccatgttacactgagttcatgctcctatttactgatcacaaatgagctcattaatgtcatcgaaacatttattgtaacctaacagaccatcacagattggaaacttggtagatagcagagcatggtattagtgaaaaaggttcaaaatacacaagtaacatacactctgaaaaacatgcagataatttgctgatgaagcagaagaggggatgcgcatggcaagaacttgccttaccccagattctctatatctcatggtttccttttcctcttgactgtctttacgagtgttttttatttgggaccctcgagcccagagatattaatggatatctgtattcaatatttgacaaaatctaatggaaaccatccatttactcatgataaggcttcatcactggatttctgtgtcttcactagaacaccattgtcatctcatattgatcaggtattttaatctagcacttacatattgttgataaatgaaagctgaattgttacttaataaattcactttgtttagtaaaaaaaaattgttttctaaatatgacgttcatgaagagaaaataatgagtcagaatcatctgcagaaccactggaatgtttcatcgtcacctgttagttttcataaacagttttctgtcctctctgagatcctcccgctcccaaatactcaacctgattaacttcacataaaagtcttatgtgccaggcttagtaatattcctatagattttgactctgaatccctgaaagaggaagaaatccatgagagaaaattgcattactttatagcaagaggaaaccgttttaagttttttaattgctcagacaccacaacatcctagatggaggaaaccattttagttgaaggagcaaatatgatgtcaaaagcaagtaaataaacaaaccgttgccccaatctgtttttatgtaatgaatttaaaaaaaaagagagagagagagagatgggctctccctgtgttgcccaggctagtctcaaactcctgggctcaagtgatctgcctccctcagcctcccaaagtgctgagattaaagacgtgagccaccacacctggccgaaataataatattcaatattatatattcaatgatattattcagtattcaatattatttcaaataatattaaatctcttgttcctgtatctctacatgagctgcactaataatttgaatctggaaattaaaaagtgaaacatttaccgttctcatatactgatacccaactaccatgaaatgatacctaatttgtttttcttttctcttcatttttactcttaatctagtaggtctcattttgccaagtcactgtctgggaatttaagtggcaaatactttctttgtctcagctaattaaactctaaaattattagcaacaaaaaa

SEQ ID NO: 440140 - DNA, 2097 bp, Homo sapiens
  misc_feature (4)..(4): n is a, c, g, or t
ggcncgagtgacaattaaagatggctgcgcccatgtaacatcactagcgaccggtgacctctttttcccccttgcctggctcctgtggtggcaggctgggcacgaggaccatgctgggccggagcctccgagaagtttctgcggcactgaaacaaggccaaattacaccaacagagctctgtcaaaaatgtctctctcttatcaagaagaccaagtttctaaatgcctacattactgtgtcagaagaggtggccttaaaacaagctgaagaatcagaaaagagatataagaatggacagtcacttggggatttagatggaattcctattgcagtaaaagacaatttcagcacttctggcattgagacaacatgtgcatcaaatatgctgaaaggttatataccaccttataatgctacagtagttcagaagttgttggatcagggagctctactaatgggaaaaacaaatttagatgagtttgctatgggatctgggagcacagatggtgtatttggaccagttaaaaacccctggagttattcaaaacaatatagagaaaagaggaagcagaatccccacagcgagaatgaagattcagactggctgataactggaggaagctcaggtgggagtgcagctgctgtatcggcgttcacatgctacgcggctttaggatcagatacaggaggatcgaccagaaatcctgctgcccactgtgggcttgttggtttcaaaccaagctatggcttagtttcccgtcatggtctcattcccctggtgaattcgatggatgtgccaggaatcttaaccagatgtgtggatgatgcagcaattgtgttgggtgcactggccggacctgaccccagggactctaccacagtacatgaacctattaataaaccattcatgcttcccagtttggcagatgtgagcaaactatgtataggaattccaaaggaatatcttgtaccggaattatcaagtgaagtacagtctctttggtccaaagctgctgacctctttgagtctgagggggccaaagtaattgaagtatcccttcctcacaccagttattcaattgtctgctaccatgtattgtgcacatcagaagtggcatcgaatatggcaagatttgatgggctacaatatggtcacagatgtgacattgatgtgtccactgaagccatgtatgctgcaaccagacgagaagggtttaatgatgtggtgagaggaagaattctctcaggaaactttttcttattaaaagaaaactatgaaaattattttgtcaaagcacagaaagtgagacgcctcattgctaatgactttgtaaatgcttttaactctggagtagatgtcttgctaactcccaccaccttgagtgaggcagtaccatacttggagttcatcaaagaggacaacagaacccgaagtgcccaggatgatatttttacacaagctgtaaatatggcaggattgccagcagtgagtatccctgttgcactctcaaaccaagggttgccaataggactgcagtttattggacgtgcgttttgtgaccagcagcttcttacagtagccaaatggtttgaaaaacaagtacagtttcctgttattcaacttcaagaactcatggatgattgttcagcagtccttgaaaatgaaaagttagcctctgtctctctaaaacagtaaacatatcttacaaattaaaatgacttttaggctgggtgcagtggctcacacctgtaatcccagcactttgggaggccaaggcgagcggatcatgaggtcagaagatctagaacagcctggtcaacatggtgaaaccccgtctctactaaaaatacaaaaattagccaggcttagtggcgggcatctgtagtcccagctactcaggaggctgaggcaggagaatcacttgaaccctggaggtggaggttgcagtgagccgagatcatgccactgcactgcactccagcctgggtgacaaagcaagactgtgtctcaaaataaataaataaaataaaataatcccggatgcggcaagaaacccattgtggcgactcgcgacgttgattgatagtggatattg

SEQ ID NO: 440141 - DNA, 3752 bp, Homo sapiens
ttgtcatccacgctggaatgcaatggtgcgatctcggctcgctgcagcctccgcctcccagcttcaagcgattctcctgactcagcctcccaagtagctgggactacaggcatgccccaccattcccaatctgggagcacagatggtgtatttggaccagttaaaaacccctggagttattcaaaacaatatagagaaaagaggaagcagaatccccacagcgagaatgaagattcagactggctgataactggaggaagctcaggtgggagtgcagctgctgtatcggcgttcacatgctacgcggctttaggatcagatacaggaggatcgaccagaaatcctgctgcccactgtgggcttgttggtttcaaaccaagctatggcttagtttcccgtcatggtctcattcccctggtgaattcgatggatgtgccaggaatcttaaccagatgtgtggatgatgcagcaattgtgttgggtgcactggccggacctgaccccagggactctaccacagtacatgaacctattaataaaccattcatgcttcccagtttggcagatgtgagcaaactatgtataggaattccaaaggaatatcttgtaccggaattatcaagtgaagtacagtctctttggtccaaagctgctgacctctttgagtctgagggggccaaagtaattgaagtatcccttcctcacaccagttattcaattgtctgctaccatgtattgtgcacatcagaagtggcatcgaatatggcaagatttgatgggctacaatatggtcacagatgtgacattgatgtgtccactgaagccatgtatgctgcaaccagacgagaagggtttaatgatgtggtgagaggaagaattctctcaggaaactttttcttattaaaagaaaactatgaaaattattttgtcaaagcacagaaagtgagacgcctcattgctaatgactttgtaaatgcttttaactctggagtagatgtcttgctaactcccaccaccttgagtgaggcagtaccatacttggagttcatcaaagaggacaacagaacccgaagtgcccaggatgatatttttacacaagctgtaaatatggcaggattgccagcagtgagtatccctgttgcactctcaaaccaagggttgccaataggactgcagtttattggacgtgcgttttgtgaccagcagcttcttacagtagccaaatggtttgaaaaacaagtacagtttcctgttattcaacttcaagaactcatggatgattgttcagcagtccttgaaaatgaaaagttagcctctgtctctctaaaacagtaaacatatcttacaaattaaaatgacttttaggctgggtgcagtggctcacacctgtaatcccagcactttgggaggccaaggcgagcggatcatgaggtcagaagatctagaacagcctggtcaacatggtgaaaccccgtctctactaaaaatacaaaaattagccaggcttagtggcgggcatctgtagtcccagctactcaggaggctgaggcaggagaatcacttgaaccctggaggtggaggttgcagtgagccgagatcatgccactgcactgcactccagcctgggtgacaaagcaagactgtgtctcaaaataaataaataaaataaaataaaatgacgtacagagattctatattctagagagtcaaatggtcttgctcaattcttgtaattaggttcttgttaatacagtcattccatggaattactttttaaaattcctgtgacaattaataataaataacgtgtcagcatttagtaagcatccactaagtgtacaatacttctacaataacacaagatacctgttcctcaaagacaatgcattctgccataatgttcattaaagagtttacagtaaaaataagattagggataaacttctcaaaaattgtacatctgtgtaactaaagcactaacaaaaacatgaatagtccttctagaggtaacttggatagcctaggcaggcaacttatcatgtggtgaaggccgcctcaggggttgttaaaaatgcacagaaacaattgagtgcgattattggcttctgagcgctgagcagagcaggtggaagaggaactttgagcacaggaggaaatgcaaccagtcagggcccagaatcatgcaaatctcaggggtatgcctctctggggaggagctccacttgcagggactccttttatttccctaagaaagagctgaaatgactgagaactttcctttcctccttagagttacaattttacttctgctattccggagcccatgcctagaagccagaacaactccatgttacactgagttcatgctcctatttactgatcacaaatgagctcattaatgtcatcgaaacatttattgtaacctaacagaccatcacagattggaaacttggtagatagcagagcatggtattagtgaaaaaggttcaaaatacacaagtaacatacactctgaaaaacatgcagataatttgctgatgaagcagaagaggggatgcgcatggcaagaacttgccttaccccagattctctatatctcatggtttccttttcctcttgactgtctttacgagtgttttttatttgggaccctcgagcccagagatattaatggatatctgtattcaatatttgacaaaatctaatggaaaccatccatttactcatgataaggcttcatcactggatttctgtgtcttcactagaacaccattgtcatctcatattgatcaggtattttaatctagcacttacatattgttgataaatgaaagctgaattgttacttaataaattcactttgtttagtaaaaaaaaattgttttctaaatatgacgttcatgaagagaaaataatgagtcagaatcatctgcagaaccactggaatgtttcatcgtcacctgttagttttcataaacagttttctgtcctctctgagatcctcccgctcccaaatactcaacctgattaacttcacataaaagtcttatgtgccaggcttagtaatattcctatagattttgactctgaatccctgaaagaggaagaaatccatgagagaaaattgcattactttatagcaagaggaaaccgttttaagttttttaattgctcagacaccacaacatcctagatggaggaaaccattttagttgaaggagcaaatatgatgtcaaaagcaagtaaataaacaaaccgttgccccaatctgtttttatgtaatgaatttaaaaaaaaagagagagagagagagatgggctctccctgtgttgcccaggctagtctcaaactcctgggctcaagtgatctgcctccctcagcctcccaaagtgctgagattaaagacgtgagccaccacacctggccgaaataataatattcaatattatatattcaatgatattattcagtattcaatattatttcaaataatattaaatctcttgttcctgtatctctacatgagctgcactaataatttgaatctggaaattaaaaagtgaaacatttaccgttctcatatactgatacccaactaccatgaaatgatacctaatttgtttttcttttctcttcatttttactcttaatctagtaggtctcattttgccaagtcactgtctgggaatttaagtggcaaatactttctttgtctcagctaattaaactctaaaattattagcaacaaaaaa

SEQ ID NO: 440142 - DNA, 3349 bp, Homo sapiens
ccggcacgaggctgcggtcggtacggccagtgcacccaggactctaccacagtacatgaatggtttattaataggttcatgtactgtggtagagtccctggggtcaggtccggccagtacatgaacctattaataaaccattcatgcttcccagtttggcagatgtgagcaaactatgtataggaattccaaaggaatatcttgtaccggaattatcaagtgaagtacagtctctttggtccaaagctgctgacctctttgagtctgagggggccaaagtaattgaagtatcccttcctcacaccagttattcaattgtctgctaccatgtattgtgcacatcagaagtggcatcgaatatggcaagatttgatgggctacaatatggtcacagatgtgacattgatgtgtccactgaagccatgtatgctgcaaccagacgagaagggtttaatgatgtggtgagaggaagaattctctcaggaaactttttcttattaaaagaaaactatgaaaattattttgtcaaagcacagaaagtgagacgcctcattgctaatgactttgtaaatgcttttaactctggagtagatgtcttgctaactcccaccaccttgagtgaggcagtaccatacttggagttcatcaaagaggacaacagaacccgaagtgcccaggatgatatttttacacaagctgtaaatatggcaggattgccagcagtgagtatccctgttgcactctcaaaccaagggttgccaataggactgcagtttattggacgtgcgttttgtgaccagcagcttcttacagtagccaaatggtttgaaaaacaagtacagtttcctgttattcaacttcaagaactcatggatgattgttcagcagtccttgaaaatgaaaagttagcctctgtctctctaaaacagtaaacatatcttacaaattaaaatgacttttaggctgggtgcagtggctcacacctgtaatcccagcactttgggaggccaaggcgagcggatcatgaggtcagaagatctagaacagcctggtcaacatggtgaaaccccgtctctactaaaaatacaaaaattagccaggcttagtggcgggcatctgtagtcccagctactcaggaggctgaggcaggagaatcacttgaaccctggaggtggaggttgcagtgagccgagatcatgccactgcactgcactccagcctgggtgacaaagcaagactgtgtctcaaaataaataaataaaataaaataaaatgacgtacagagattctatattctagagagtcaaatggtcttgctcaattcttgtaattaggttcttgttaatacagtcattccatggaattactttttaaaattcctgtgacaattaataataaataacgtgtcagcatttagtaagcatccactaagtgtacaatacttctacaataacacaagatacctgttcctcaaagacaatgcattctgccataatgttcattaaagagtttacagtaaaaataagattagggataaacttctcaaaaattgtacatctgtgtaactaaagcactaacaaaaacatgaatagtccttctagaggtaacttggatagcctaggcaggcaacttatcatgtggtgaaggccgcctcaggggttgttaaaaatgcacagaaacaattgagtgcgattattggcttctgagcgctgagcagagcaggtggaagaggaactttgagcacaggaggaaatgcaaccagtcagggcccagaatcatgcaaatctcaggggtatgcctctctggggaggagctccacttgcagggactccttttatttccctaagaaagagctgaaatgactgagaactttcctttcctccttagagttacaattttacttctgctattccggagcccatgcctagaagccagaacaactccatgttacactgagttcatgctcctatttactgatcacaaatgagctcattaatgtcatcgaaacatttattgtaacctaacagaccatcacagattggaaacttggtagatagcagagcatggtattagtgaaaaaggttcaaaatacacaagtaacatacactctgaaaaacatgcagataatttgctgatgaagcagaagaggggatgcgcatggcaagaacttgccttaccccagattctctatatctcatggtttccttttcctcttgactgtctttacgagtgttttttatttgggaccctcgagcccagagatattaatggatatctgtattcaatatttgacaaaatctaatggaaaccatccatttactcatgataaggcttcatcactggatttctgtgtcttcactagaacaccattgtcatctcatattgatcaggtattttaatctagcacttacatattgttgataaatgaaagctgaattgttacttaataaattcactttgtttagtaaaaaaaaattgttttctaaatatgacgttcatgaagagaaaataatgagtcagaatcatctgcagaaccactggaatgtttcatcgtcacctgttagttttcataaacagttttctgtcctctctgagatcctcccgctcccaaatactcaacctgattaacttcacataaaagtcttatgtgccaggcttagtaatattcctatagattttgactctgaatccctgaaagaggaagaaatccatgagagaaaattgcattactttatagcaagaggaaaccgttttaagttttttaattgctcagacaccacaacatcctagatggaggaaaccattttagttgaaggagcaaatatgatgtcaaaagcaagtaaataaacaaaccgttgccccaatctgtttttatgtaatgaatttaaaaaaaaagagagagagagagagatgggctctccctgtgttgcccaggctagtctcaaactcctgggctcaagtgatctgcctccctcagcctcccaaagtgctgagattaaagacgtgagccaccacacctggccgaaataataatattcaatattatatattcaatgatattattcagtattcaatattatttcaaataatattaaatctcttgttcctgtatctctacatgagctgcactaataatttgaatctggaaattaaaaagtgaaacatttaccgttctcatatactgatacccaactaccatgaaatgatacctaatttgtttttcttttctcttcatttttactcttaatctagtaggtctcattttgccaagtcactgtctgggaatttaagtggcaaatactttctttgtctcagctaattaaactctaaaattattagcaacaaaaaa

SEQ ID NO: 440143 - DNA, 2883 bp, Homo sapiens
  misc_feature (26)..(26): n is a, c, g, or t
  misc_feature (39)..(39): n is a, c, g, or t
cctagtcggcactgactctcttaatntccaccgctacanaaactatgaaaattattttgtcaaagcacagaaagtgagacgcctcattgctaatgactttgtaaatgcttttaactctggagtagatgtcttgctaactcccaccaccttgagtgaggcagtaccatacttggagttcatcaaagaggacaacagaacccgaagtgcccaggatgatatttttacacaagctgtaaatatggcaggattgccagcagtgagtatccctgttgcactctcaaaccaagggttgccaataggactgcagtttattggacgtgcgttttgtgaccagcagcttcttacagtagccaaatggtttgaaaaacaagtacagtttcctgttattcaacttcaagaactcatggatgattgttcagcagtccttgaaaatgaaaagttagcctctgtctctctaaaacagtaaacatatcttacaaattaaaatgacttttaggctgggtgcagtggctcacacctgtaatcccagcactttgggaggccaaggcgagcggatcatgaggtcagaagatctagaacagcctggtcaacatggtgaaaccccgtctctactaaaaatacaaaaattagccaggcttagtggcgggcatctgtagtcccagctactcaggaggctgaggcaggagaatcacttgaaccctggaggtggaggttgcagtgagccgagatcatgccactgcactgcactccagcctgggtgacaaagcaagactgtgtctcaaaataaataaataaaataaaataaaatgacgtacagagattctatattctagagagtcaaatggtcttgctcaattcttgtaattaggttcttgttaatacagtcattccatggaattactttttaaaattcctgtgacaattaataataaataacgtgtcagcatttagtaagcatccactaagtgtacaatacttctacaataacacaagatacctgttcctcaaagacaatgcattctgccataatgttcattaaagagtttacagtaaaaataagattagggataaacttctcaaaaattgtacatctgtgtaactaaagcactaacaaaaacatgaatagtccttctagaggtaacttggatagcctaggcaggcaacttatcatgtggtgaaggccgcctcaggggttgttaaaaatgcacagaaacaattgagtgcgattattggcttctgagcgctgagcagagcaggtggaagaggaactttgagcacaggaggaaatgcaaccagtcagggcccagaatcatgcaaatctcaggggtatgcctctctggggaggagctccacttgcagggactccttttatttccctaagaaagagctgaaatgactgagaactttcctttcctccttagagttacaattttacttctgctattccggagcccatgcctagaagccagaacaactccatgttacactgagttcatgctcctatttactgatcacaaatgagctcattaatgtcatcgaaacatttattgtaacctaacagaccatcacagattggaaacttggtagatagcagagcatggtattagtgaaaaaggttcaaaatacacaagtaacatacactctgaaaaacatgcagataatttgctgatgaagcagaagaggggatgcgcatggcaagaacttgccttaccccagattctctatatctcatggtttccttttcctcttgactgtctttacgagtgttttttatttgggaccctcgagcccagagatattaatggatatctgtattcaatatttgacaaaatctaatggaaaccatccatttactcatgataaggcttcatcactggatttctgtgtcttcactagaacaccattgtcatctcatattgatcaggtattttaatctagcacttacatattgttgataaatgaaagctgaattgttacttaataaattcactttgtttagtaaaaaaaaattgttttctaaatatgacgttcatgaagagaaaataatgagtcagaatcatctgcagaaccactggaatgtttcatcgtcacctgttagttttcataaacagttttctgtcctctctgagatcctcccgctcccaaatactcaacctgattaacttcacataaaagtcttatgtgccaggcttagtaatattcctatagattttgactctgaatccctgaaagaggaagaaatccatgagagaaaattgcattactttatagcaagaggaaaccgttttaagttttttaattgctcagacaccacaacatcctagatggaggaaaccattttagttgaaggagcaaatatgatgtcaaaagcaagtaaataaacaaaccgttgccccaatctgtttttatgtaatgaatttaaaaaaaaagagagagagagagagatgggctctccctgtgttgcccaggctagtctcaaactcctgggctcaagtgatctgcctccctcagcctcccaaagtgctgagattaaagacgtgagccaccacacctggccgaaataataatattcaatattatatattcaatgatattattcagtattcaatattatttcaaataatattaaatctcttgttcctgtatctctacatgagctgcactaataatttgaatctggaaattaaaaagtgaaacatttaccgttctcatatactgatacccaactaccatgaaatgatacctaatttgtttttcttttctcttcatttttactcttaatctagtaggtctcattttgccaagtcactgtctgggaatttaagtggcaaatactttctttgtctcagctaattaaactctaaaattattagcaacaaaaaa

SEQ ID NO: 440144 - DNA, 1543 bp, Homo sapiens
  misc_feature (4)..(4): n is a, c, g, or t
ggcncgagtgacaattaaagatggctgcgcccatgtaacatcactagcgaccggtgacctctttttcccccttgcctggctcctgtggtggcaggctgggcacgaggaccatgctgggccggagcctccgagaagtttctgcggcactgaaacaaggccaaattacaccaacagagctctgtcaaaaatgtctctctcttatcaagaagaccaagtttctaaatgcctacattactgtgtcagaagaggtggccttaaaacaagctgaagaatcagaaaagagatataagaatggacagtcacttggggatttagatggaattcctattgcagtaaaagacaatttcagcacttctggcattgagacaacatgtgcatcaaatatgctgaaaggttatataccaccttataatgctacagtagttcagaagttgttggatcagggagctctactaatgggaaaaacaaatttagatgagtttgctatgggatctgggagcacagatggtgtatttggaccagttaaaaacccctggagttattcaaaacaatatagagaaaagaggaagcagaatccccacagcgagaatgaagattcagactggctgataactggaggaagctcaggtgggagtgcagctgctgtatcggcgttcacatgctacgcggctttaggatcagatacaggaggatcgaccagaaatcctgctgcccactgtgggcttgttggtttcaaaccaagctatggcttagtttcccgtcatggtctcattcccctggtgaattcgatggatgtgccaggaatcttaaccagatgtgtggatgatgcagcaattgtgttgggtgcactggccggacctgaccccagggactctaccacagtacatgaacctattaataaaccattcatgcttcccagtttggcagatgtgagcaaactatgtataggaattccaaaggaatatcttgtaccggaattatcaagtgaagtacagtctctttggtccaaagctgctgacctctttgagtctgagggggccaaagtaattgaagtatcccttcctcacaccagttattcaattgtctgctaccatgtattgtgcacatcagaagtggcatcgaatatggcaagatttgatgggctacaatatggtcacagatgtgacattgatgtgtccactgaagccatgtatgctgcaaccagacgagaagggtttaatgatgtggtgagaggaagaattctctcaggaaactttttcttattaaaagagtaagacaactcatttaggaattttcttcattcttgaaacctcaagtaacatgtctcttatcaggtcttataagtcaaggtatttagtaaagaaacaaaatctttatgatttgaattagaaaagacctgtttatggcacttttgggtcctggtattcaaaaacaaaagaaatgttggtactttagctaaatgattggtacagattacaggcagtcctccatatctgtgggttttgcaaccttggattcaaccaaacacaaatcaaaaatattc

SEQ ID NO: 440145 - DNA, 531 bp, Homo sapiens
ggggctggtaattgtttgttgtgggagactgtcctgtgcattgtaagatgtttagtagcatccctggcctctacccctacatgcaagtagtaccccaccaccaaaaccacaatcccacaaccaaaaatgtctgcagacattgtcaagtgtctcctggttagggaaaaggagacaaaagtaacccccaggtaagaccactgctatagagaaatactaccttatttaaaatcttccattaaggtaatatatgtaaggccaggtgcgtacacctgtaatcccagcaccttgggaagccaaggcaggaggatcgcttgagatcaggagtttgagaccagcctgggcaacatacagagccctatgtctacaaaaagttttaaaaaaattgtggggtgtggtggtgtgcacctgtggtcctagctgtttgggaggctgaggggggaggattgcttgagtccaggaggttgagactgccgtgagccatgattgcaccactgcactccaccctaggtgacagagcaagaccctatctca

SEQ ID NO: 440146 - DNA, 323 bp, Homo sapiens
tactttatgaattctctgagatgaacatgtgttacttttgtgtaatcagaggaaaatacagtttaaaaatatacaattgaaagggtagattccaaatataattagagatatatcattcttctaaagataattccatttaaattccagggctttaggatcagatacaggaggatcgaccagaaatcctgctgcccactgtgggcttgttggtttcaaaccaagctatggcttagtttcccgtcatggtctcattcccctggtgaattcgatggatgtgccaggaatcttaaccagatgtgtggatgatgcagcaattgtgttgg

SEQ ID NO: 440147 - DNA, 3232 bp, Homo sapiens
  misc_feature (4)..(4): n is a, c, g, or t
ggcncgagtgacaattaaagatggctgcgcccatgtaacatcactagcgaccggtgacctctttttcccccttgcctggctcctgtggtggcaggctgggcacgaggaccatgctgggccggagcctccgagaagtttctgcggcactgaaacaaggccaaattacaccaacagagctctgtcaaaaatgtctctctcttatcaagaagaccaagtttctaaatgcctacattactgtgtcagaagaggtggccttaaaacaagctgaagaatcagaaaagagatataagaatggacagtcacttggggatttagatggaattcctattgcagtaaaagacaatttcagcacttctggcattgagacaacatgtgcatcaaatatgctgaaaggttatataccaccttataatgctacagtagttcagaagttgttggatcagggagctctactaatgggaaaaacaaatttagatgagtttgctatgggatctgggagcacagatggtgtatttggaccagttaaaaacccctggagttattcaaaacaatatagagaaaagaggaagcagaatccccacagcgagaatgaagattcagactggctgataactggaggaagctcaggtgggagtgcagctgctgtatcggcgttcacatgctacgcggctttaggatcagatacaggaggatcgaccagaaatcctgctgcccactgtgggcttgttggtttcaaaccaagctatggcttagtttcccgtcatggtctcattcccctggtgaattcgatggatgtgccaggaatcttaaccagatgtgtggatgatgcagcaattgtgttgggtgcactggccggacctgaccccagggactctaccacagtacatgaacctattaataaaccattcatgcttcccagtttggcagatgtgagcaaactatgtataggaattccaaaggaatatcttgtaccggaattatcaagtgaagtacagtctctttggtccaaagctgctgacctctttgagtctgagggggccaaagtaattgaagtatcccttcctcacaccagttattcaattgtctgctaccatgtattgtgcacatcagaagtggcatcgaatatggcaagatttgatgggctacaatatggtcacagatgtgacattgatgtgtccactgaagccatgtatgctgcaaccagacgagaagggtttaatgatgtggtgagaggaagaattctctcaggaaactttttcttattaaaagaaaactatgaaaattattttgtcaaagcacagaaagtgagacgcctcattgctaatgactttgtaaatgcttttaactctggagtagatgtcttgctaactcccaccaccttgagtgaggcagtaccatacttggagttcatcaaagaggacaacagaacccgaagtgcccaggatgatatttttacacaagctgtaaatatggcaggattgccagcagtgagtatccctgttgcactctcaaaccaagggttgccaataggactgcagtttattggacgtgcgttttgtgaccagcagcttcttacagtagccaaatggtttgaaaaacaagtacagtttcctgttattcaacttcaagaactcatggatgattgttcagcagtccttgaaaatgaaaagttagcctctgtctctctaaaacagtaaacatatcttacaaattaaaatgacttttaggctgggtgcagtggctcacacctgtaatcccagcactttgggaggccaaggcgagcggatcatgaggtcagaagatctagaacagcctggtcaacatggtgaaaccccgtctctactaaaaatacaaaaattagccaggcttagtggcgggcatctgtagtcccagctactcaggaggctgaggcaggagaatcacttgaaccctggaggtggaggttgcagtgagccgagatcatgccactgcactgcactccagcctgggtgacaaagcaagactgtgtctcaaaataaataaataaaataaaataaaatgacgtacagagattctatattctagagagtcaaatggtcttgctcaattcttgtaattaggttcttgttaatacagtcattccatggaattactttttaaaattcctgtgacaattaataataaataacgtgtcagcatttagtaagcatccactaagtgtacaatacttctacaataacacaagatacctgttcctcaaagacaatgcattctgccataatgttcattaaagagtttacagtaaaaataagattagggataaacttctcaaaaattgtacatctgtgtaactaaagcactaacaaaaacatgaatagtccttctagaggtaacttggatagcctaggcaggcaacttatcatgtggtgaaggccgcctcaggggttgttaaaaatgcacagaaacaattgagtgcgattattggcttctgagcgctgagcagagcaggtggaagaggaactttgagcacaggaggaaatgcaaccagtcagggcccagaatcatgcaaatctcaggggtatgcctctctggggaggagctccacttgcagggactccttttatttccctaagaaagagctgaaatgactgagaactttcctttcctccttagagttacaattttacttctgctattccggagcccatgcctagaagccagaacaactccatgttacactgagttcatgctcctatttactgatcacaaatgagctcattaatgtcatcgaaacatttattgtaacctaacagaccatcacagattggaaacttggtagatagcagagcatggtattagtgaaaaaggttcaaaatacacaagtaacatacactctgaaaaacatgcagataatttgctgatgaagcagaagaggggatgcgcatggcaagaacttgccttaccccagattctctatatctcatggtttccttttcctcttgactgtctttacgagtgttttttatttgggaccctcgagcccagagatattaatggatatctgtattcaatatttgacaaaatctaatggaaaccatccatttactcatgataaggcttcatcactggatttctgtgtcttcactagaacaccattgtcatctcatattgatcaggtattttaatctagcacttacatattgttgataaatgaaagctgaattgttacttaataaattcactttgtttagta

SEQ ID NO: 440148 - DNA, 866 bp, Homo sapiens
  misc_feature (26)..(26): n is a, c, g, or t
  misc_feature (39)..(39): n is a, c, g, or t
cctagtcggcactgactctcttaatntccaccgctacanaaactatgaaaattattttgtcaaagcacagaaagtgagacgcctcattgctaatgactttgtaaatgcttttaactctggagtagatgtcttgctaactcccaccaccttgagtgaggcagtaccatacttggagttcatcaaagaggacaacagaacccgaagtgcccaggatgatatttttacacaagctgtaaatatggcaggattgccagcagtgagtatccctgttgcactctcaaaccaagggttgccaataggactgcagtttattggacgtgcgttttgtgaccagcagcttcttacagtagccaaatggtttgaaaaacaagtacagtttcctgttattcaacttcaagaactcatggatgattgttcagcagtccttgaaaatgaaaagttagcctctgtctctctaaaacagtaaacatatcttacaaattaaaatgacttttaggctgggtgcagtggctcacacctgtaatcccagcactttgggaggccaaggcgagcggatcatgaggtcagaagatctagaacagcctggtcaacatggtgaaaccccgtctctactaaaaatacaaaaattagccaggcttagtggcgggcatctgtagtcccagctactcaggaggctgaggcaggagaatcacttgaaccctggaggtggaggttgcagtgagccgagatcatgccactgcactgcactccagcctgggtgacaaagcaagactgtgtctcaaaataaataaataaaataaaataatcccggatgcggcaagaaacccattgtggcgactcgcgacgttgattgatagtggatattg

SEQ ID NO: 440149 - DNA, 4220 bp, Homo sapiens
  misc_feature (4)..(4): n is a, c, g, or t
ggcncgagtgacaattaaagatggctgcgcccatgtaacatcactagcgaccggtgacctctttttcccccttgcctggctcctgtggtggcaggctgggcacgaggaccatgctgggccggagcctccgagaacctgactttgaaaccaaaagttggctaaggagaagaatgtcatgtcctccacctgtcctcaagctgatcagtgcatcacccttcatccactacactaagtgtagaggtttctgcggcactgaaacaaggccaaattacaccaacagagctctgtcaaaaatgtctctctcttatcaagaagaccaagtttctaaatgcctacattactgtgtcagaagaggtggccttaaaacaagctgaagaatcagaaaagagatataagaatggacagtcacttggggatttagatggaattcctattgcagtaaaagacaatttcagcacttctggcattgagacaacatgtgcatcaaatatgctgaaaggttatataccaccttataatgctacagtagttcagaagttgttggatcagggagctctactaatgggaaaaacaaatttagatgagtttgctatgggatctgggagcacagatggtgtatttggaccagttaaaaacccctggagttattcaaaacaatatagagaaaagaggaagcagaatccccacagcgagaatgaagattcagactggctgataactggaggaagctcaggtgggagtgcagctgctgtatcggcgttcacatgctacgcggctttaggatcagatacaggaggatcgaccagaaatcctgctgcccactgtgggcttgttggtttcaaaccaagctatggcttagtttcccgtcatggtctcattcccctggtgaattcgatggatgtgccaggaatcttaaccagatgtgtggatgatgcagcaattgtgttgggtgcactggccggacctgaccccagggactctaccacagtacatgaacctattaataaaccattcatgcttcccagtttggcagatgtgagcaaactatgtataggaattccaaaggaatatcttgtaccggaattatcaagtgaagtacagtctctttggtccaaagctgctgacctctttgagtctgagggggccaaagtaattgaagtatcccttcctcacaccagttattcaattgtctgctaccatgtattgtgcacatcagaagtggcatcgaatatggcaagatttgatgggctacaatatggtcacagatgtgacattgatgtgtccactgaagccatgtatgctgcaaccagacgagaagggtttaatgatgtggtgagaggaagaattctctcaggaaactttttcttattaaaagaaaactatgaaaattattttgtcaaagcacagaaagtgagacgcctcattgctaatgactttgtaaatgcttttaactctggagtagatgtcttgctaactcccaccaccttgagtgaggcagtaccatacttggagttcatcaaagaggacaacagaacccgaagtgcccaggatgatatttttacacaagctgtaaatatggcaggattgccagcagtgagtatccctgttgcactctcaaaccaagggttgccaataggactgcagtttattggacgtgcgttttgtgaccagcagcttcttacagtagccaaatggtttgaaaaacaagtacagtttcctgttattcaacttcaagaactcatggatgattgttcagcagtccttgaaaatgaaaagttagcctctgtctctctaaaacagtaaacatatcttacaaattaaaatgacttttaggctgggtgcagtggctcacacctgtaatcccagcactttgggaggccaaggcgagcggatcatgaggtcagaagatctagaacagcctggtcaacatggtgaaaccccgtctctactaaaaatacaaaaattagccaggcttagtggcgggcatctgtagtcccagctactcaggaggctgaggcaggagaatcacttgaaccctggaggtggaggttgcagtgagccgagatcatgccactgcactgcactccagcctgggtgacaaagcaagactgtgtctcaaaataaataaataaaataaaataaaatgacgtacagagattctatattctagagagtcaaatggtcttgctcaattcttgtaattaggttcttgttaatacagtcattccatggaattactttttaaaattcctgtgacaattaataataaataacgtgtcagcatttagtaagcatccactaagtgtacaatacttctacaataacacaagatacctgttcctcaaagacaatgcattctgccataatgttcattaaagagtttacagtaaaaataagattagggataaacttctcaaaaattgtacatctgtgtaactaaagcactaacaaaaacatgaatagtccttctagaggtaacttggatagcctaggcaggcaacttatcatgtggtgaaggccgcctcaggggttgttaaaaatgcacagaaacaattgagtgcgattattggcttctgagcgctgagcagagcaggtggaagaggaactttgagcacaggaggaaatgcaaccagtcagggcccagaatcatgcaaatctcaggggtatgcctctctggggaggagctccacttgcagggactccttttatttccctaagaaagagctgaaatgactgagaactttcctttcctccttagagttacaattttacttctgctattccggagcccatgcctagaagccagaacaactccatgttacactgagttcatgctcctatttactgatcacaaatgagctcattaatgtcatcgaaacatttattgtaacctaacagaccatcacagattggaaacttggtagatagcagagcatggtattagtgaaaaaggttcaaaatacacaagtaacatacactctgaaaaacatgcagataatttgctgatgaagcagaagaggggatgcgcatggcaagaacttgccttaccccagattctctatatctcatggtttccttttcctcttgactgtctttacgagtgttttttatttgggaccctcgagcccagagatattaatggatatctgtattcaatatttgacaaaatctaatggaaaccatccatttactcatgataaggcttcatcactggatttctgtgtcttcactagaacaccattgtcatctcatattgatcaggtattttaatctagcacttacatattgttgataaatgaaagctgaattgttacttaataaattcactttgtttagtaaaaaaaaattgttttctaaatatgacgttcatgaagagaaaataatgagtcagaatcatctgcagaaccactggaatgtttcatcgtcacctgttagttttcataaacagttttctgtcctctctgagatcctcccgctcccaaatactcaacctgattaacttcacataaaagtcttatgtgccaggcttagtaatattcctatagattttgactctgaatccctgaaagaggaagaaatccatgagagaaaattgcattactttatagcaagaggaaaccgttttaagttttttaattgctcagacaccacaacatcctagatggaggaaaccattttagttgaaggagcaaatatgatgtcaaaagcaagtaaataaacaaaccgttgccccaatctgtttttatgtaatgaatttaaaaaaaaagagagagagagagagatgggctctccctgtgttgcccaggctagtctcaaactcctgggctcaagtgatctgcctccctcagcctcccaaagtgctgagattaaagacgtgagccaccacacctggccgaaataataatattcaatattatatattcaatgatattattcagtattcaatattatttcaaataatattaaatctcttgttcctgtatctctacatgagctgcactaataatttgaatctggaaattaaaaagtgaaacatttaccgttctcatatactgatacccaactaccatgaaatgatacctaatttgtttttcttttctcttcatttttactcttaatctagtaggtctcattttgccaagtcactgtctgggaatttaagtggcaaatactttctttgtctcagctaattaaactctaaaattattagcaacaaaaaa

SEQ ID NO: 440150 - DNA, 3554 bp, Homo sapiens
accctcccgcaccaacctacaggactagcttcgtacgcccatctgtttaatacggcgcgagggatggaggtgcagactgcatgtatcggtcgtacacatgactacgcggctttaggatcagatacaggaggatcgaccagaaatcctgctgcccactgtgggcttgttggtttcaaaccaagctatggcttagtttcccgtcatggtctcattcccctggtgaattcgatggatgtgccaggaatcttaaccagatgtgtggatgatgcagcaattgtgttgggtgcactggccggacctgaccccagggactctaccacagtacatgaacctattaataaaccattcatgcttcccagtttggcagatgtgagcaaactatgtataggaattccaaaggaatatcttgtaccggaattatcaagtgaagtacagtctctttggtccaaagctgctgacctctttgagtctgagggggccaaagtaattgaagtatcccttcctcacaccagttattcaattgtctgctaccatgtattgtgcacatcagaagtggcatcgaatatggcaagatttgatgggctacaatatggtcacagatgtgacattgatgtgtccactgaagccatgtatgctgcaaccagacgagaagggtttaatgatgtggtgagaggaagaattctctcaggaaactttttcttattaaaagaaaactatgaaaattattttgtcaaagcacagaaagtgagacgcctcattgctaatgactttgtaaatgcttttaactctggagtagatgtcttgctaactcccaccaccttgagtgaggcagtaccatacttggagttcatcaaagaggacaacagaacccgaagtgcccaggatgatatttttacacaagctgtaaatatggcaggattgccagcagtgagtatccctgttgcactctcaaaccaagggttgccaataggactgcagtttattggacgtgcgttttgtgaccagcagcttcttacagtagccaaatggtttgaaaaacaagtacagtttcctgttattcaacttcaagaactcatggatgattgttcagcagtccttgaaaatgaaaagttagcctctgtctctctaaaacagtaaacatatcttacaaattaaaatgacttttaggctgggtgcagtggctcacacctgtaatcccagcactttgggaggccaaggcgagcggatcatgaggtcagaagatctagaacagcctggtcaacatggtgaaaccccgtctctactaaaaatacaaaaattagccaggcttagtggcgggcatctgtagtcccagctactcaggaggctgaggcaggagaatcacttgaaccctggaggtggaggttgcagtgagccgagatcatgccactgcactgcactccagcctgggtgacaaagcaagactgtgtctcaaaataaataaataaaataaaataaaatgacgtacagagattctatattctagagagtcaaatggtcttgctcaattcttgtaattaggttcttgttaatacagtcattccatggaattactttttaaaattcctgtgacaattaataataaataacgtgtcagcatttagtaagcatccactaagtgtacaatacttctacaataacacaagatacctgttcctcaaagacaatgcattctgccataatgttcattaaagagtttacagtaaaaataagattagggataaacttctcaaaaattgtacatctgtgtaactaaagcactaacaaaaacatgaatagtccttctagaggtaacttggatagcctaggcaggcaacttatcatgtggtgaaggccgcctcaggggttgttaaaaatgcacagaaacaattgagtgcgattattggcttctgagcgctgagcagagcaggtggaagaggaactttgagcacaggaggaaatgcaaccagtcagggcccagaatcatgcaaatctcaggggtatgcctctctggggaggagctccacttgcagggactccttttatttccctaagaaagagctgaaatgactgagaactttcctttcctccttagagttacaattttacttctgctattccggagcccatgcctagaagccagaacaactccatgttacactgagttcatgctcctatttactgatcacaaatgagctcattaatgtcatcgaaacatttattgtaacctaacagaccatcacagattggaaacttggtagatagcagagcatggtattagtgaaaaaggttcaaaatacacaagtaacatacactctgaaaaacatgcagataatttgctgatgaagcagaagaggggatgcgcatggcaagaacttgccttaccccagattctctatatctcatggtttccttttcctcttgactgtctttacgagtgttttttatttgggaccctcgagcccagagatattaatggatatctgtattcaatatttgacaaaatctaatggaaaccatccatttactcatgataaggcttcatcactggatttctgtgtcttcactagaacaccattgtcatctcatattgatcaggtattttaatctagcacttacatattgttgataaatgaaagctgaattgttacttaataaattcactttgtttagtaaaaaaaaattgttttctaaatatgacgttcatgaagagaaaataatgagtcagaatcatctgcagaaccactggaatgtttcatcgtcacctgttagttttcataaacagttttctgtcctctctgagatcctcccgctcccaaatactcaacctgattaacttcacataaaagtcttatgtgccaggcttagtaatattcctatagattttgactctgaatccctgaaagaggaagaaatccatgagagaaaattgcattactttatagcaagaggaaaccgttttaagttttttaattgctcagacaccacaacatcctagatggaggaaaccattttagttgaaggagcaaatatgatgtcaaaagcaagtaaataaacaaaccgttgccccaatctgtttttatgtaatgaatttaaaaaaaaagagagagagagagagatgggctctccctgtgttgcccaggctagtctcaaactcctgggctcaagtgatctgcctccctcagcctcccaaagtgctgagattaaagacgtgagccaccacacctggccgaaataataatattcaatattatatattcaatgatattattcagtattcaatattatttcaaataatattaaatctcttgttcctgtatctctacatgagctgcactaataatttgaatctggaaattaaaaagtgaaacatttaccgttctcatatactgatacccaactaccatgaaatgatacctaatttgtttttcttttctcttcatttttactcttaatctagtaggtctcattttgccaagtcactgtctgggaatttaagtggcaaatactttctttgtctcagctaattaaactctaaaattattagcaacaaaaaa

SEQ ID NO: 440151 - DNA, 3668 bp, Homo sapiens
gtgggtgcctgtagtcccagctactcggaaggctaaggcaggagaatggcgtgaacccaggaggcggagcctgcagtgagctgagattgcgccactgcactccagcctgggcgacagagtgagactccgtctcaaaaaaaaaaaaaagaaaatcatctaacagggtacctgatacatgagcatttaacatatatgctgatatatgctgatatgctgttaggttcctgatacataatgagcatttaacaaatattttccccaaccagatctccaatctttaatgttgttatatccagatcataatatctagtactgtgctttgtcataccataaacactctgaaatggatttagtctttctagctacctaccagcaattttatcctattttctaatgtattaccaaaggtcctgaagtacagatttttataaaatcatctatacagatgaagtacaaatttttataaaataatctatacagttccaattttgtatcttgactttttgctataaggaatatcttgtaccggaattatcaagtgaagtacagtctctttggtccaaagctgctgacctctttgagtctgagggggccaaagtaattgaagtatcccttcctcacaccagttattcaattgtctgctaccatgtattgtgcacatcagaagtggcatcgaatatggcaagatttgatgggctacaatatggtcacagatgtgacattgatgtgtccactgaagccatgtatgctgcaaccagacgagaagggtttaatgatgtggtgagaggaagaattctctcaggaaactttttcttattaaaagaaaactatgaaaattattttgtcaaagcacagaaagtgagacgcctcattgctaatgactttgtaaatgcttttaactctggagtagatgtcttgctaactcccaccaccttgagtgaggcagtaccatacttggagttcatcaaagaggacaacagaacccgaagtgcccaggatgatatttttacacaagctgtaaatatggcaggattgccagcagtgagtatccctgttgcactctcaaaccaagggttgccaataggactgcagtttattggacgtgcgttttgtgaccagcagcttcttacagtagccaaatggtttgaaaaacaagtacagtttcctgttattcaacttcaagaactcatggatgattgttcagcagtccttgaaaatgaaaagttagcctctgtctctctaaaacagtaaacatatcttacaaattaaaatgacttttaggctgggtgcagtggctcacacctgtaatcccagcactttgggaggccaaggcgagcggatcatgaggtcagaagatctagaacagcctggtcaacatggtgaaaccccgtctctactaaaaatacaaaaattagccaggcttagtggcgggcatctgtagtcccagctactcaggaggctgaggcaggagaatcacttgaaccctggaggtggaggttgcagtgagccgagatcatgccactgcactgcactccagcctgggtgacaaagcaagactgtgtctcaaaataaataaataaaataaaataaaatgacgtacagagattctatattctagagagtcaaatggtcttgctcaattcttgtaattaggttcttgttaatacagtcattccatggaattactttttaaaattcctgtgacaattaataataaataacgtgtcagcatttagtaagcatccactaagtgtacaatacttctacaataacacaagatacctgttcctcaaagacaatgcattctgccataatgttcattaaagagtttacagtaaaaataagattagggataaacttctcaaaaattgtacatctgtgtaactaaagcactaacaaaaacatgaatagtccttctagaggtaacttggatagcctaggcaggcaacttatcatgtggtgaaggccgcctcaggggttgttaaaaatgcacagaaacaattgagtgcgattattggcttctgagcgctgagcagagcaggtggaagaggaactttgagcacaggaggaaatgcaaccagtcagggcccagaatcatgcaaatctcaggggtatgcctctctggggaggagctccacttgcagggactccttttatttccctaagaaagagctgaaatgactgagaactttcctttcctccttagagttacaattttacttctgctattccggagcccatgcctagaagccagaacaactccatgttacactgagttcatgctcctatttactgatcacaaatgagctcattaatgtcatcgaaacatttattgtaacctaacagaccatcacagattggaaacttggtagatagcagagcatggtattagtgaaaaaggttcaaaatacacaagtaacatacactctgaaaaacatgcagataatttgctgatgaagcagaagaggggatgcgcatggcaagaacttgccttaccccagattctctatatctcatggtttccttttcctcttgactgtctttacgagtgttttttatttgggaccctcgagcccagagatattaatggatatctgtattcaatatttgacaaaatctaatggaaaccatccatttactcatgataaggcttcatcactggatttctgtgtcttcactagaacaccattgtcatctcatattgatcaggtattttaatctagcacttacatattgttgataaatgaaagctgaattgttacttaataaattcactttgtttagtaaaaaaaaattgttttctaaatatgacgttcatgaagagaaaataatgagtcagaatcatctgcagaaccactggaatgtttcatcgtcacctgttagttttcataaacagttttctgtcctctctgagatcctcccgctcccaaatactcaacctgattaacttcacataaaagtcttatgtgccaggcttagtaatattcctatagattttgactctgaatccctgaaagaggaagaaatccatgagagaaaattgcattactttatagcaagaggaaaccgttttaagttttttaattgctcagacaccacaacatcctagatggaggaaaccattttagttgaaggagcaaatatgatgtcaaaagcaagtaaataaacaaaccgttgccccaatctgtttttatgtaatgaatttaaaaaaaaagagagagagagagagatgggctctccctgtgttgcccaggctagtctcaaactcctgggctcaagtgatctgcctccctcagcctcccaaagtgctgagattaaagacgtgagccaccacacctggccgaaataataatattcaatattatatattcaatgatattattcagtattcaatattatttcaaataatattaaatctcttgttcctgtatctctacatgagctgcactaataatttgaatctggaaattaaaaagtgaaacatttaccgttctcatatactgatacccaactaccatgaaatgatacctaatttgtttttcttttctcttcatttttactcttaatctagtaggtctcattttgccaagtcactgtctgggaatttaagtggcaaatactttctttgtctcagctaattaaactctaaaattattagcaacaaaaaa

SEQ ID NO: 440152 - DNA, 1743 bp, Homo sapiens
  misc_feature (4)..(4): n is a, c, g, or t
ggcncgagtgacaattaaagatggctgcgcccatgtaacatcactagcgaccggtgacctctttttcccccttgcctggctcctgtggtggcaggctgggcacgaggaccatgctgggccggagcctccgagaagtttctgcggcactgaaacaaggccaaattacaccaacagagctctgtcaaaaatgtctctctcttatcaagaagaccaagtttctaaatgcctacattactgtgtcagaagaggtggccttaaaacaagctgaagaatcagaaaagagatataagaatggacagtcacttggggatttagatggaattcctattgcagtaaaagacaatttcagcacttctggcattgagacaacatgtgcatcaaatatgctgaaaggttatataccaccttataatgctacagtagttcagaagttgttggatcagggagctctactaatgggaaaaacaaatttagatgagtttgctatgggatctgggagcacagatggtgtatttggaccagttaaaaacccctggagttattcaaaacaatatagagaaaagaggaagcagaatccccacagcgagaatgaagattcagactggctgataactggaggaagctcaggtgggagtgcagctgctgtatcggcgttcacatgctacgcggctttaggatcagatacaggaggatcgaccagaaatcctgctgcccactgtgggcttgttggtttcaaaccaagctatggcttagtttcccgtcatggtctcattcccctggtgaattcgatggatgtgccaggaatcttaaccagatgtgtggatgatgcagcaattgtgttgggtgcactggccggacctgaccccagggactctaccacagtacatgaacctattaataaaccattcatgcttcccagtttggcagatgtgagcaaactatgtataggaattccaaaggaatatcttgtaccggaattatcaagtgaagtacagtctctttggtccaaagctgctgacctctttgagtctgagggggccaaagtaattgaagtatcccttcctcacaccagttattcaattgtctgctaccatgtattgtgcacatcagaagtggcatcgaatatggcaagatttgatgggctacaatatggtaagatggctgggttattttatttttaaggtagttgtcgcaaacatttgaaaagttcacttattagtgacaaaaaagttaatgcttgagataatgttagtgattcagaaaagttcatcagtgaatcattttacctttgtcattttagacttgtacttacactatttgtcataaatatttgtgtatgtttggtttgcttctcaggactgtgaataactcgaagggatagtatcttgttgtcatatgctcagtcccgctaatgtagagctcaataaatgtttgaatgaatgaatgagggagtgaacaattggagtttctttcttggttcttttcttttcttctctctccatgaccagtccatcagtcaaaaggcagatggggaaaagaaaccattaagggcaactccctaaactttagtattggtgacaaaaatgtgaatctaaataagccaggcatggtggcgcatacctgtaatctaagctactcaggaggccgaggcaggagaatcacttgacaagggaggcagaacttgcagtgagccgagattacaccactgcactccagcctaggtgacagagtgagactccatct

SEQ ID NO: 440153 - DNA, 741 bp, Homo sapiens
agtaacacacatttatgactttttctccaggagttagctgtgccagtggttcatgacgggggcgctcttttggcctttgtctgtggtgtcgtgtacacgctcctacagtccatcatctcttacaaatcatgtccccagtggaacagtctctcgacatgccacatacggatggtcatctctgccgtttcttgcgcagctgtcatccccagtatcctttttcacatttgtgccttgttaaaggaataaaacattcagtgacactgttaaagaagggtaatgaagactttatagggaccgctgcaatgagttctgacagcagggcggagagattgggctcaactctgaatacagcattggcaagtgcgaatctatagccaaggagtaggatgaggtcagtgaatggaaaagtactaaaaggaaacctcaaggatgagggggaattctggccaaaccaacctaacaggattcttattgagtactggccatgtgatcagacatcacctgggaagggtggaggaggaggaggaacccaatcagatattgagtgtgatcagatatgagggtggggggtccttgctaaactgacttagccagggttctttgctaaaactggatcttacaaggaagtgcacagatggacctaggagaagtttcaggggcttgactaaagttcagccaagcaaaggatctttgtcaccgtgtcttagcaaagcttgacacttcccttccccacaaccaaaa

SEQ ID NO: 440154 - DNA, 476 bp, Homo sapiens
tttgcaaggtgaggtgagaacattttaatcctgcacacatttttttttgtttaggtaatacaggagttgatggcaacgatggttactcattatgaaccacactgaaacgaccttcaattcaatttccatctgctaataaatatagtcaagtgctgcataatgttttggtcaacatcccctaagattataaaaccatatttgactgcaccttttctacatttagatacacaaataccactgtgttacaactgcctacagtattcagtacagtgacatgctgtgcaggtttgtagcctagaagcaataggtttgtgtaagtacacttgttatgaaatccacaatgtttgtacaataaaaccgcctaatgacgcatttctcagaacatatccctgttgttaatcaatgcatgactgcataagaatatctgacttaaaaaacacatgaactaatggccaagtggtgaaaggctgcatatg

SEQ ID NO: 440155 - DNA, 336 bp, Homo sapiens
  misc_feature (201)..(201): n is a, c, g, or t
  misc_feature (215)..(215): n is a, c, g, or t
  misc_feature (222)..(222): n is a, c, g, or t
tcccccatacgagatcccccatacagagtacgtgccttaatctttatctttgtaatgccacaatgaacagagtgcctcctggtacactgtaggagcttaagaaatactcactgaatgcatgaatgaatgaatgaacaaatgaaggaatgactaaggatgtttgtagtgctataatatagaatgggatttactcgtatgggngatctcggagatcncccatanagagtactcccagctacactacctcaatcaccaccaccgagaccccatcacacagtactcccagcttcacttcttcgattaccaccaccgagacccccttaagcagtactccca

SEQ ID NO: 440156 - DNA, 3038 bp, Homo sapiens
gggaaggccagagcgggcgtccccgccagtgaccccacgccgcccgtccgcgcccaacccggcctccgccgagtgtccaaaccaaaagcgaaaggaacccgaccccgcgtcccctccggcggctccgtagtcgcgtccgcttggagctcgccgggcgcctccgaccctgccgggccgctttgtgacttcactcgtttcgcaacaagcccgggcagcccgcgccccacccactctggcccggcagcctcgccgcccgcagcctcgctccgctcctcgcgcttcccctccctccggggctgggcctgccccggccgtcgcggagcctcccctcccaccgtccgtgagtgtacgcgcccggccgccgcctccaggcagcccggagcaacccggcgcccggccccgctgggcgcagcactccgtcggcggcggcggcggcgcgatgctgtgcttcctgaggggaatggctttcgtccccttcctcttggtgacctggtcgtcagccgccttcattatctcctacgtggtcgccgtgctctccgggcacgtcaaccccttcctcccgtatatcagtgatacgggaacaacacctccagagagtggtatttttggatttatgataaacttctctgcatttcttggtgcagccacgatgtatacaagatacaaaatagtacagaagcaaaatcaaacctgctatttcagcactcctgtttttaacttggtgtctttagtgcttggattggtgggatgtttcggaatgggcattgtcgccaattttcaggagttagctgtgccagtggttcatgacgggggcgctcttttggcctttgtctgtggtgtcgtgtacacgctcctacagtccatcatctcttacaaatcatgtccccagtggaacagtctctcgacatgccacatacggatggtcatctctgccgtttcttgcgcagctgtcatccccatgattgtctgtgcttcactaatttccataaccaagctggagtggaatccaagagaaaaggattatgtatatcacgtagtgagtgcgatctgtgaatggacagtggcctttggttttattttctacttcctaactttcatccaagatttccagagtgtcaccctaaggatatccacagaaatcaatggtgatatttgaagaaagaagaattcagtctcactcagtgaatgtcgcaggccatttctaaaagtgctacagaggacagacagggttttgaggccaccctgattattgggatgcatctgcagcacatccaggacttgaatttcattacgagttcctaatagttgtatttctaaagatgtgtttcctagagaatgtacagccttatgacactgtagtgatgtttttataattttctaagtagatttttttatattaacaaattcatatacagaaaaaataaggtgttacaaaaaatggagagctcttatttttgtacagattctgtcgtttttgttttatttgtgtgagatttatggaaatacactaaatgagtaattcaggttcagtacatttattacaaagtgaaatcaggggatattcatttgtaaattttattcttagtgaatgaactgtataattttttttatcaggagagcacttataaaattcaatttataaagatcatatacccaaatcataaagatttagttgatacattaacactaagatactctgatttttagccgaactaaacaaagtgcttctactgagaggcctttataccaccatgtacagtaactctaagtgaatacggaagaccttggttttgaaattctgccaccttgtttctccctgctcatgaggtcgcaccttttgctcttgctgctaattgcccattcgtagtgggtgtaatgccaggtggaatggtttcaacaagtcaggtgaaaaccatcctttattgttgctggcacaacttgatatatagtctgactcagaactgaagctcacatctcaaattcatttcatgccagtaaatgtggcaaagagaagaaaggcccaagagcgagacaagaagaatggagaagggggcagccaagaagaacttctgggttcagggtactgtttatttgctccttctcttcatgcctgtggctggatgtcccacaacactataagaaatataagtcaagccctttgtgttaagcaagaactacagactccatcttttcacccaaatcatgaatgaccaataaaaagcaagttattccagaggaagaagcagcccttgaaatgttaaggcttaggcttgaaaggtgaagagcaggaattctctctttcaaatcctagagcataaacccatgtgtggccaagtgagatcagccctcaagggcacatgccaagggcagagcagcccatgtagacagcttcggagggcatgggggtgtagggagttcggggtagctcctcattaactatttgttgggtgagtaaaggggtgaggctcagtggcaggtacctctgcaatgacaagctgcctcccctctatgtgtttagcatatgttattagaacatgtccgacacccctaccgctgccatttgggccctttaataaagccaagtagagaaatctggcaataaaaggcaaatgtaagcatgctttctttaagacgcatcataaatggttttctttaagtgaatggaagagtttgacagagatacacctttgtaagaaaacattaagaatgctggctggctgtggtggctcacacctgtattcccagcactttgggaggcctaggcaggaggattgcttgagcctgggacttcgagaccagactgggaaacatggcaaaatcccatctctacaacaaaaatacaaaaattagccaagtgcggtggtgtgcctgtagtcctagttacttgggaggctgaggtgggagaatcacctgagcccaggaggtggaggctgcagtgagccatgccaatgcactccagtctgggcaacagagtgagaccctgtctcaaaaataaataaataaataaatgaataaagagaatgctaatcatttctggg

SEQ ID NO: 440157 - DNA, 2525 bp, Homo sapiens
catagtgagatcattccttaggtggtgcagagctgttggaaatgtcattgtcaacgctgggattgtttaacttcttttaaacctttctctttcatttttaaaaatagagtgtcaccctaaggatatccacagaaatcaatggtgatatttgaagaaagaagaattcagtctcactcagtgaatgtcgcaggccatttctaaaagtgctacagaggacagacagggttttgaggccaccctgattattgggatgcatctgcagcacatccaggacttgaatttcattacgagttcctaatagttgtatttctaaagatgtgtttcctagagaatgtacagccttatgacactgtagtgatgtttttataattttctaagtagatttttttatattaacaaattcatatacagaaaaaataaggtgttacaaaaaatggagagctcttatttttgtacagattctgtcgtttttgttttatttgtgtgagatttatggaaatacactaaatgagtaattcaggttcagtacatttattacaaagtgaaatcaggggatattcatttgtaaattttattcttagtgaatgaactgtataattttttttatcaggagagcacttataaaattcaatttataaagatcatatacccaaatcataaagatttagttgatacattaacactaagatactctgatttttagccgaactaaacaaagtgcttctactgagaggcctttataccaccatgtacagtaactctaagtgaatacggaagaccttggttttgaaattctgccaccttgtttctccctgctcatgaggtcgcaccttttgctcttgctgctaattgcccattcgtagtgggtgtaatgccaggtggaatggtttcaacaagtcaggtgaaaaccatcctttattgttgctggcacaacttgatatatagtctgactcagaactgaagctcacatctcaaattcatttcatgccagtaaatgtggcaaagagaagaaaggcccaagagcgagacaagaagaatggagaagggggcagccaagaagaacttctgggttcagggtactgtttatttgctccttctcttcatgcctgtggctggatgtcccacaacactataagaaatataagtcaagccctttgtgttaagcaagaactacagactccatcttttcacccaaatcatgaatgaccaataaaaagcaagttattccagaggaagaagcagcccttgaaatgttaaggcttaggcttgaaaggtgaagagcaggaattctctctttcaaatcctagagcataaacccatgtgtggccaagtgagatcagccctcaagggcacatgccaagggcagagcagcccatgtagacagcttcggagggcatgggggtgtagggagttcggggtagctcctcattaactatttgttgggtgagtaaaggggtgaggctcagtggcaggtacctctgcaatgacaagctgcctcccctctatgtgtttagcatatgttattagaacatgtccgacacccctaccgctgccatttgggccctttaataaagccaagtagagaaatctggcaataaaaggcaaatgtaagcatgctttctttaagacgcatcataaatggttttctttaagtgaatggaagagtttgacagagatacacctttgtaagaaaacattaagaatgctggctggctgtggtggctcacacctgtattcccagcactttgggaggcctaggcaggaggattgcttgagcctgggacttcgagaccagactgggaaacatggcaaaatcccatctctacaacaaaaatacaaaaattagccaagtgcggtggtgtgcctgtagtcctagttacttgggaggctgaggtgggagaatcacctgagcccaggaggtggaggctgcagtgagccatgccaatgcactccagtctgggcaacagagtgagaccctgtctcaaaaataaataaataaataaatgaataaagagaatgctaatcatttctgggttcactgcgactcactgtagtgctggggatcccccttgtaacactggaactgaaagacagtgatgaaagctatgtcaagcattcattattctgaagaggaggagaaatgccacatacctttcccatgggacctgtggtggaatgaatccatacttctgcctcacttcgagcagacttttgttctcggcgctcctcacgatggagtttcatgcttcattttcacatctctctgcacaattagattgggagctccttgagggcagagtacgtgccttaatctttatctttgtaatgccacaatgaacagagtgcctcctggtacactgtaggagcttaagaaatactcactgaatgcatgaatgaatgaatgaacaaatgaaggaatgactaaggatgtttgtagtgctataatatagaatgggatttactctgctttaccagttagtttcataataaacaaatagtctgtatcgcctggtaaaaaaaaaagt

SEQ ID NO: 440158 - DNA, 3020 bp, Homo sapiens
gggaaggccagagcgggcgtccccgccagtgaccccacgccgcccgtccgcgcccaacccggcctccgccgagtgtccaaaccaaaagcgaaaggaacccgaccccgcgtcccctccggcggctccgtagtcgcgtccgcttggagctcgccgggcgcctccgaccctgccgggccgctttgtgacttcactcgtttcgcaacaagcccgggcagcccgcgccccacccactctggcccggcagcctcgccgcccgcagcctcgctccgctcctcgcgcttcccctccctccggggctgggcctgccccggccgtcgcggagcctcccctcccaccgtccgtgagtgtacgcgcccggccgccgcctccaggcagcccggagcaacccggcgcccggccccgctgggcgcagcactccgtcggcggcggcggcggcgcgatgctgtgcttcctgaggggaatggctttcgtccccttcctcttggtgacctggtcgtcagccgccttcattatctcctacgtggtcgccgtgctctccgggcacgtcaaccccttcctcccgtatatcagtgatacgggaacaacacctccagagagtggtatttttggatttatgataaacttctctgcatttcttggtgcagccacgatgtatacaagatacaaaatagtacagaagcaaaatcaaacctgctatttcagcactcctgtttttaacttggtgtctttagtgcttggattggtgggatgtttcggaatgggcattgtcgccaattttcaggagttagctgtgccagtggttcatgacgggggcgctcttttggcctttgtctgtggtgtcgtgtacacgctcctacagtccatcatctcttacaaatcatgtccccagtggaacagtctctcgacatgccacatacggatggtcatctctgccgtttcttgcgcagctgtcatccccatgattgtctgtgcttcactaatttccataaccaagctggagtggaatccaagagaaaaggattatgtatatcacgtagtgagtgcgatctgtgaatggacagtggcctttggttttattttctacttcctaactttcatccaagatttccagagtgtcaccctaaggatatccacagaaatcaatggtgatatttgaagaaagaagaattcagtctcactcagtgaatgtcgcaggccatttctaaaagtgctacagaggacagacagggttttgaggccaccctgattattgggatgcatctgcagcacatccaggacttgaatttcattacgagttcctaatagttgtatttctaaagatgtgtttcctagagaatgtacagccttatgacactgtagtgatgtttttataattttctaagtagatttttttatattaacaaattcatatacagaaaaaataaggtgttacaaaaaatggagagctcttatttttgtacagattctgtcgtttttgttttatttgtgtgagatttatggaaatacactaaatgagtaattcaggttcagtacatttattacaaagtgaaatcaggggatattcatttgtaaattttattcttagtgaatgaactgtataattttttttatcaggagagcacttataaaattcaatttataaagatcatatacccaaatcataaagatttagttgatacattaacactaagatactctgatttttagccgaactaaacaaagtgcttctactgagaggcctttataccaccatgtacagtaactctaagtgaatacggaagaccttggttttgaaattctgccaccttgtttctccctgctcatgaggtcgcaccttttgctcttgctgctaattgcccattcgtagtgggtgtaatgccaggtggaatggtttcaacaagtcaggtgaaaaccatcctttattgttgctggcacaacttgatatatagtctgactcagaactgaagctcacatctcaaattcatttcatgccagtaaatgtggcaaagagaagaaaggcccaagagcgagacaagaagaatggagaagggggcagccaagaagaacttctgggttcagggtactgtttatttgctccttctcttcatgcctgtggctggatgtcccacaacactataagaaatataagtcaagccctttgtgttaagcaagaactacagactccatcttttcacccaaatcatgaatgaccaataaaaagcaagttattccagaggaagaagcagcccttgaaatgttaaggcttaggcttgaaaggtgaagagcaggaattctctctttcaaatcctagagcataaacccatgtgtggccaagtgagatcagccctcaagggcacatgccaagggcagagcagcccatgtagacagcttcggagggcatgggggtgtagggagttcggggtagctcctcattaactatttgttgggtgagtaaaggggtgaggctcagtggcaggtacctctgcaatgacaagctgcctcccctctatgtgtttagcatatgttattagaacatgtccgacacccctaccgctgccatttgggccctttaataaagccaagtagagaaatctggcaataaaaggcaaatgtaagcatgctttctttaagacgcatcataaatggttttctttaagtgaatggaagagtttgacagagatacacctttgtaagaaaacattaagaatgctggctggctgtggtggctcacacctgtattcccagcactttgggaggcctaggcaggaggattgcttgagcctgggacttcgagaccagactgggaaacatggcaaaatcccatctctacaacaaaaatacaaaaattagccaagtgcggtgtgctgggactacaggcgtgagccactgcgcctggcccagtaatttgttttgctgttaaattagaaaatatcacttggctactactatgaagtagatttatctgggagatgattccagatccatttggactttataaaggtatgattacgatttaaacc

SEQ ID NO: 440159 - DNA, 1492 bp, Homo sapiens
gggaaggccagagcgggcgtccccgccagtgaccccacgccgcccgtccgcgcccaacccggcctccgccgagtgtccaaaccaaaagcgaaaggaacccgaccccgcgtcccctccggcggctccgtagtcgcgtccgcttggagctcgccgggcgcctccgaccctgccgggccgctttgtgacttcactcgtttcgcaacaagcccgggcagcccgcgccccacccactctggcccggcagcctcgccgcccgcagcctcgctccgctcctcgcgcttcccctccctccggggctgggcctgccccggccgtcgcggagcctcccctcccaccgtccgtgagtgtacgcgcccggccgccgcctccaggcagcccggagcaacccggcgcccggccccgctgggcgcagcactccgtcggcggcggcggcggcgcgatgctgtgcttcctgaggggaatggctttcgtccccttcctcttggtgacctggtcgtcagccgccttcattatctcctacgtggtcgccgtgctctccgggcacgtcaaccccttcctcccgtatatcagtgatacgggaacaacacctccagagagtggtatttttggatttatgataaacttctctgcatttcttggtgcagccacgatgtatacaagatacaaaatagtacagaagcaaaatcaaacctgctatttcagcactcctgtttttaacttggtgtctttagtgcttggattggtgggatgtttcggaatgggcattgtcgccaattttcaggagttagctgtgccagtggttcatgacgggggcgctcttttggcctttgtctgtggtgtcgtgtacacgctcctacagtccatcatctcttacaaatcatgtccccagtggaacagtctctcgacatgccacatacggatggtcatctctgccgtttcttgcgcagctgtcatccccagtatcctttttcacatttgtgccttgttaaaggaataaaacattcagtgacactgttaaagaagggtaatgaagactttatagggaccgctgcaatgagttctgacagcagggcggagagattgggctcaactctgaatacagcattggcaagtgcgaatctatagccaaggagtaggatgaggtcagtgaatggaaaagtactaaaaggaaacctcaaggatgagggggaattctggccaaaccaacctaacaggattcttattgagtactggccatgtgatcagacatcacctgggaagggtggaggaggaggaggaacccaatcagatattgagtgtgatcagatatgagggtggggggtccttgctaaactgacttagccagggttctttgctaaaactggatcttacaaggaagtgcacagatggacctaggagaagtttcaggggcttgactaaagttcagccaagcaaaggatctttgtcaccgtgtcttagcaaagcttgacacttcccttccccacaaccaaaa

SEQ ID NO: 440160 - DNA, 1440 bp, Homo sapiens
gggaaggccagagcgggcgtccccgccagtgaccccacgccgcccgtccgcgcccaacccggcctccgccgagtgtccaaaccaaaagcgaaaggaacccgaccccgcgtcccctccggcggctccgtagtcgcgtccgcttggagctcgccgggcgcctccgaccctgccgggccgctttgtgacttcactcgtttcgcaacaagcccgggcagcccgcgccccacccactctggcccggcagcctcgccgcccgcagcctcgctccgctcctcgcgcttcccctccctccggggctgggcctgccccggccgtcgcggagcctcccctcccaccgtccgtgagtgtacgcgcccggccgccgcctccaggcagcccggagcaacccggcgcccggccccgctgggcgcagcactccgtcggcggcggcggcggcgcgatgctgtgcttcctgaggggaatggctttcgtccccttcctcttggtgacctggtcgtcagccgccttcattatctcctacgtggtcgccgtgctctccgggcacgtcaaccccttcctcccgtatatcagtgatacgggaacaacacctccagagagtggtatttttggatttatgataaacttctctgcatttcttggtgcagccacgatgtatacaagatacaaaatagtacagaagcaaaatcaaacctgctatttcagcactcctgtttttaacttggtgtctttagtgcttggattggtgggatgtttcggaatgggcattgtcgccaattttcaggagttagctgtgccagtggttcatgacgggggcgctcttttggcctttgtctgtggtgtcgtgtacacgctcctacagtccatcatctcttacaaatcatgtccccagtggaacagtctctcgacatgccacatacggatggtcatctctgccgtttcttgcgcagctgtcatccccatgattgtctgtgcttcactaatttccataaccaagctggagtggaatccaagagaaaaggtaatacaggagttgatggcaacgatggttactcattatgaaccacactgaaacgaccttcaattcaatttccatctgctaataaatatagtcaagtgctgcataatgttttggtcaacatcccctaagattataaaaccatatttgactgcaccttttctacatttagatacacaaataccactgtgttacaactgcctacagtattcagtacagtgacatgctgtgcaggtttgtagcctagaagcaataggtttgtgtaagtacacttgttatgaaatccacaatgtttgtacaataaaaccgcctaatgacgcatttctcagaacatatccctgttgttaatcaatgcatgactgcataagaatatctgacttaaaaaacacatgaactaatggccaagtggtgaaaggctgcatatg

SEQ ID NO: 440161 - DNA, 3529 bp, Homo sapiens
gggaaggccagagcgggcgtccccgccagtgaccccacgccgcccgtccgcgcccaacccggcctccgccgagtgtccaaaccaaaagcgaaaggaacccgaccccgcgtcccctccggcggctccgtagtcgcgtccgcttggagctcgccgggcgcctccgaccctgccgggccgctttgtgacttcactcgtttcgcaacaagcccgggcagcccgcgccccacccactctggcccggcagcctcgccgcccgcagcctcgctccgctcctcgcgcttcccctccctccggggctgggcctgccccggccgtcgcggagcctcccctcccaccgtccgtgagtgtacgcgcccggccgccgcctccaggcagcccggagcaacccggcgcccggccccgctgggcgcagcactccgtcggcggcggcggcggcgcgatgctgtgcttcctgaggggaatggctttcgtccccttcctcttggtgacctggtcgtcagccgccttcattatctcctacgtggtcgccgtgctctccgggcacgtcaaccccttcctcccgtatatcagtgatacgggaacaacacctccagagagtggtatttttggatttatgataaacttctctgcatttcttggtgcagccacgatgtatacaagatacaaaatagtacagaagcaaaatcaaacctgctatttcagcactcctgtttttaacttggtgtctttagtgcttggattggtgggatgtttcggaatgggcattgtcgccaattttcaggagttagctgtgccagtggttcatgacgggggcgctcttttggcctttgtctgtggtgtcgtgtacacgctcctacagtccatcatctcttacaaatcatgtccccagtggaacagtctctcgacatgccacatacggatggtcatctctgccgtttcttgcgcagctgtcatccccatgattgtctgtgcttcactaatttccataaccaagctggagtggaatccaagagaaaaggattatgtatatcacgtagtgagtgcgatctgtgaatggacagtggcctttggttttattttctacttcctaactttcatccaagatttccagagtgtcaccctaaggatatccacagaaatcaatggtgatatttgaagaaagaagaattcagtctcactcagtgaatgtcgcaggccatttctaaaagtgctacagaggacagacagggttttgaggccaccctgattattgggatgcatctgcagcacatccaggacttgaatttcattacgagttcctaatagttgtatttctaaagatgtgtttcctagagaatgtacagccttatgacactgtagtgatgtttttataattttctaagtagatttttttatattaacaaattcatatacagaaaaaataaggtgttacaaaaaatggagagctcttatttttgtacagattctgtcgtttttgttttatttgtgtgagatttatggaaatacactaaatgagtaattcaggttcagtacatttattacaaagtgaaatcaggggatattcatttgtaaattttattcttagtgaatgaactgtataattttttttatcaggagagcacttataaaattcaatttataaagatcatatacccaaatcataaagatttagttgatacattaacactaagatactctgatttttagccgaactaaacaaagtgcttctactgagaggcctttataccaccatgtacagtaactctaagtgaatacggaagaccttggttttgaaattctgccaccttgtttctccctgctcatgaggtcgcaccttttgctcttgctgctaattgcccattcgtagtgggtgtaatgccaggtggaatggtttcaacaagtcaggtgaaaaccatcctttattgttgctggcacaacttgatatatagtctgactcagaactgaagctcacatctcaaattcatttcatgccagtaaatgtggcaaagagaagaaaggcccaagagcgagacaagaagaatggagaagggggcagccaagaagaacttctgggttcagggtactgtttatttgctccttctcttcatgcctgtggctggatgtcccacaacactataagaaatataagtcaagccctttgtgttaagcaagaactacagactccatcttttcacccaaatcatgaatgaccaataaaaagcaagttattccagaggaagaagcagcccttgaaatgttaaggcttaggcttgaaaggtgaagagcaggaattctctctttcaaatcctagagcataaacccatgtgtggccaagtgagatcagccctcaagggcacatgccaagggcagagcagcccatgtagacagcttcggagggcatgggggtgtagggagttcggggtagctcctcattaactatttgttgggtgagtaaaggggtgaggctcagtggcaggtacctctgcaatgacaagctgcctcccctctatgtgtttagcatatgttattagaacatgtccgacacccctaccgctgccatttgggccctttaataaagccaagtagagaaatctggcaataaaaggcaaatgtaagcatgctttctttaagacgcatcataaatggttttctttaagtgaatggaagagtttgacagagatacacctttgtaagaaaacattaagaatgctggctggctgtggtggctcacacctgtattcccagcactttgggaggcctaggcaggaggattgcttgagcctgggacttcgagaccagactgggaaacatggcaaaatcccatctctacaacaaaaatacaaaaattagccaagtgcggtggtgtgcctgtagtcctagttacttgggaggctgaggtgggagaatcacctgagcccaggaggtggaggctgcagtgagccatgccaatgcactccagtctgggcaacagagtgagaccctgtctcaaaaataaataaataaataaatgaataaagagaatgctaatcatttctgggttcactgcgactcactgtagtgctggggatcccccttgtaacactggaactgaaagacagtgatgaaagctatgtcaagcattcattattctgaagaggaggagaaatgccacatacctttcccatgggacctgtggtggaatgaatccatacttctgcctcacttcgagcagacttttgttctcggcgctcctcacgatggagtttcatgcttcattttcacatctctctgcacaattagattgggagctccttgagggcagagtacgtgccttaatctttatctttgtaatgccacaatgaacagagtgcctcctggtacactgtaggagcttaagaaatactcactgaatgcatgaatgaatgaatgaacaaatgaaggaatgactaaggatgtttgtagtgctataatatagaatgggatttactctgctttaccagttagtttcataataaacaaatagtctgtatcgcctggtaaaaaaaaaagt

SEQ ID NO: 440162 - DNA, 3468 bp, Homo sapiens
gggaaggccagagcgggcgtccccgccagtgaccccacgccgcccgtccgcgcccaacccggcctccgccgagtgtccaaaccaaaagcgaaaggaacccgaccccgcgtcccctccggcggctccgtagtcgcgtccgcttggagctcgccgggcgcctccgaccctgccgggccgctttgtgacttcactcgtttcgcaacaagcccgggcagcccgcgccccacccactctggcccggcagcctcgccgcccgcagcctcgctccgctcctcgcgcttcccctccctccggggctgggcctgccccggccgtcgcggagcctcccctcccaccgtccgtgagtgtacgcgcccggccgccgcctccaggcagcccggagcaacccggcgcccggccccgctgggcgcagcactccgtcggcggcggcggcggcgcgatgctgtgcttcctgaggggaatggctttcgtccccttcctcttggtgacctggtcgtcagccgccttcattatctcctacgtggtcgccgtgctctccgggcacgtcaaccccttcctcccgtatatcagtgatacgggaacaacacctccagagagtggtatttttggatttatgataaacttctctgcatttcttggtgcagccacgatgtatacaagatacaaaatagtacagaagcaaaatcaaacctgctatttcagcactcctgtttttaacttggtgtctttagtgcttggattggtgggatgtttcggaatgggcattgtcgccaattttcaggagttagctgtgccagtggttcatgacgggggcgctcttttggcctttgtctgtggtgtcgtgtacacgctcctacagtccatcatctcttacaaatcatgtccccagtggaacagtctctcgacatgccacatacggatggtcatctctgccgtttcttgcgcagctgtcatccccatgattgtctgtgcttcactaatttccataaccaagctggagtggaatccaagagaaaaggattatgtatatcacgtagtgagtgcgatctgtgaatggacagtggcctttggttttattttctacttcctaactttcatccaagatttccagagtgtcaccctaaggatatccacagaaatcaatggtgatatttgaagaaagaagaattcagtctcactcagtgaatgtcgcaggccatttctaaaagtgctacagaggacagacagggttttgaggccaccctgattattgggatgcatctgcagcacatccaggacttgaatttcattacgagttcctaatagttgtatttctaaagatgtgtttcctagagaatgtacagccttatgacactgtagtgatgtttttataattttctaagtagatttttttatattaacaaattcatatacagaaaaaataaggtgttacaaaaaatggagagctcttatttttgtacagattctgtcgtttttgttttatttgtgtgagatttatggaaatacactaaatgagtaattcaggttcagtacatttattacaaagtgaaatcaggggatattcatttgtaaattttattcttagtgaatgaactgtataattttttttatcaggagagcacttataaaattcaatttataaagatcatatacccaaatcataaagatttagttgatacattaacactaagatactctgatttttagccgaactaaacaaagtgcttctactgagaggcctttataccaccatgtacagtaactctaagtgaatacggaagaccttggttttgaaattctgccaccttgtttctccctgctcatgaggtcgcaccttttgctcttgctgctaattgcccattcgtagtgggtgtaatgccaggtggaatggtttcaacaagtcaggtgaaaaccatcctttattgttgctggcacaacttgatatatagtctgactcagaactgaagctcacatctcaaattcatttcatgccagtaaatgtggcaaagagaagaaaggcccaagagcgagacaagaagaatggagaagggggcagccaagaagaacttctgggttcagggtactgtttatttgctccttctcttcatgcctgtggctggatgtcccacaacactataagaaatataagtcaagccctttgtgttaagcaagaactacagactccatcttttcacccaaatcatgaatgaccaataaaaagcaagttattccagaggaagaagcagcccttgaaatgttaaggcttaggcttgaaaggtgaagagcaggaattctctctttcaaatcctagagcataaacccatgtgtggccaagtgagatcagccctcaagggcacatgccaagggcagagcagcccatgtagacagcttcggagggcatgggggtgtagggagttcggggtagctcctcattaactatttgttgggtgagtaaaggggtgaggctcagtggcaggtacctctgcaatgacaagctgcctcccctctatgtgtttagcatatgttattagaacatgtccgacacccctaccgctgccatttgggccctttaataaagccaagtagagaaatctggcaataaaaggcaaatgtaagcatgctttctttaagacgcatcataaatggttttctttaagtgaatggaagagtttgacagagatacacctttgtaagaaaacattaagaatgctggctggctgtggtggctcacacctgtattcccagcactttgggaggcctaggcaggaggattgcttgagcctgggacttcgagaccagactgggaaacatggcaaaatcccatctctacaacaaaaatacaaaaattagccaagtgcggtggtgtgcctgtagtcctagttacttgggaggctgaggtgggagaatcacctgagcccaggaggtggaggctgcagtgagccatgccaatgcactccagtctgggcaacagagtgagttcactgcgactcactgtagtgctggggatcccccttgtaacactggaactgaaagacagtgatgaaagctatgtcaagcattcattattctgaagaggaggagaaatgccacatacctttcccatgggacctgtggtggaatgaatccatacttctgcctcacttcgagcagacttttgttctcggcgctcctcacgatggagtttcatgcttcattttcacatctctctgcacaattagattgggagctccttgagggcagagtacgtgccttaatctttatctttgtaatgccacaatgaacagagtgcctcctggtacactgtaggagcttaagaaatactcactgaatgcatgaatgaatgaatgaacaaatgaaggaatgactaaggatgtttgtagtgctataatatagaatgggatttactctgctttaccagttagtttcataataaacaaatagtctgtatcgcctggtaaaaaaaaaagt

SEQ ID NO: 440163 - DNA, 1122 bp, Homo sapiens
gggaaggccagagcgggcgtccccgccagtgaccccacgccgcccgtccgcgcccaacccggcctccgccgagtgtccaaaccaaaagcgaaaggaacccgaccccgcgtcccctccggcggctccgtagtcgcgtccgcttggagctcgccgggcgcctccgaccctgccgggccgctttgtgacttcactcgtttcgcaacaagcccgggcagcccgcgccccacccactctggcccggcagcctcgccgcccgcagcctcgctccgctcctcgcgcttcccctccctccggggctgggcctgccccggccgtcgcggagcctcccctcccaccgtccgtgagtgtacgcgcccggccgccgcctccaggcagcccggagcaacccggcgcccggccccgctgggcgcagcactccgtcggcggcggcggcggcgcgatgctgtgcttcctgaggggaatggctttcgtccccttcctcttggtgacctggtcgtcagccgccttcattatctcctacgtggtcgccgtgctctccgggcacgtcaaccccttcctcccgtatatcagaccctgtctcaaaaataaataaataaataaatgaataaagagaatgctaatcatttctgggttcactgcgactcactgtagtgctggggatcccccttgtaacactggaactgaaagacagtgatgaaagctatgtcaagcattcattattctgaagaggaggagaaatgccacatacctttcccatgggacctgtggtggaatgaatccatacttctgcctcacttcgagcagacttttgttctcggcgctcctcacgatggagtttcatgcttcattttcacatctctctgcacaattagattgggagctccttgagggcagagtacgtgccttaatctttatctttgtaatgccacaatgaacagagtgcctcctggtacactgtaggagcttaagaaatactcactgaatgcatgaatgaatgaatgaacaaatgaaggaatgactaaggatgtttgtagtgctataatatagaatgggatttactctgctttaccagttagtttcataataaacaaatagtctgtatcgcctggtaaaaaaaaaagt

SEQ ID NO: 440164 - DNA, 903 bp, Homo sapiens
gggaaggccagagcgggcgtccccgccagtgaccccacgccgcccgtccgcgcccaacccggcctccgccgagtgtccaaaccaaaagcgaaaggaacccgaccccgcgtcccctccggcggctccgtagtcgcgtccgcttggagctcgccgggcgcctccgaccctgccgggccgctttgtgacttcactcgtttcgcaacaagcccgggcagcccgcgccccacccactctggcccggcagcctcgccgcccgcagcctcgctccgctcctcgcgcttcccctccctccggggctgggcctgccccggccgtcgcggagcctcccctcccaccgtccgtgagtgtacgcgcccggccgccgcctccaggcagcccggagcaacccggcgcccggccccgctgggcgcagcactccgtcggcggcggcggcggcgcgatgctgtgcttcctgaggggaatggctttcgtccccttcctcttggtgacctggtcgtcagccgccttcattatctcctacgtggtcgccgtgctctccgggcacgtcaaccccttcctcccgtatatcagtgatacgggaacaacacctccagagagtggtatttttggatttatgataaacttctctgcatttcttggtgcagccacgatgtatacaagatacaaaatagtacagaagcaaaatcaaacctgctatttcagcactcctgtttttaacttggtgtctttagtgcttggattggtgggatgtttcggaatgggcattgtcgccaattttcaggtataatctggagctttttcagttatgaggagtggtggagtgtatgtgtctgaagagagcagcagaaatgcaagaggcacacttatgccattatagccattaaatgcttgatgagtttacaa

SEQ ID NO: 440165 - DNA, 556 bp, Homo sapiens
tggggtaattatttctggatcagccgaggccctgctcctcaggccttcttgaggggagcaccagggctgcgggtcagggatgaagctgatggccctgaagccgttcccctgccccagaataccgtcctgcagccactcactctgggttcacgtccttctgctggaacaggctgttttggagtcagcggaagatcaccaaggccagggagtggttccaccgcactgtgaagattgactcggacctgggggatgcctgggccttcttctacaagtttgagctgcagcatggcactgaggagcagcaggaggaggtgaggaagcgctgtgagagtgcagagcctcggcatggggagctgtggtgcgccgtgtccaaggacatcgccaactggcagaagaagatcggggacatccttaggctggtggccggccgcatcaagaacaccttctgattgagcggttgccatggccggtctccgtggggcagggttgggccgcatgtggaagggctctgagctgtgtcctccttcattaaaagtttttatgtctcgtgtcagaa

SEQ ID NO: 440166 - DNA, 523 bp, Homo sapiens
agggaatcaaaagtgggcggggcgtgtgcggactgagcgctctgcttccggggcgcgggtgacgcgacgacggcgacactttgctacggagtgcatcggacgtcgaagcctagagtctctgcgtctttccctcttccgctgcctcattcctttccttcctagccttggtcgtcgccgccaccatgaacaagaagaagaaaccgttcctagggatgcccgcgcccctcggctacgtgccggggctgggccggggcgccactggcttcaccacgcggtcagacattgggcccgcccgtgatgcaaatgaccctgtggatgatcgccatgcacccccaggcaagagaaccgttggggaccagatgaagaaaaatcaggctgctgacgatgacgacgaggatctaaatgacaccaattacgatgagtttaatggctatgctgggagcctcttctcaagtggaccctacgagaaagatgatgaggaagcagatgctatctatgcagccctggataaaaggatggatga

SEQ ID NO: 440167 - DNA, 614 bp, Homo sapiens
tcgaatcgagctcggaccccagcagcgcgttggagactgggggttgctggatggtactggggagtcctgtgccaaaccagaagcaggcacaggtgtgaatgggccctgagggacctgggcatgcccactgtcgctcttgatggattcaggcctggagttcgtcttggggtgaacacattcagaagcccttttcagtcgttgtgcacacctgactgcatttctttgctagtagcaaatgatacacctacgagaggaggacaggaagtctcatggcttctttctttgctagtagaaatgatacacctacgagaggaggacaggaagtctcacggcttctttctttgctagtagaaatgatacacctacgagaggaggacaggaagtctcacggcttctttctttgctagtagaaatgatacacctacgagaggaggaccggaagtctcacggcttctttctttgctagtagaaatgatacacctacgagaggaggacaggaagtctcacggcttctttctttgctagtagaaatgatacacctacgagaggaggacaggaagtctcacggcttctttcttgctagtagatgatacacccacagagcgactgaccgg

SEQ ID NO: 440168 - DNA, 464 bp, Homo sapiens
tatgtgctgttggtagacggctgtgggacctccgggggcctgtctcctcaggttggagtccgtgcggctggagtaccgtgcggggctgaagaacatcgcaaatacactcatggccaaggcgctgcaggagtgccccaactccggtaagggggtgccccgactccggtaagggggtgccctgactccggtaagggggtgccttgactccggtaagggggtgcttcctggcttcccagactccgcagggctggcacttcctgagggagtgggggctcaggcttcagacggactttattaaaatgtgtagtttgtgtgaatcatttcagtcaaaagtttcagctatactcggccgttaagacaacttaatgaaattcttggcctcaaaatgggagaatttgatttcatttctgaagtgttatcatttctttttcttttaaaatttaaaagaaattggccaggtgtgg

SEQ ID NO: 440169 - DNA, 588 bp, Homo sapiens
agcagctgtaaggtgggcacggaagagctcagtgtgggccaagttgggtttaagggcctggttggatgtggagggggagatgatcgaagccttagggtggagagagattgccttggtaacatcatcagggtaggctgaaactttcaggtaagcagagaagatcagaagtgtttgagactgcagttcattgtcaccaggatctttggaggtttcccaaaggtgttagaaaaagaggtgttagtaagtgataaccaggagtggagaagagcacaggaacagagttattcagacacccggtgtcttgggggtctcctgcagcgccactggcttcaccacgcggtcagacattgggcccgcccgtgatgcaaatgaccctgtggatgatcgccatgcacccccaggcaagagaaccgttggggaccagatgaagaaaaatcaggctgctgacgatgacgacgaggatctaaatgacaccaattacgatgagtttaatggctatgctgggagcctcttctcaagtggaccctacgagaaagatgatgaggaagcagatgctatctatgcagccctggataaaaggatggatga

SEQ ID NO: 440170 - DNA, 366 bp, Homo sapiens
cctgagggactcggtcacccactgcagatgagaagctgggcatggctgtgtccagttctccatagacaccacctgagctgctctcttacttgttggttgcagttgaagaagtgtccccactccacacccctgtggcttttgctctctcggctggaggagaagattgggcagcttactcgagcacgggccattttggaaaagtctcgtctgaagaacccaaagaaccctgggctgtggtgagtcctggagggggcagcctggcctctgggcacagcttccccatcaggtgggccgccgtcacccagctgcttgtgtggagtcactcgtgcagtgcttccaggctcaggggcttggggggcggtaggt

SEQ ID NO: 440171 - DNA, 3065 bp, Homo sapiens
  misc_feature (17)..(17): n is a, c, g, or t
aaaaaaaataggctagnagagccggtgttaatcctacggagtgcatcggacgtcgaagcctagagtctctgcgtctttccctcttccgctgcctcattcctttccttcctagccttggtcgtcgccgccaccatgaacaagaagaagaaaccgttcctagggatgcccgcgcccctcggctacgtgccggggctgggccggggcgccactggcttcaccacgcggtcagacattgggcccgcccgtgatgcaaatgaccctgtggatgatcgccatgcacccccaggcaagagaaccgttggggaccagatgaagaaaaatcaggctgctgacgatgacgacgaggatctaaatgacaccaattacgatgagtttaatggctatgctgggagcctcttctcaagtggaccctacgagaaagatgatgaggaagcagatgctatctatgcagccctggataaaaggatggatgaaagaagaaaagaaagacgggagcaaagggagaaagaagaaatagagaaatatcgtatggaacgccccaaaatccaacagcagttctcagacctcaagaggaagttggcagaagtcacagaagaagagtggctgagcatccccgaggttggcgatgccagaaataaacgtcagcggaacccacgctatgagaagctgacccctgttcctgacagtttctttgccaaacatttacagaccggagagaaccatacctcagtggatccccgacaaactcaatttggaggtcttaacacaccctatccaggtggactaaacactccatacccaggtggaatgacgccaggactgatgacacctggcacaggtgagctggacatgaggaagattggccaagcgaggaacactctgatggacatgaggctgagccaggtgtctgactccgtgagtggacagaccgtcgttgaccccaaaggctacctgacggatttaaattccatgatcccgacacacggaggagacatcaatgatatcaagaaggcgcgactgctcctcaagtctgttcgggagacgaaccctcatcacccgccagcctggattgcatcagcccgcctggaagaagtcactgggaagctacaagtagctcggaaccttatcatgaaggggacggagatgtgccccaagagtgaagatgtctggctggaagcagccaggttgcagcctggggacacagccaaggccgtggtagcccaagctgtccgtcatctcccacagtctgtcaggatttacatcagagccgcagagctggaaacggacattcgtgcaaagaagcgggttcttcggaaagccctcgagcatgttccaaactcggttcgcttgtggaaagcagccgttgagctggaagaacctgaagatgctagaatcatgctgagccgagctgtggagtgctgccccaccagcgtggagctctggcttgctctggcaaggctggagacctatgaaaatgcccgcaaggtcttgaacaaggcgcgggagaacattcctacagaccgacatatctggatcacggctgctaagctggaggaagccaatgggaacacgcagatggtggagaagatcatcgaccgagccatcacctcgctgcgggccaacggtgtggagatcaaccgtgagcagtggatccaggatgccgaggaatgtgacagggctgggagtgtggccacctgccaggccgtcatgcgtgccgtgattgggattgggattgaggaggaagatcggaagcatacctggatggaggatgctgacagttgtgtagcccacaatgccctggagtgtgcacgagccatctacgcctacgccctgcaggtgttccccagcaagaagagtgtgtggctgcgcgccgcgtacttcgagaagaaccatggcactcgggagtccctggaagcactcctgcagagggctgtggcccactgccccaaagcagaggtgctgtggctcatgggcgccaagtccaagtggctggcaggggatgtgcctgcagcaaggagcatcctggccctggccttccaggccaaccccaacagtgaggagatctggctggcagccgtgaagctggagtccgagaatgatgagtacgagcgggcccggaggctgctggccaaggcgcggagcagtgcccccaccgcccgggtgttcatgaagtctgtgaagctggagtgggtgcaagacaacatcagggcagcccaagatctgtgcgaggaggccctgcggcactatgaggacttccccaagctgtggatgatgaaggggcagatcgaggagcagaaggagatgatggagaaggcgcgggaagcctataaccaggggttgaagaagtgtccccactccacacccctgtggcttttgctctctcggctggaggagaagattgggcagcttactcgagcacgggccattttggaaaagtctcgtctgaagaacccaaagaaccctgggctgtggttggagtccgtgcggctggagtaccgtgcggggctgaagaacatcgcaaatacactcatggccaaggcgctgcaggagtgccccaactccggtatcctgtggtctgaggccatcttcctcgaggcaaggccccagaggaggaccaagagcgtggatgccctgaagaagtgtgagcatgacccccatgtgctcctggccgtggccaagctgttttggagtcagcggaagatcaccaaggccagggagtggttccaccgcactgtgaagattgactcggacctgggggatgcctgggccttcttctacaagtttgagctgcagcatggcactgaggagcagcaggaggaggtgaggaagcgctgtgagagtgcagagcctcggcatggggagctgtggtgcgccgtgtccaaggacatcgccaactggcagaagaagatcggggacatccttaggctggtggccggccgcatcaagaacaccttctgattgagcggttgccatggccggtctccgtggggcagggttgggccgcatgtggaagggctctgagctgtgtcctccttcattaaaagtttttatgtctcgtgtcagaa

SEQ ID NO: 440172 - DNA, 3146 bp, Homo sapiens
agggaatcaaaagtgggcggggcgtgtgcggactgagcgctctgcttccggggcgcgggtgacgcgacgacggcgacactttgctacggagtgcatcggacgtcgaagcctagagtctctgcgtctttccctcttccgctgcctcattcctttccttcctagccttggtcgtcgccgccaccatgaacaagaagaagaaaccgttcctagggatgcccgcgcccctcggctacgtgccggggctgggccggggcgccactggcttcaccacgcggtcagacattgggcccgcccgtgatgcaaatgaccctgtggatgatcgccatgcacccccaggcaagagaaccgttggggaccagatgaagaaaaatcaggctgctgacgatgacgacgaggatctaaatgacaccaattacgatgagtttaatggctatgctgggagcctcttctcaagtggaccctacgagaaagatgatgaggaagcagatgctatctatgcagccctggataaaaggatggatgaaagaagaaaagaaagacgggagcaaagggagaaagaagaaatagagaaatatcgtatggaacgccccaaaatccaacagcagttctcagacctcaagaggaagttggcagaagtcacagaagaagagtggctgagcatccccgaggttggcgatgccagaaataaacgtcagcggaacccacgctatgagaagctgacccctgttcctgacagtttctttgccaaacatttacagaccggagagaaccatacctcagtggatccccgacaaactcaatttggaggtcttaacacaccctatccaggtggactaaacactccatacccaggtggaatgacgccaggactgatgacacctggcacaggtgagctggacatgaggaagattggccaagcgaggaacactctgatggacatgaggctgagccaggtgtctgactccgtgagtggacagaccgtcgttgaccccaaaggctacctgacggatttaaattccatgatcccgacacacggaggagacatcaatgatatcaagaaggcgcgactgctcctcaagtctgttcgggagacgaaccctcatcacccgccagcctggattgcatcagcccgcctggaagaagtcactgggaagctacaagtagctcggaaccttatcatgaaggggacggagatgtgccccaagagtgaagatgtctggctggaagcagccaggttgcagcctggggacacagccaaggccgtggtagcccaagctgtccgtcatctcccacagtctgtcaggatttacatcagagccgcagagctggaaacggacattcgtgcaaagaagcgggttcttcggaaagccctcgagcatgttccaaactcggttcgcttgtggaaagcagccgttgagctggaagaacctgaagatgctagaatcatgctgagccgagctgtggagtgctgccccaccagcgtggagctctggcttgctctggcaaggctggagacctatgaaaatgcccgcaaggtcttgaacaaggcgcgggagaacattcctacagaccgacatatctggatcacggctgctaagctggaggaagccaatgggaacacgcagatggtggagaagatcatcgaccgagccatcacctcgctgcgggccaacggtgtggagatcaaccgtgagcagtggatccaggatgccgaggaatgtgacagggctgggagtgtggccacctgccaggccgtcatgcgtgccgtgattgggattgggattgaggaggaagatcggaagcatacctggatggaggatgctgacagttgtgtagcccacaatgccctggagtgtgcacgagccatctacgcctacgccctgcaggtgttccccagcaagaagagtgtgtggctgcgcgccgcgtacttcgagaagaaccatggcactcgggagtccctggaagcactcctgcagagggctgtggcccactgccccaaagcagaggtgctgtggctcatgggcgccaagtccaagtggctggcaggggatgtgcctgcagcaaggagcatcctggccctggccttccaggccaaccccaacagtgaggagatctggctggcagccgtgaagctggagtccgagaatgatgagtacgagcgggcccggaggctgctggccaaggcgcggagcagtgcccccaccgcccgggtgttcatgaagtctgtgaagctggagtgggtgcaagacaacatcagggcagcccaagatctgtgcgaggaggccctgcggcactatgaggacttccccaagctgtggatgatgaaggggcagatcgaggagcagaaggagatgatggagaaggcgcgggaagcctataaccaggggttgaagaagtgtccccactccacacccctgtggcttttgctctctcggctggaggagaagattgggcagcttactcgagcacgggccattttggaaaagtctcgtctgaagaacccaaagaaccctgggctgtggttggagtccgtgcggctggagtaccgtgcggggctgaagaacatcgcaaatacactcatggccaaggcgctgcaggagtgccccaactccggtatcctgtggtctgaggccatcttcctcgaggcaaggccccagaggaggaccaagagcgtggatgccctgaagaagtgtgagcatgacccccatgtgctcctggccgtggccaagctgttttggagtcagcggaagatcaccaaggccagggagtggttccaccgcactgtgaagattgactcggacctgggggatgcctgggccttcttctacaagtttgagctgcagcatggcactgaggagcagcaggaggaggtgaggaagcgctgtgagagtgcagagcctcggcatggggagctgtggtgcgccgtgtccaaggacatcgccaactggcagaagaagatcggggacatccttaggctggtggccggccgcatcaagaacaccttctgattgagcggttgccatggccggtctccgtggggcagggttgggccgcatgtggaagggctctgagctgtgtcctccttcattaaaagtttttatgtctcgtgtcagaaagaaaaatcacaaacaaacacaacacaaaaa

SEQ ID NO: 440173 - DNA, 3180 bp, Homo sapiens
agcagctgtaaggtgggcacggaagagctcagtgtgggccaagttgggtttaagggcctggttggatgtggagggggagatgatcgaagccttagggtggagagagattgccttggtaacatcatcagggtaggctgaaactttcaggtaagcagagaagatcagaagtgtttgagactgcagttcattgtcaccaggatctttggaggtttcccaaaggtgttagaaaaagaggtgttagtaagtgataaccaggagtggagaagagcacaggaacagagttattcagacacccggtgtcttgggggtctcctgcagcgccactggcttcaccacgcggtcagacattgggcccgcccgtgatgcaaatgaccctgtggatgatcgccatgcacccccaggcaagagaaccgttggggaccagatgaagaaaaatcaggctgctgacgatgacgacgaggatctaaatgacaccaattacgatgagtttaatggctatgctgggagcctcttctcaagtggaccctacgagaaagatgatgaggaagcagatgctatctatgcagccctggataaaaggatggatgaaagaagaaaagaaagacgggagcaaagggagaaagaagaaatagagaaatatcgtatggaacgccccaaaatccaacagcagttctcagacctcaagaggaagttggcagaagtcacagaagaagagtggctgagcatccccgaggttggcgatgccagaaataaacgtcagcggaacccacgctatgagaagctgacccctgttcctgacagtttctttgccaaacatttacagaccggagagaaccatacctcagtggatccccgacaaactcaatttggaggtcttaacacaccctatccaggtggactaaacactccatacccaggtggaatgacgccaggactgatgacacctggcacaggtgagctggacatgaggaagattggccaagcgaggaacactctgatggacatgaggctgagccaggtgtctgactccgtgagtggacagaccgtcgttgaccccaaaggctacctgacggatttaaattccatgatcccgacacacggaggagacatcaatgatatcaagaaggcgcgactgctcctcaagtctgttcgggagacgaaccctcatcacccgccagcctggattgcatcagcccgcctggaagaagtcactgggaagctacaagtagctcggaaccttatcatgaaggggacggagatgtgccccaagagtgaagatgtctggctggaagcagccaggttgcagcctggggacacagccaaggccgtggtagcccaagctgtccgtcatctcccacagtctgtcaggatttacatcagagccgcagagctggaaacggacattcgtgcaaagaagcgggttcttcggaaagccctcgagcatgttccaaactcggttcgcttgtggaaagcagccgttgagctggaagaacctgaagatgctagaatcatgctgagccgagctgtggagtgctgccccaccagcgtggagctctggcttgctctggcaaggctggagacctatgaaaatgcccgcaaggtcttgaacaaggcgcgggagaacattcctacagaccgacatatctggatcacggctgctaagctggaggaagccaatgggaacacgcagatggtggagaagatcatcgaccgagccatcacctcgctgcgggccaacggtgtggagatcaaccgtgagcagtggatccaggatgccgaggaatgtgacagggctgggagtgtggccacctgccaggccgtcatgcgtgccgtgattgggattgggattgaggaggaagatcggaagcatacctggatggaggatgctgacagttgtgtagcccacaatgccctggagtgtgcacgagccatctacgcctacgccctgcaggtgttccccagcaagaagagtgtgtggctgcgcgccgcgtacttcgagaagaaccatggcactcgggagtccctggaagcactcctgcagagggctgtggcccactgccccaaagcagaggtgctgtggctcatgggcgccaagtccaagtggctggcaggggatgtgcctgcagcaaggagcatcctggccctggccttccaggccaaccccaacagtgaggagatctggctggcagccgtgaagctggagtccgagaatgatgagtacgagcgggcccggaggctgctggccaaggcgcggagcagtgcccccaccgcccgggtgttcatgaagtctgtgaagctggagtgggtgcaagacaacatcagggcagcccaagatctgtgcgaggaggccctgcggcactatgaggacttccccaagctgtggatgatgaaggggcagatcgaggagcagaaggagatgatggagaaggcgcgggaagcctataaccaggggttgaagaagtgtccccactccacacccctgtggcttttgctctctcggctggaggagaagattgggcagcttactcgagcacgggccattttggaaaagtctcgtctgaagaacccaaagaaccctgggctgtggttggagtccgtgcggctggagtaccgtgcggggctgaagaacatcgcaaatacactcatggccaaggcgctgcaggagtgccccaactccggtatcctgtggtctgaggccatcttcctcgaggcaaggccccagaggaggaccaagagcgtggatgccctgaagaagtgtgagcatgacccccatgtgctcctggccgtggccaagctgttttggagtcagcggaagatcaccaaggccagggagtggttccaccgcactgtgaagattgactcggacctgggggatgcctgggccttcttctacaagtttgagctgcagcatggcactgaggagcagcaggaggaggtgaggaagcgctgtgagagtgcagagcctcggcatggggagctgtggtgcgccgtgtccaaggacatcgccaactggcagaagaagatcggggacatccttaggctggtggccggccgcatcaagaacaccttctgattgagcggttgccatggccggtctccgtggggcagggttgggccgcatgtggaagggctctgagctgtgtcctccttcattaaaagtttttatgtctcgtgtcagaa

SEQ ID NO: 440174 - DNA, 3020 bp, Homo sapiens
agggaatcaaaagtgggcggggcgtgtgcggactgagcgctctgcttccggggcgcgggtgacgcgacgacggcgacactttgctacggagtgcatcggacgtcgaagcctagagtctctgcgtctttccctcttccgctgcctcattcctttccttcctagccttggtcgtcgccgccaccatgaacaagaagaagaaaccgttcctagggatgcccgcgcccctcggctacgtgccggggctgggccggggcgccactggcttcaccacgcggtcagacattgggcccgcccgtgatgcaaatgaccctgtggatgatcgccatgcacccccaggcaagagaaccgttggggaccagatgaagaaaaatcaggctgctgacgatgacgacgaggatctaaatgacaccaattacgatgagtttaatggctatgctgggagcctcttctcaagtggaccctacgagaaagatgatgaggaagcagatgctatctatgcagccctggataaaaggatggatgaaagaagaaaagaaagacgggagcaaagggagaaagaagaaatagagaaatatcgtatggaacgccccaaaatccaacagcagttctcagacctcaagaggaagttggcagaagtcacagaagaagagtggctgagcatccccgaggttggcgatgccagaaataaacgtcagcggaacccacgctatgagaagctgacccctgttcctgacagtttctttgccaaacatttacagaccggagagaaccatacctcagtggatccccgacaaactcaatttggaggtcttaacacaccctatccaggtggactaaacactccatacccaggtggaatgacgccaggactgatgacacctggcacaggtgagctggacatgaggaagattggccaagcgaggaacactctgatggacatgaggctgagccaggtgtctgactccgtgagtggacagaccgtcgttgaccccaaaggctacctgacggatttaaattccatgatcccgacacacggaggagacatcaatgatatcaagaaggcgcgactgctcctcaagtctgttcgggagacgaaccctcatcacccgccagcctggattgcatcagcccgcctggaagaagtcactgggaagctacaagtagctcggaaccttatcatgaaggggacggagatgtgccccaagagtgaagatgtctggctggaagcagccaggttgcagcctggggacacagccaaggccgtggtagcccaagctgtccgtcatctcccacagtctgtcaggatttacatcagagccgcagagctggaaacggacattcgtgcaaagaagcgggttcttcggaaagccctcgagcatgttccaaactcggttcgcttgtggaaagcagccgttgagctggaagaacctgaagatgctagaatcatgctgagccgagctgtggagtgctgccccaccagcgtggagctctggcttgctctggcaaggctggagacctatgaaaatgcccgcaaggtcttgaacaaggcgcgggagaacattcctacagaccgacatatctggatcacggctgctaagctggaggaagccaatgggaacacgcagatggtggagaagatcatcgaccgagccatcacctcgctgcgggccaacggtgtggagatcaaccgtgagcagtggatccaggatgccgaggaatgtgacagggctgggagtgtggccacctgccaggccgtcatgcgtgccgtgattgggattgggattgaggaggaagatcggaagcatacctggatggaggatgctgacagttgtgtagcccacaatgccctggagtgtgcacgagccatctacgcctacgccctgcaggtgttccccagcaagaagagtgtgtggctgcgcgccgcgtacttcgagaagaaccatggcactcgggagtccctggaagcactcctgcagagggctgtggcccactgccccaaagcagaggtgctgtggctcatgggcgccaagtccaagtggctggcaggggatgtgcctgcagcaaggagcatcctggccctggccttccaggccaaccccaacagtgaggagatctggctggcagccgtgaagctggagtccgagaatgatgagtacgagcgggcccggaggctgctggccaaggcgcggagcagtgcccccaccgcccgggtgttcatgaagtctgtgaagctggagtgggtgcaagacaacatcagggcagcccaagatctgtgcgaggaggccctgcggcactatgaggacttccccaagctgtggatgatgaaggggcagatcgaggagcagaaggagatgatggagaaggcgcgggaagcctataaccaggggttgaagaagtgtccccactccacacccctgtggcttttgctctctcggctggaggagaagattgggcagcttactcgagcacgggccattttggaaaagtctcgtctgaagaacccaaagaaccctgggctgtggttggagtccgtgcggctggagtaccgtgcggggctgaagaacatcgcaaatacactcatggccaaggcgctgcaggagtgccccaactccggtatcctgtggtctgaggccatcttcctcgaggcaaggccccagaggaggaccaagagcgtggatgccctgaagaagtgtgagcatgacccccatgtgctcctggccgtggccaagctgttttggagtcagcggaagatcaccaaggccagggagtggttccaccgcactgtgaagattgactcggacctgggggatgcctgggccttcttctacaagtttgagctgcagcatggcactgaggaagaagatcggggacatccttaggctggtggccggccgcatcaagaacaccttctgattgagcggttgccatggccggtctccgtggggcagggttgggccgcatgtggaagggctctgagctgtgtcctccttcattaaaagtttttatgtctcgtgtcagaa

SEQ ID NO: 440175 - DNA, 2608 bp, Homo sapiens
  misc_feature (2526)..(2526): n is a, c, g, or t
  misc_feature (2529)..(2529): n is a, c, g, or t
  misc_feature (2539)..(2539): n is a, c, g, or t
agggaatcaaaagtgggcggggcgtgtgcggactgagcgctctgcttccggggcgcgggtgacgcgacgacggcgacactttgctacggagtgcatcggacgtcgaagcctagagtctctgcgtctttccctcttccgctgcctcattcctttccttcctagccttggtcgtcgccgccaccatgaacaagaagaagaaaccgttcctagggatgcccgcgcccctcggctacgtgccggggctgggccggggcgccactggcttcaccacgcggtcagacattgggcccgcccgtgatgcaaatgaccctgtggatgatcgccatgcacccccaggcaagagaaccgttggggaccagatgaagaaaaatcaggctgctgacgatgacgacgaggatctaaatgacaccaattacgatgagtttaatggctatgctgggagcctcttctcaagtggaccctacgagaaagatgatgaggaagcagatgctatctatgcagccctggataaaaggatggatgaaagaagaaaagaaagacgggagcaaagggagaaagaagaaatagagaaatatcgtatggaacgccccaaaatccaacagcagttctcagacctcaagaggaagttggcagaagtcacagaagaagagtggctgagcatccccgaggttggcgatgccagaaataaacgtcagcggaacccacgctatgagaagctgacccctgttcctgacagtttctttgccaaacatttacagaccggagagaaccatacctcagtggatccccgacaaactcaatttggaggtcttaacacaccctatccaggtggactaaacactccatacccaggtggaatgacgccaggactgatgacacctggcacaggtgagctggacatgaggaagattggccaagcgaggaacactctgatggacatgaggctgagccaggtgtctgactccgtgagtggacagaccgtcgttgaccccaaaggctacctgacggatttaaattccatgatcccgacacacggaggagacatcaatgatatcaagaaggcgcgactgctcctcaagtctgttcgggagacgaaccctcatcacccgccagcctggattgcatcagcccgcctggaagaagtcactgggaagctacaagtagctcggaaccttatcatgaaggggacggagatgtgccccaagagtgaagatgtctggctggaagcagccaggttgcagcctggggacacagccaaggccgtggtagcccaagctgtccgtcatctcccacagtctgtcaggatttacatcagagccgcagagctggaaacggacattcgtgcaaagaagcgggttcttcggaaagccctcgagcatgttccaaactcggttcgcttgtggaaagcagccgttgagctggaagaacctgaagatgctagaatcatgctgagccgagctgtggagtgctgccccaccagcgtggagctctggcttgctctggcaaggctggagacctatgaaaatgcccgcaaggtcttgaacaaggcgcgggagaacattcctacagaccgacatatctggatcacggctgctaagctggaggaagccaatgggaacacgcagatggtggagaagatcatcgaccgagccatcacctcgctgcgggccaacggtgtggagatcaaccgtgagcagtggatccaggatgccgaggaatgtgacagggctgggagtgtggccacctgccaggccgtcatgcgtgccgtgattgggattgggattgaggaggaagatcggaagcatacctggatggaggatgctgacagttgtgtagcccacaatgccctggagtgtgcacgagccatctacgcctacgccctgcaggtgttccccagcaagaagagtgtgtggctgcgcgccgcgtacttcgagaagaaccatggcactcgggagtccctggaagcactcctgcagagggctgtggcccactgccccaaagcagaggtgctgtggctcatgggcgccaagtccaagtggctggcaggggatgtgcctgcagcaaggagcatcctggccctggccttccaggccaaccccaacagtgaggagatctggctggcagccgtgaagctggagtccgagaatgatgagtacgagcgggcccggaggctgctggccaaggcgcggagcagtgcccccaccgcccgggtgttcatgaagtctgtgaagctggagtgggtgcaagacaacatcagggcagcccaagatctgtgcgaggaggccctgcggcactatgaggacttccccaagctgtggatgatgaaggggcagatcgaggagcagaaggagatgatggagaaggcgcgggaagcctataaccaggggttgaagaagtgtccccactccacacccctgtggcttttgctctctcggctggaggagaagattgggcagcttactcgagcacgggccattttggaaaagtctcgtctgaagaacccaaagaaccctgggctgtgagccncgnggaggaacanggcgggacaagaacaaccgcaaaaacactggcagaggcgcgagtcccacaacagacacggggcgggaca

SEQ ID NO: 440176 - DNA, 1818 bp, Homo sapiens
ctaccacaagatgctccgtttgtccttgtttgtgtctgccccagacctgaaggaagccacataaagggcagccctcgagcatgttccaaactcggttcgcttgtggaaagcagccgttgagctggaagaacctgaagatgctagaatcatgctgagccgagctgtggagtgctgccccaccagcgtggagctctggcttgctctggcaaggctggagacctatgaaaatgcccgcaaggtcttgaacaaggcgcgggagaacattcctacagaccgacatatctggatcacggctgctaagctggaggaagccaatgggaacacgcagatggtggagaagatcatcgaccgagccatcacctcgctgcgggccaacggtgtggagatcaaccgtgagcagtggatccaggatgccgaggaatgtgacagggctgggagtgtggccacctgccaggccgtcatgcgtgccgtgattgggattgggattgaggaggaagatcggaagcatacctggatggaggatgctgacagttgtgtagcccacaatgccctggagtgtgcacgagccatctacgcctacgccctgcaggtgttccccagcaagaagagtgtgtggctgcgcgccgcgtacttcgagaagaaccatggcactcgggagtccctggaagcactcctgcagagggctgtggcccactgccccaaagcagaggtgctgtggctcatgggcgccaagtccaagtggctggcaggggatgtgcctgcagcaaggagcatcctggccctggccttccaggccaaccccaacagtgaggagatctggctggcagccgtgaagctggagtccgagaatgatgagtacgagcgggcccggaggctgctggccaaggcgcggagcagtgcccccaccgcccgggtgttcatgaagtctgtgaagctggagtgggtgcaagacaacatcagggcagcccaagatctgtgcgaggaggccctgcggcactatgaggacttccccaagctgtggatgatgaaggggcagatcgaggagcagaaggagatgatggagaaggcgcgggaagcctataaccaggggttgaagaagtgtccccactccacacccctgtggcttttgctctctcggctggaggagaagattgggcagcttactcgagcacgggccattttggaaaagtctcgtctgaagaacccaaagaaccctgggctgtggttggagtccgtgcggctggagtaccgtgcggggctgaagaacatcgcaaatacactcatggccaaggcgctgcaggagtgccccaactccggtatcctgtggtctgaggccatcttcctcgaggcaaggccccagaggaggaccaagagcgtggatgccctgaagaagtgtgagcatgacccccatgtgctcctggccgtggccaagctgttttggagtcagcggaagatcaccaaggccagggagtggttccaccgcactgtgaagattgactcggacctgggggatgcctgggccttcttctacaagtttgagctgcagcatggcactgaggagcagcaggaggaggtgaggaagcgctgtgagagtgcagagcctcggcatggggagctgtggtgcgccgtgtccaaggacatcgccaactggcagaagaagatcggggacatccttaggctggtggccggccgcatcaagaacaccttctgattgagcggttgccatggccggtctccgtggggcagggttgggccgcatgtggaagggctctgagctgtgtcctccttcattaaaagtttttatgtctcgtgtcagaa

SEQ ID NO: 440177 - DNA, 821 bp, Homo sapiens
agggaatcaaaagtgggcggggcgtgtgcggactgagcgctctgcttccggggcgcgggtgacgcgacgacggcgacactttgctacggagtgcatcggacgtcgaagcctagagtctctgcgtctttccctcttccgctgcctcattcctttccttcctagccttggtcgtcgccgccaccatgaacaagaagaagaaaccgttcctagggatgcccgcgcccctcggctacgtgccggggctgggccggggcgccactggcttcaccacgcggtcagacattgggcccgcccgtgatgcaaatgaccctgtggatgatcgccatgcacccccaggcaagagaaccgttggggaccagatgaagaaaaatcaggctgctgacgatgacgacgaggatctaaatgacaccaattacgatgagtttaatggctatgctgggagcctcttctcaagtggaccctacgagaaagatgatgaggaagcagatgctatctatgcagccctggataaaaggatggatgaaagaagaaaagaaagacgggagcaaagggagaaagaagaaatagagaaatatcgtatggaacgccccaaaatccaacagcagttctcagacctcaagaggaagttggcagaagtcacagaagaagagtggctgagcatccccgaggttggcgatgccagaaataaacgtcagcggaacccacgctatgagaagctgacccctgttcctgacagtttctttgccaaacatttacagaccggagagaaccatacctcagtggatccccgacaaactgtgagcttccaaaaaagggcacat

SEQ ID NO: 440178 - DNA, 318 bp, Homo sapiens
gtgtcaggggtaggttgggggagtggggctggtcagggctggaagtgtgtgtctgcaggagcagcaggaggaggtgaggaagcgctgtgagagtgcagagcctcggcatggggagctgtggtgcgccgtgtccaaggacatcgccaactggcagaagaagatcggggacatccttaggctggtggccggccgcatcaagaacaccttctgattgagcggttgccatggccggtctccgtggggcagggttgggccgcatgtggaagggctctgagctgtgtcctccttcattaaaagtttttatgtctcgtgtcagaa

SEQ ID NO: 440179 - DNA, 807 bp, Homo sapiens
  misc_feature (17)..(17): n is a, c, g, or t
aaaaaaaataggctagnagagccggtgttaatcctacggagtgcatcggacgtcgaagcctagagtctctgcgtctttccctcttccgctgcctcattcctttccttcctagccttggtcgtcgccgccaccatgaacaagaagaagaaaccgttcctagggatgcccgcgcccctcggctacgtgccggggctgggccgggggaagcaacgggctttggggtcaggacatacctgtgtgtgcaccctgcttgccgcctagatgtgacacattgactctcagcccagtgttttggtctgtaagatgggtaatgctgtatacggtctgcagtgaggagtagaggaatctgacgtgtagtggaaacacgcgaccaccttcctcaggtcgggctgacactccccccccccgcccgcccgcccgccccgccttaagcgtgcctgggtcctctatgcctgcaacacagatgaccaccgtgcgttgctggataagtgagcagtcgttattatcctatttggctattcatttgatgaggaacactactgggtttttcttggtggtggtattatattggaatctgtggggcacacacaagctcactaaggagggtttgctattaccataaataagtacgtaaagaggaccagatttagaacccagtgcttaatggagagtagcattggagccaagtttagtaagagagctggacttagggctgtagaaacggtgacgatagaagagaaactgacattctgcgtgtgggagttcaaaaaaagtgaggcaaggaggaagcccagggaacaggaggga

SEQ ID NO: 440180 - DNA, 540 bp, Homo sapiens
gagccatcacctcgctgcgggccaacggtgtggagatcaaccgtgagcagtggatccaggtgggccgcaggcgggtgtcgtggtgtctgctttaacagtgcacatgcagcacgtgagagtcccacgcaggactgggggttgctggatggtactggggagtcctgtgccaaaccagaagcaggcacaggtgtgaatgggccctgagggacctgggcatgcccactgtcgctcttgatggattcaggcctggagttcgtcttggggtgaacacattcagaagcccttttcagtcgttgtgcacacctgactgcatttctttgctagtagcaaatgatacacctacgagaggaggacaggaagtctcatggcttctttctttgctagtagaaatgatacacctacgagaggaggacaggaagtctcacggcttctttctttgctagtagaaatgatacacctacgagaggaggacaggaagtctcacggcttctttctttgctagtagaaatgatacacctacgagaggaggaccggaagtct

SEQ ID NO: 440181 - DNA, 2995 bp, Homo sapiens
agggaatcaaaagtgggcggggcgtgtgcggactgagcgctctgcttccggggcgcgggtgacgcgacgacggcgacactttgctacggagtgcatcggacgtcgaagcctagagtctctgcgtctttccctcttccgctgcctcattcctttccttcctagccttggtcgtcgccgccaccatgaacaagaagaagaaaccgttcctagggatgcccgcgcccctcggctacgtgccggggctgggccggggcgccactggcttcaccacgcggtcagacattgggcccgcccgtgatgcaaatgaccctgtggatgatcgccatgcacccccaggcaagagaaccgttggggaccagatgaagaaaaatcaggctgctgacgatgacgacgaggatctaaatgacaccaattacgatgagtttaatggctatgctgggagcctcttctcaagtggaccctacgagaaagatgatgaggaagcagatgctatctatgcagccctggataaaaggatggatgaaagaagaaaagaaagacgggagcaaagggagaaagaagaaatagagaaatatcgtatggaacgccccaaaatccaacagcagttctcagacctcaagaggaagttggcagaagtcacagaagaagagtggctgagcatccccgaggttggcgatgccagaaataaacgtcagcggaacccacgctatgagaagctgacccctgttcctgacagtttctttgccaaacatttacagaccggagagaaccatacctcagtggatccccgacaaactcaatttggaggtcttaacacaccctatccaggtggactaaacactccatacccaggtggaatgacgccaggactgatgacacctggcacaggtgagctggacatgaggaagattggccaagcgaggaacactctgatggacatgaggctgagccaggtgtctgactccgtgagtggacagaccgtcgttgaccccaaaggctacctgacggatttaaattccatgatcccgacacacggaggagacatcaatgatatcaagaaggcgcgactgctcctcaagtctgttcgggagacgaaccctcatcacccgccagcctggattgcatcagcccgcctggaagaagtcactgggaagctacaagtagctcggaaccttatcatgaaggggacggagatgtgccccaagagtgaagatgtctggctggaagcagccaggttgcagcctggggacacagccaaggccgtggtagcccaagctgtccgtcatctcccacagtctgtcaggatttacatcagagccgcagagctggaaacggacattcgtgcaaagaagcgggttcttcggaaagccctcgagcatgttccaaactcggttcgcttgtggaaagcagccgttgagctggaagaacctgaagatgctagaatcatgctgagccgagctgtggagtgctgccccaccagcgtggagctctggcttgctctggcaaggctggagacctatgaaaatgcccgcaaggtcttgaacaaggcgcgggagaacattcctacagaccgacatatctggatcacggctgctaagctggaggaagccaatgggaacacgcagatggtggagaagatcatcgaccgagccatcacctcgctgcgggccaacggtgtggagatcaaccgtgagcagtggatccaggatgccgaggaatgtgacagggctgggagtgtggccacctgccaggccgtcatgcgtgccgtgattgggattgggattgaggaggaagatcggaagcatacctggatggaggatgctgacagttgtgtagcccacaatgccctggagtgtgcacgagccatctacgcctacgccctgcaggtgttccccagcaagaagagtgtgtggctgcgcgccgcgtacttcgagaagaaccatggcactcgggagtccctggaagcactcctgcagagggctgtggcccactgccccaaagcagaggtgctgtggctcatgggcgccaagtccaagtggctggcaggggatgtgcctgcagcaaggagcatcctggccctggccttccaggtgttcatgaagtctgtgaagctggagtgggtgcaagacaacatcagggcagcccaagatctgtgcgaggaggccctgcggcactatgaggacttccccaagctgtggatgatgaaggggcagatcgaggagcagaaggagatgatggagaaggcgcgggaagcctataaccaggggttgaagaagtgtccccactccacacccctgtggcttttgctctctcggctggaggagaagattgggcagcttactcgagcacgggccattttggaaaagtctcgtctgaagaacccaaagaaccctgggctgtggttggagtccgtgcggctggagtaccgtgcggggctgaagaacatcgcaaatacactcatggccaaggcgctgcaggagtgccccaactccggtatcctgtggtctgaggccatcttcctcgaggcaaggccccagaggaggaccaagagcgtggatgccctgaagaagtgtgagcatgacccccatgtgctcctggccgtggccaagctgttttggagtcagcggaagatcaccaaggccagggagtggttccaccgcactgtgaagattgactcggacctgggggatgcctgggccttcttctacaagtttgagctgcagcatggcactgaggagcagcaggaggaggtgaggaagcgctgtgagagtgcagagcctcggcatggggagctgtggtgcgccgtgtccaaggacatcgccaactggcagaagaagatcggggacatccttaggctggtggccggccgcatcaagaacaccttctgattgagcggttgccatggccggtctccgtggggcagggttgggccgcatgtggaagggctctgagctgtgtcctccttcattaaaagtttttatgtctcgtgtcagaa

SEQ ID NO: 440182 - DNA, 452 bp, Homo sapiens
agatgctagaatcatgctgagccgagctgtggagtgctgccccaccagcgtggagctctggcttgctctggcaaggctggagacctatgaaaatgcctcgtcgccgccaccatgaacaagaagaagaaaccgttcctagggatgcccgcgcccctcggctacgtgccggggctgggccggggcgccactggcttcaccacgcggtcagacattgggcccgcccgtgatgcaaatgaccctgtggatgatcgccatgcacccccaggcaagagaaccgttggggaccagatgaagaaaaatcaggctgctgacgatgacgacgaggatctaaatgacaccaattacgatgagtttaatggctatgctgggagcctcttctcaagtggaccctacgagaaagatgatgaggaagcagatgctatctatgcagccctggataaaaggatggatga

SEQ ID NO: 440183 - DNA, 3115 bp, Homo sapiens
agggaatcaaaagtgggcggggcgtgtgcggactgagcgctctgcttccggggcgcgggtgacgcgacgacggcgacactttgctacggagtgcatcggacgtcgaagcctagagtctctgcgtctttccctcttccgctgcctcattcctttccttcctagccttggtcgtcgccgccaccatgaacaagaagaagaaaccgttcctagggatgcccgcgcccctcggctacgtgccggggctgggccggggcgccactggcttcaccacgcggtcagacattgggcccgcccgtgatgcaaatgaccctgtggatgatcgccatgcacccccaggcaagagaaccgttggggaccagatgaagaaaaatcaggctgctgacgatgacgacgaggatctaaatgacaccaattacgatgagtttaatggctatgctgggagcctcttctcaagtggaccctacgagaaagatgatgaggaagcagatgctatctatgcagccctggataaaaggatggatgaaagaagaaaagaaagacgggagcaaagggagaaagaagaaatagagaaatatcgtatggaacgccccaaaatccaacagcagttctcagacctcaagaggaagttggcagaagtcacagaagaagagtggctgagcatccccgaggttggcgatgccagaaataaacgtcagcggaacccacgctatgagaagctgacccctgttcctgacagtttctttgccaaacatttacagaccggagagaaccatacctcagtggatccccgacaaactcaatttggaggtcttaacacaccctatccaggtggactaaacactccatacccaggtggaatgacgccaggactgatgacacctggcacaggtgagctggacatgaggaagattggccaagcgaggaacactctgatggacatgaggctgagccaggtgtctgactccgtgagtggacagaccgtcgttgaccccaaaggctacctgacggatttaaattccatgatcccgacacacggaggagacatcaatgatatcaagaaggcgcgactgctcctcaagtctgttcgggagacgaaccctcatcacccgccagcctggattgcatcagcccgcctggaagaagtcactgggaagctacaagtagctcggaaccttatcatgaaggggacggagatgtgccccaagagtgaagatgtctggctggaagcagccaggttgcagcctggggacacagccaaggccgtggtagcccaagctgtccgtcatctcccacagtctgtcaggatttacatcagagccgcagagctggaaacggacattcgtgcaaagaagcgggttcttcggaaagccctcgagcatgttccaaactcggttcgcttgtggaaagcagccgttgagctggaagaacctgaagatgctagaatcatgctgagccgagctgtggagtgctgccccaccagcgtggagctctggcttgctctggcaaggctggagacctatgaaaatgcccgcaaggtcttgaacaaggcgcgggagaacattcctacagaccgacatatctggatcacggctgctaagctggaggaagccaatgggaacacgcagatggtggagaagatcatcgaccgagccatcacctcgctgcgggccaacggtgtggagatcaaccgtgagcagtggatccaggatgccgaggaatgtgacagggctgggagtgtggccacctgccaggccgtcatgcgtgccgtgattgggattgggattgaggaggaagatcggaagcatacctggatggaggatgctgacagttgtgtagcccacaatgccctggagtgtgcacgagccatctacgcctacgccctgcaggtgttccccagcaagaagagtgtgtggctgcgcgccgcgtacttcgagaagaaccatggcactcgggagtccctggaagcactcctgcagagggctgtggcccactgccccaaagcagaggtgctgtggctcatgggcgccaagtccaagtggctggcaggggatgtgcctgcagcaaggagcatcctggccctggccttccaggccaaccccaacagtgaggagatctggctggcagccgtgaagctggagtccgagaatgatgagtacgagcgggcccggaggctgctggccaaggcgcggagcagtgcccccaccgcccgggtgttcatgaagtctgtgaagctggagtgggtgcaagacaacatcagggcagcccaagatctgtgcgaggaggccctgcggcactatgaggacttccccaagctgtggatgatgaaggggcagatcgaggagcagaaggagatgatggagaaggcgcgggaagcctataaccaggggttgaagaagtgtccccactccacacccctgtggcttttgctctctcggctggaggagaagattgggcagcttactcgagcacgggccattttggaaaagtctcgtctgaagaacccaaagaaccctgggctgtggttggagtccgtgcggctggagtaccgtgcggggctgaagaacatcgcaaatacactcatggccaaggcgctgcaggagtgccccaactccggtatcctgtggtctgaggccatcttcctcgaggcaaggccccagaggaggaccaagagcgtggatgccctgaagaagtgtgagcatgacccccatgtgctcctggccgtggccaagctgttttggagtcagcggaagatcaccaaggccagggagtggttccaccgcactgtgaagattgactcggacctgggggatgcctgggccttcttctacaagtttgagctgcagcatggcactgaggagcagcaggaggaggtgaggaagcgctgtgagagtgcagagcctcggcatggggagctgtggtgcgccgtgtccaaggacatcgccaactggcagaagaagatcggggacatccttaggctggtggccggccgcatcaagaacaccttctgattgagcggttgccatggccggtctccgtggggcagggttgggccgcatgtggaagggctctgagctgtgtcctccttcattaaaagtttttatgtctcgtgtcagaa

SEQ ID NO: 440184 - DNA, 3141 bp, Homo sapiens
agggaatcaaaagtgggcggggcgtgtgcggactgagcgctctgcttccggggcgcgggtgacgcgacgacggcgacactttgctacggagtgcatcggacgtcgaagcctagagtctctgcgtctttccctcttccgctgcctcattcctttccttcctagccttggtcgtcgccgccaccatgaacaagaagaagaaaccgttcctagggatgcccgcgcccctcggctacgtgccggggctgggccggggcgccactggcttcaccacgcggtcagacattgggcccgcccgtgatgcaaatgaccctgtggatgatcgccatgcacccccaggcaagagaaccgttggggaccagatgaagaaaaatcaggctgctgacgatgacgacgaggatctaaatgacaccaattacgatgagtttaatggctatgctgggagcctcttctcaagtggaccctacgagaaagatgatgaggaagcagatgctatctatgcagccctggataaaaggatggatgaaagaagaaaagaaagacgggagcaaagggagaaagaagaaatagagaaatatcgtatggaacgccccaaaatccaacagcagttctcagacctcaagaggaagttggcagaagtcacagaagaagagtggctgagcatccccgaggttggcgatgccagaaataaacgtcagcggaacccacgctatgagaagctgacccctgttcctgacagtttctttgccaaacatttacagaccggagagaaccatacctcagtggatccccgacaaactcaatttggaggtcttaacacaccctatccaggtggactaaacactccatacccaggtggaatgacgccaggactgatgacacctggcacaggtgagctggacatgaggaagattggccaagcgaggaacactctgatggacatgaggctgagccaggtgtctgactccgtgagtggacagaccgtcgttgaccccaaaggctacctgacggatttaaattccatgatcccgacacacggaggagacatcaatgatatcaagaaggcgcgactgctcctcaagtctgttcgggagacgaaccctcatcacccgccagcctggattgcatcagcccgcctggaagaagtcactgggaagctacaagtagctcggaaccttatcatgaaggggacggagatgtgccccaagagtgaagatgtctggctggaagcagccaggttgcagcctggggacacagccaaggccgtggtagcccaagctgtccgtcatctcccacagtctgtcaggatttacatcagagccgcagagctggaaacggacattcgtgcaaagaagcgggttcttcggaaagccctcgagcatgttccaaactcggttcgcttgtggaaagcagccgttgagctggaagaacctgaagatgctagaatcatgctgagccgagctgtggagtgctgccccaccagcgtggagctctggcttgctctggcaaggctggagacctatgaaaatgcccgcaaggtcttgaacaaggcgcgggagaacattcctacagaccgacatatctggatcacggctgctaagctggaggaagccaatgggaacacgcagatggtggagaagatcatcgaccgagccatcacctcgctgcgggccaacggtgtggagatcaaccgtgagcagtggatccaggatgccgaggaatgtgacagggctgggagtgtggccacctgccaggccgtcatgcgtgccgtgattgggattgggattgaggaggaagatcggaagcatacctggatggaggatgctgacagttgtgtagcccacaatgccctggagtgtgcacgagccatctacgcctacgccctgcaggtgttccccagcaagaagagtgtgtggctgcgcgccgcgtacttcgagaagaaccatggcactcgggagtccctggaagcactcctgcagagggctgtggcccactgccccaaagcagaggtgctgtggctcatgggcgccaagtccaagtggctggcaggggatgtgcctgcagcaaggagcatcctggccctggccttccaggccaaccccaacagtgaggagatctggctggcagccgtgaagctggagtccgagaatgatgagtacgagcgggcccggaggctgctggccaaggcgcggagcagtgcccccaccgcccgggtgttcatgaagtctgtgaagctggagtgggtgcaagacaacatcagggcagcccaagatctgtgcgaggaggccctgcggcactatgaggacttccccaagctgtggatgatgaaggggcagatcgaggagcagaaggagatgatggagaaggcgcgggaagcctataaccaggggttgaagaagtgtccccactccacacccctgtggcttttgctctctcggctggaggagaagattgggcagcttactcgagcacgggccattttggaaaagtctcgtctgaagaacccaaagaaccctgggctgtggttggagtccgtgcggctggagtaccgtgcggggctgaagaacatcgcaaatacactcatggccaaggcgctgcaggagtgccccaactccggtatcctgtggtctgaggccatcttcctcgaggcaaggccccagaggaggaccaagagcgtggatgccctgaagaagtgtgagcatgacccccatgtgctcctggccgtggccaagctgttttggagtcagcggaagatcaccaaggccagggagtggttccaccgcactgtgaagattgactcggacctgggggatgcctgggccttcttctacaagtttgagctgcagcatggcactgaggagcagcaggaggaggtgaggaagcgctgtgagagtgcagagcctcggcatggggagctgtggtgcgccgtgtccaaggacatcgccaactggcagaagaagatcggggacatccttaggctggtggccggccgcatcaagaacaccttctgattgagcggttgccatggccggtctccgtggggcagggttgggccgcatgtggaagggctctgagctgtgtcctccttcattaaaagtttttatgtctcgtgtcagaaaaaaataatcaaaaacgacaaaacag

SEQ ID NO: 440185 - DNA, 2988 bp, Homo sapiens
agggaatcaaaagtgggcggggcgtgtgcggactgagcgctctgcttccggggcgcgggtgacgcgacgacggcgacactttgctacggagtgcatcggacgtcgaagcctagagtctctgcgtctttccctcttccgctgcctcattcctttccttcctagccttggtcgtcgccgccaccatgaacaagaagaagaaaccgttcctagggatgcccgcgcccctcggctacgtgccggggctgggccggggcgccactggcttcaccacgcggtcagacattgggcccgcccgtgatgcaaatgaccctgtggatgatcgccatgcacccccaggcaagagaaccgttggggaccagatgaagaaaaatcaggctgctgacgatgacgacgaggatctaaatgacaccaattacgatgagtttaatggctatgctgggagcctcttctcaagtggaccctacgagaaagatgatgaggaagcagatgctatctatgcagccctggataaaaggatggatgaaagaagaaaagaaagacgggagcaaagggagaaagaagaaatagagaaatatcgtatggaacgccccaaaatccaacagcagttctcagacctcaagaggaagttggcagaagtcacagaagaagagtggctgagcatccccgaggttggcgatgccagaaataaacgtcagcggaacccacgctatgagaagctgacccctgttcctgacagtttctttgccaaacatttacagaccggagagaaccatacctcagtggatccccgacaaactcaatttggaggtcttaacacaccctatccaggtggactaaacactccatacccaggtggaatgacgccaggactgatgacacctggcacaggtgagctggacatgaggaagattggccaagcgaggaacactctgatggacatgaggctgagccaggtgtctgactccgtgagtggacagaccgtcgttgaccccaaaggctacctgacggatttaaattccatgatcccgacacacggaggagacatcaatgatatcaagaaggcgcgactgctcctcaagtctgttcgggagacgaaccctcatcacccgccagcctggattgcatcagcccgcctggaagaagtcactgggaagctacaagtagctcggaaccttatcatgaaggggacggagatgtgccccaagagtgaagatgtctggctggaagcagccaggttgcagcctggggacacagccaaggccgtggtagcccaagctgtccgtcatctcccacagtctgtcaggatttacatcagagccgcagagctggaaacggacattcgtgcaaagaagcgggttcttcggaaagccctcgagcatgttccaaactcggttcgcttgtggaaagcagccgttgagctggaagaacctgaagatgctagaatcatgctgagccgagctgtggagtgctgccccaccagcgtggagctctggcttgctctggcaaggctggagacctatgaaaatgcccgcaaggtcttgaacaaggcgcgggagaacattcctacagaccgacatatctggatcacggctgctaagctggaggaagccaatgggaacacgcagatggtggagaagatcatcgaccgagccatcacctcgctgcgggccaacggtgtggagatcaaccgtgagcagtggatccaggatgccgaggaatgtgacagggctgggagtgtggccacctgccaggccgtcatgcgtgccgtgattgggattgggattgaggaggaagatcggaagcatacctggatggaggatgctgacagttgtgtagcccacaatgccctggagtgtgcacgagccatctacgcctacgccctgcaggtgttccccagcaagaagagtgtgtggctgcgcgccgcgtacttcgagaagaaccatggcactcgggagtccctggaagcactcctgcagagggctgtggcccactgccccaaagcagaggtgctgtggctcatgggcgccaagtccaagtggctggcaggggatgtgcctgcagcaaggagcatcctggccctggccttccaggccaaccccaacagtgaggagatctggctggcagccgtgaagctggagtccgagaatgatgagtacgagcgggcccggaggctgctggccaaggcgcggagcagtgcccccaccgcccgggtgttcatgaagtctgtgaagctggagtgggtgcaagacaacatcagggcagcccaagatctgtgcgaggaggccctgcggcactatgaggacttccccaagctgtggatgatgaaggggcagatcgaggagcagaaggagatgatggagaaggcgcgggaagcctataaccaggggttgaagaagtgtccccactccacacccctgtggcttttgctctctcggctggaggagaagattgggcagcttactcgagcacgggccattttggaaaagtctcgtctgaagaacccaaagaaccctgggctgtggttggagtccgtgcggctggagtaccgtgcggggctgaagaacatcgcaaatacactcatggccaaggcgctgcaggagtgccccaactccggtatcctgtggtctgaggccatcttcctcgaggcaaggccccagaggaggaccaagagcgtggatgccctgaagaagtgtgagcatgacccccatgtgctcctggccgtggccaagctgttttggagtcagcggaagatcaccaaggccagggagtggttccaccgcactgtgaagattgactcggacctgggggatgcctgggccttcttctacaagtttgagctgcagcatggcactgaggagcagcaggaggaggtgaggaagcgctgtgagagtgcagagcctcggcatggggagctgtggtgcgccgtgtccaaggacatcgccaactggcacatcttcgagggatcctctagaacaccgcagagatggg

SEQ ID NO: 440186 - DNA, 2777 bp, Homo sapiens
  misc_feature (17)..(17): n is a, c, g, or t
aaaaaaaataggctagnagagccggtgttaatcctacggagtgcatcggacgtcgaagcctagagtctctgcgtctttccctcttccgctgcctcattcctttccttcctagccttggtcgtcgccgccaccatgaacaagaagaagaaaccgttcctagggatgcccgcgcccctcggctacgtgccggggctgggccggggggagcaaagggagaaagaagaaatagagaaatatcgtatggaacgccccaaaatccaacagcagttctcagacctcaagaggaagttggcagaagtcacagaagaagagtggctgagcatccccgaggttggcgatgccagaaataaacgtcagcggaacccacgctatgagaagctgacccctgttcctgacagtttctttgccaaacatttacagaccggagagaaccatacctcagtggatccccgacaaactcaatttggaggtcttaacacaccctatccaggtggactaaacactccatacccaggtggaatgacgccaggactgatgacacctggcacaggtgagctggacatgaggaagattggccaagcgaggaacactctgatggacatgaggctgagccaggtgtctgactccgtgagtggacagaccgtcgttgaccccaaaggctacctgacggatttaaattccatgatcccgacacacggaggagacatcaatgatatcaagaaggcgcgactgctcctcaagtctgttcgggagacgaaccctcatcacccgccagcctggattgcatcagcccgcctggaagaagtcactgggaagctacaagtagctcggaaccttatcatgaaggggacggagatgtgccccaagagtgaagatgtctggctggaagcagccaggttgcagcctggggacacagccaaggccgtggtagcccaagctgtccgtcatctcccacagtctgtcaggatttacatcagagccgcagagctggaaacggacattcgtgcaaagaagcgggttcttcggaaagccctcgagcatgttccaaactcggttcgcttgtggaaagcagccgttgagctggaagaacctgaagatgctagaatcatgctgagccgagctgtggagtgctgccccaccagcgtggagctctggcttgctctggcaaggctggagacctatgaaaatgcccgcaaggtcttgaacaaggcgcgggagaacattcctacagaccgacatatctggatcacggctgctaagctggaggaagccaatgggaacacgcagatggtggagaagatcatcgaccgagccatcacctcgctgcgggccaacggtgtggagatcaaccgtgagcagtggatccaggatgccgaggaatgtgacagggctgggagtgtggccacctgccaggccgtcatgcgtgccgtgattgggattgggattgaggaggaagatcggaagcatacctggatggaggatgctgacagttgtgtagcccacaatgccctggagtgtgcacgagccatctacgcctacgccctgcaggtgttccccagcaagaagagtgtgtggctgcgcgccgcgtacttcgagaagaaccatggcactcgggagtccctggaagcactcctgcagagggctgtggcccactgccccaaagcagaggtgctgtggctcatgggcgccaagtccaagtggctggcaggggatgtgcctgcagcaaggagcatcctggccctggccttccaggccaaccccaacagtgaggagatctggctggcagccgtgaagctggagtccgagaatgatgagtacgagcgggcccggaggctgctggccaaggcgcggagcagtgcccccaccgcccgggtgttcatgaagtctgtgaagctggagtgggtgcaagacaacatcagggcagcccaagatctgtgcgaggaggccctgcggcactatgaggacttccccaagctgtggatgatgaaggggcagatcgaggagcagaaggagatgatggagaaggcgcgggaagcctataaccaggggttgaagaagtgtccccactccacacccctgtggcttttgctctctcggctggaggagaagattgggcagcttactcgagcacgggccattttggaaaagtctcgtctgaagaacccaaagaaccctgggctgtggttggagtccgtgcggctggagtaccgtgcggggctgaagaacatcgcaaatacactcatggccaaggcgctgcaggagtgccccaactccggtatcctgtggtctgaggccatcttcctcgaggcaaggccccagaggaggaccaagagcgtggatgccctgaagaagtgtgagcatgacccccatgtgctcctggccgtggccaagctgttttggagtcagcggaagatcaccaaggccagggagtggttccaccgcactgtgaagattgactcggacctgggggatgcctgggccttcttctacaagtttgagctgcagcatggcactgaggagcagcaggaggaggtgaggaagcgctgtgagagtgcagagcctcggcatggggagctgtggtgcgccgtgtccaaggacatcgccaactggcagaagaagatcggggacatccttaggctggtggccggccgcatcaagaacaccttctgattgagcggttgccatggccggtctccgtggggcagggttgggccgcatgtggaagggctctgagctgtgtcctccttcattaaaagtttttatgtctcgtgtcagaa

SEQ ID NO: 440187 - DNA, 2693 bp, Homo sapiens
agggaatcaaaagtgggcggggcgtgtgcggactgagcgctctgcttccggggcgcgggtgacgcgacgacggcgacactttgctacggagtgcatcggacgtcgaagcctagagtctctgcgtctttccctcttccgctgcctcattcctttccttcctagccttggtcgtcgccgccaccatgaacaagaagaagaaaccgttcctagggatgcccgcgcccctcggctacgtgccggggctgggccggggcgccactggcttcaccacgcggtcagacattgggcccgcccgtgatgcaaatgaccctgtggatgatcgccatgcacccccaggcaagagaaccgttggggaccagatgaagaaaaatcaggctgctgacgatgacgacgaggatctaaatgacaccaattacgatgagtttaatggctatgctgggagcctcttctcaagtggaccctacgagaaagatgatgaggaagcagatgctatctatgcagccctggataaaaggatggatgaaagaagaaaagaaagacgggagcaaagggagaaagaagaaatagagaaatatcgtatggaacgccccaaaatccaacagcagttctcagacctcaagaggaagttggcagaagtcacagaagaagagtggctgagcatccccgaggttggcgatgccagaaataaacgtcagcggaacccacgctatgagaagctgacccctgttcctgacagtttctttgccaaacatttacagaccggagagaaccatacctcagtggatccccgacaaactcaatttggaggtcttaacacaccctatccaggtggactaaacactccatacccaggtggaatgacgccaggactgatgacacctggcacaggtgagctggacatgaggaagattggccaagcgaggaacactctgatggacatgaggctgagccaggtgtctgactccgtgagtggacagaccgtcgttgaccccaaaggctacctgacggatttaaattccatgatcccgacacacggaggagacatcaatgatatcaagaaggcgcgactgctcctcaagtctgttcgggagacgaaccctcatcacccgccagcctggattgcatcagcccgcctggaagaagtcactgggaagctacaagtagctcggaaccttatcatgaaggggacggagatgtgccccaagagtgaagatgtctggctggaagcagccaggttgcagcctggggacacagccaaggccgtggtagcccaagctgtccgtcatctcccacagtctgtcaggatttacatcagagccgcagagctggaaacggacattcgtgcaaagaagcgggttcttcggaaagccctcgagcatgttccaaactcggttcgcttgtggaaagcagccgttgagctggaagaacctgaagatgctagaatcatgctgagccgagctgtggagtgctgccccaccagcgtggagctctggcttgctctggcaaggctggagacctatgaaaatgcccgcaaggtcttgaacaaggcgcgggagaacattcctacagaccgacatatctggatcacggctgctaagctggaggaagccaatgggaacacgcagatggtggagaagatcatcgaccgagccatcacctcgctgcgggccaacggtgtggagatcaaccgtgagcagtggatccaggatgccgaggaatgtgacagggctgggagtgtggccacctgccaggccgtcatgcgtgccgtgattgggattgggattgaggaggaagatcggaagcatacctggatggaggatgctgacagttgtgtagcccacaatgccctggagtgtgcacgagccatctacgcctacgccctgcaggtgttccccagcaagaagagtgtgtggctgcgcgccgcgtacttcgagaagaaccatggcactcgggagtccctggaagcactcctgcagagggctgtggcccactgccccaaagcagaggtgctgtggctcatgggcgccaagtccaagtggctggcaggggatgtgcctgcagcaaggagcatcctggccctggccttccaggccaaccccaacagtgaggagatctggctggcagccgtgaagctggagtccgagaatgatgagtacgagcgggcccggaggctgctggccaaggcgcggagcagtgcccccaccgcccgggtgttcatgaagtctgtgaagctggagtgggtgcaagacaacatcagggcagcccaagatctgtgcgaggaggccctgcggcactatgaggacttccccaagctgtggatgatgaaggggcagatcgaggagcagaaggagatgatggagaaggcgcgggaagcctataaccaggggttgaagaagtgtccccactccacacccctgtggcttttgctctctcggctggaggagaagattgggcagcttactcgagcacgggccattttggaaaagtctcgtctgaagaacccaaagaaccctgggctgtggttggagtccgtgcggctggagtaccgtgcggggctgaagaacatcgcaaatacactcatggccaaggcgctgcaggagtgccccaactccggtattctgtggtcttaggccatcttccttgagggggggccccggtccccaatttcccctttagtgggttgtttccaatta

SEQ ID NO: 440188 - DNA, 2015 bp, Homo sapiens
tgacttcttccaggcgggctgatgcaatcccgcctggaagaagtcactgggaagctacaagtagctcggaaccttatcatgaaggggacggagatgtgccccaagagtgaagatgtctggctggaagcagccaggttgcagcctggggacacagccaaggccgtggtagcccaagctgtccgtcatctcccacagtctgtcaggatttacatcagagccgcagagctggaaacggacattcgtgcaaagaagcgggttcttcggaaagccctcgagcatgttccaaactcggttcgcttgtggaaagcagccgttgagctggaagaacctgaagatgctagaatcatgctgagccgagctgtggagtgctgccccaccagcgtggagctctggcttgctctggcaaggctggagacctatgaaaatgcccgcaaggtcttgaacaaggcgcgggagaacattcctacagaccgacatatctggatcacggctgctaagctggaggaagccaatgggaacacgcagatggtggagaagatcatcgaccgagccatcacctcgctgcgggccaacggtgtggagatcaaccgtgagcagtggatccaggatgccgaggaatgtgacagggctgggagtgtggccacctgccaggccgtcatgcgtgccgtgattgggattgggattgaggaggaagatcggaagcatacctggatggaggatgctgacagttgtgtagcccacaatgccctggagtgtgcacgagccatctacgcctacgccctgcaggtgttccccagcaagaagagtgtgtggctgcgcgccgcgtacttcgagaagaaccatggcactcgggagtccctggaagcactcctgcagagggctgtggcccactgccccaaagcagaggtgctgtggctcatgggcgccaagtccaagtggctggcaggggatgtgcctgcagcaaggagcatcctggccctggccttccaggccaaccccaacagtgaggagatctggctggcagccgtgaagctggagtccgagaatgatgagtacgagcgggcccggaggctgctggccaaggcgcggagcagtgcccccaccgcccgggtgttcatgaagtctgtgaagctggagtgggtgcaagacaacatcagggcagcccaagatctgtgcgaggaggccctgcggcactatgaggacttccccaagctgtggatgatgaaggggcagatcgaggagcagaaggagatgatggagaaggcgcgggaagcctataaccaggggttgaagaagtgtccccactccacacccctgtggcttttgctctctcggctggaggagaagattgggcagcttactcgagcacgggccattttggaaaagtctcgtctgaagaacccaaagaaccctgggctgtggttggagtccgtgcggctggagtaccgtgcggggctgaagaacatcgcaaatacactcatggccaaggcgctgcaggagtgccccaactccggtatcctgtggtctgaggccatcttcctcgaggcaaggccccagaggaggaccaagagcgtggatgccctgaagaagtgtgagcatgacccccatgtgctcctggccgtggccaagctgttttggagtcagcggaagatcaccaaggccagggagtggttccaccgcactgtgaagattgactcggacctgggggatgcctgggccttcttctacaagtttgagctgcagcatggcactgaggagcagcaggaggaggtgaggaagcgctgtgagagtgcagagcctcggcatggggagctgtggtgcgccgtgtccaaggacatcgccaactggcagaagaagatcggggacatccttaggctggtggccggccgcatcaagaacaccttctgattgagcggttgccatggccggtctccgtggggcagggttgggccgcatgtggaagggctctgagctgtgtcctccttcattaaaagtttttatgtctcgtgtcagaa

SEQ ID NO: 440189 - DNA, 1757 bp, Homo sapiens
agggaatcaaaagtgggcggggcgtgtgcggactgagcgctctgcttccggggcgcgggtgacgcgacgacggcgacactttgctacggagtgcatcggacgtcgaagcctagagtctctgcgtctttccctcttccgctgcctcattcctttccttcctagccttggtcgtcgccgccaccatgaacaagaagaagaaaccgttcctagggatgcccgcgcccctcggctacgtgccggggctgggccggggcgccactggcttcaccacgcggtcagacattgggcccgcccgtgatgcaaatgaccctgtggatgatcgccatgcacccccaggcaagagaaccgttggggaccagatgaagaaaaatcaggctgctgacgatgacgacgaggatctaaatgacaccaattacgatgagtttaatggctatgctgggagcctcttctcaagtggaccctacgagaaagatgatgaggaagcagatgctatctatgcagccctggataaaaggatggatgaaagaagaaaagaaagacgggagcaaagggagaaagaagaaatagagaaatatcgtatggaacgccccaaaatccaacagcagttctcagacctcaagaggaagttggcagaagtcacagaagaagagtggctgagcatccccgaggttggcgatgccagaaataaacgtcagcggaacccacgctatgagaagctgacccctgttcctgacagtttctttgccaaacatttacagaccggagagaaccatacctcagtggatccccgacaaactcaatttggaggtcttaacacaccctatccaggtggactaaacactccatacccaggtggaatgacgccaggactgatgacacctggcacaggtgagctggacatgaggaagattggccaagcgaggaacactctgatggacatgaggctgagccaggtgtctgactccgtgagtggacagaccgtcgttgaccccaaaggctacctgacggatttaaattccatgatcccgacacacggaggagacatcaatgatatcaagaaggcgcgactgctcctcaagtctgttcgggagacgaaccctcatcacccgccagcctggattgcatcagcccgcctggaagaagtcactgggaagctacaagtagctcggaaccttatcatgaaggggacggagatgtgccccaagagtgaagatgtctggctggaagcagccaggttgcagcctggggacacagccaaggccgtggtagcccaagctgtccgtcatctcccacagtctgtcaggatttacatcaagaacaccttctgattgagcggttgccatggccggtctccgtggggcagggttgggccgcatgtggaagggctctgagctgtgtcctccttcattaaaagtttttatgtctcgtgtcagaataaaaaaaaaaaaaaaaaaaaaaaaaaaaataaaataaaaaaaaacttaaaaaataaaaaaatatattaaaaacatctttcaaaattgccaaatacctcctttagattcccttttccacatactcggttttgccaacttctaaccaaaaaaaaaatttcggggggggccaccttaccctaattggcctaaagcgggtgtacctcacaagtagcttttgctccaattcccccctttctggtggggcaaacctttgggttctccctcccttaaaacgcttgtgtgaaaatacccccgttgtctccttggcgtgggcaaaatttc

SEQ ID NO: 440190 - DNA, 750 bp, Homo sapiens
  misc_feature (17)..(17): n is a, c, g, or t
aaaaaaaataggctagnagagccggtgttaatcctacggagtgcatcggacgtcgaagcctagagtctctgcgtctttccctcttccgctgcctcattcctttccttcctagccttggtcgtcgccgccaccatgaacaagaagaagaaaccgttcctagggatgcccgcgcccctcggctacgtgccggggctgggccgggggaagcaacgggctttggggtcaggacatacctgtgtgtgcaccctgcttgccgcctagatgtgacacattgactctcagcccagtgttttggtctgtaagatgggtaatgctgtatacggtctgcagtgaggagtagaggaatctgacgtgtagtggaaacacgcgaccaccttcctcaggtcgggctgacactccccccccccgcccgcccgcccgccccgccttaagcgtgcctgggtcctctatgcctgcaacacagatgaccaccgtgcgttgcgccactggcttcaccacgcggtcagacattgggcccgcccgtgatgcaaatgaccctgtggatgatcgccatgcacccccaggcaagagaaccgttggggaccagatgaagaaaaatcaggctgctgacgatgacgacgaggatctaaatgacaccaattacgatgagtttaatggctatgctgggagcctcttctcaagtggaccctacgagaaagatgatgaggaagcagatgctatctatgcagccctggataaaaggatggatga

SEQ ID NO: 440191 - DNA, 465 bp, Homo sapiens
ccaggagtggagaagagcacaggaacagagttattcagacacccggtgtcttgggggtctcctgcagcgccactggcttcaccacgcggtcagacattgggcccgcccgtgatgcaaatgaccctgtggatgatcgccatgcacccccaggcaagagaaccgttggggaccagatgaagaaaaatcaggctgctgacgatgacgacgaggatctaaatgacaccaattacgatgaggtgagatgtgtccggctttcgtggctcctccagccagtctctgggagcagctgacctaaccagtgtgtgttggtgtctgtaatgaatggcttggagtggctcatgcatttaaattttagctattcatggaacatctttactgagagtgagagggagcaggaaaaacacggagaaatgtgcactttttgtccctcagaagagatgttcttgcaggtgttaggaccactgc

SEQ ID NO: 440192 - DNA, 1299 bp, Homo sapiens
cccagccagaaaagatggagcacacgctggggagaggccttcatctgctgtaaagggcctctccccagccagaaaagatggagcacacgctgggtggtggccccgcttcctcactggaaggagatggtgctcttcttttttctttctgaattgtggccaccttcataccagtctgtcatggaacacttaagccgcttgagtgcctgctggtactcccagccctgccatgcctgagccccctgcacacaaggagccaggagtaatcagggcagaccctttagggcacggggacttctggattgtgaaattggctctctgggggccaaggccttctaacgttggtggaagtggctttggcttattgggtcggattctaggccattcattccaacctttagagacatcccagctttccctagcccagagtctgcagcccctccaccatcccacatcctccccctccctttcctcatgaaccccagtcgcgcctctgccttctcaaacccctccaccatcccacaccctcctcctgcccttcctcatgaaccccagtcgcgcctctgccttctcatccctgcgcaccacacaggctcgctcgtgcccggtgagtgctgaggctgctctgcacgtggagtatggccctgtgggcaagggctgggctcttggaggtaggggagctacaggggcgactgggaggaggatgtcgtgttacacacgcatcagagttaactttgcagtgagagcggccttgctgcggccaaagaacatggaaaagcatgagtggggtgatgtgccttaaagcatcagacacttgggcctcgggcatcaggagccagccacagggatgtctggggaaatggcgttccatgagatgcaagcacacaagaatgcacttggcacatctggggaacagcaggcagctgatatcactgggcccaccccgcaccagggaggatggaagcaggtgaggagctagaccacactgaggcggtggtcgggactcggggtttgctcagtgagccgttcactatgtgcaggggcagttccccgtctgaatttaggtgacgacactcaggtccagccttgccagtctcagcctccggtctccgttccccctctgcagaggccacattgtctgctgcacgtgatcatgaggggttgtgaagtgcttgccccatcagtagccatgtgtgcatgtgtaaataccatcctctgtgtgccctggaggctgtccttcagatagcatgtacaggtggcagcatagggcctgtccctactgagagtgcagggaactcagca

SEQ ID NO: 440193 - DNA, 2718 bp, Homo sapiens
attcagaggaaacgacgacaggaaatggtgacagatagggaacgaggatgaagggaagggagagccagtgacgactggcagtggagtggggagcaccgccacctctcctcctccacttgcccctcctgtggcactggacaagctagtgggcttttcgttgtccatgggcttattcggtggggatgtgaccagctttgaacccgtccccttaaacatgctcctcctgcacggaagagacaggggcaggggagagactctctccccaccacccggctcaggccccagcacagcccggcctctggcctcactggcgtctgtgcccagtgacgcaggcaggtgagctcctggcaaattagcattgcaggctgtgctctctcctcctgctctgctgcagctgggagtgtgcagagactggaggggatgacagtcaccctctgttttctgtggtggctctgttttctgtggtgctggatgcacctctgttttctgtggtggctccaagagagtgcacggtccctgctgattgaaagaaggatgaagggcagaagaggggcggggagctgtgtgccctaagatctcattgcctttttatgccgattaacatgcttttagcccctactgagcttatagttaacagaagtttccaggtctttcttcacctgaactgtgtctaaagcaagttccctccaccttctgtatttatacgcttgatttttaaaacctaaatgttgggcttcacatttgttccttgtaaatttcatcttggtgattgcagtctaccctctggcctttaaaaattgtctgagccttgattcgatcatgaaaccagcttacccttcccctgtgtgctggccccagttttctaaccaggtgttgaatgaactggatggactctgccagatccctccgtgcaaggctggaatcagtccattgttcaactgtgccctttggggctgtggttcatttggctctgatttttcctatatgttctctcctccaacccccatagctccatcttgtctacaagattttgttagaagccgtcaaaatcctgctgactcgagatgcgctgtgctgcatgttctccctgggcacagcaggctactaatcctgttacaaagagaaatgccgtacattgcgagcagtgctggcccctgggactcaccgtgcccttttctaagtgcttacagactctctgtttaataatccattccagaaattttccagggctcattgttgagcttggtgttcgcaactttgagtgatcagcccttctcctttgtgggagcaccaggacagagcagcctttgtccctccccagtctcagttccctcccactgcccctgtggacctcgaatgcagagcttatgcacctaccgaaggtcgtgtcagcacccaaggcagaacgaggctgccctgggaactagggtcaattaaaacagcttgtgctggaggaccctttacagcagatgaaggcctctccccagccagaaaagatggagcacacgctgggtggtggccccgcttcctcactggaaggagatggtgctcttcttttttctttctgaattgtggccaccttcataccagtctgtcatggaacacttaagccgcttgagtgcctgctggtactcccagccctgccatgcctgagccccctgcacacaaggagccaggagtaatcagggcagaccctttagggcacggggacttctggattgtgaaattggctctctgggggccaaggccttctaacgttggtggaagtggctttggcttattgggtcggattctaggccattcattccaacctttagagacatcccagctttccctagcccagagtctgcagcccctccaccatcccacatcctccccctccctttcctcatgaaccccagtcgcgcctctgccttctcaaacccctccaccatcccacaccctcctcctgcccttcctcatgaaccccagtcgcgcctctgccttctcatccctgcgcaccacacaggctcgctcgtgcccggtgagtgctgaggctgctctgcacgtggagtatggccctgtgggcaagggctgggctcttggaggtaggggagctacaggggcgactgggaggaggatgtcgtgttacacacgcatcagagttaactttgcagtgagagcggccttgctgcggccaaagaacatggaaaagcatgagtggggtgatgtgccttaaagcatcagacacttgggcctcgggcatcaggagccagccacagggatgtctggggaaatggcgttccatgagatgcaagcacacaagaatgcacttggcacatctggggaacagcaggcagctgatatcactgggcccaccccgcaccagggaggatggaagcaggtgaggagctagaccacactgaggcggtggtcgggactcggggtttgctcagtgagccgttcactatgtgcaggggcagttccccgtctgaatttaggtgacgacactcaggtccagccttgccagtctcagcctccggtctccgttccccctctgcagaggccacattgtctgctgcacgtgatcatgaggggttgtgaagtgcttgccccatcagtagccatgtgtgcatgtgtaaataccatcctctgtgtgccctggaggctgtccttcagatagcatgtacaggtggcagcatagggcctgtccctactgagagtgcagggaactcagca

SEQ ID NO: 440194 - DNA, 2405 bp, Homo sapiens
acacatcaggccccatcccaggtgctagagacttagcagtgaatgaggctgacttcgcagtctgcaggggagttcagagtcctcttactgtgtggatccagtttaaagggatgtgactgtggctgagactggtgcctggcatggattcgttcatgagtccagggctctgttttctgtggtggctccaagagagtgcacggtccctgctgattgaaagaaggatgaagggcagaagaggggcggggagctgtgtgccctaagatctcattgcctttttatgccgattaacatgcttttagcccctactgagcttatagttaacagaagtttccaggtctttcttcacctgaactgtgtctaaagcaagttccctccaccttctgtatttatacgcttgatttttaaaacctaaatgttgggcttcacatttgttccttgtaaatttcatcttggtgattgcagtctaccctctggcctttaaaaattgtctgagccttgattcgatcatgaaaccagcttacccttcccctgtgtgctggccccagttttctaaccaggtgttgaatgaactggatggactctgccagatccctccgtgcaaggctggaatcagtccattgttcaactgtgccctttggggctgtggttcatttggctctgatttttcctatatgttctctcctccaacccccatagctccatcttgtctacaagattttgttagaagccgtcaaaatcctgctgactcgagatgcgctgtgctgcatgttctccctgggcacagcaggctactaatcctgttacaaagagaaatgccgtacattgcgagcagtgctggcccctgggactcaccgtgcccttttctaagtgcttacagactctctgtttaataatccattccagaaattttccagggctcattgttgagcttggtgttcgcaactttgagtgatcagcccttctcctttgtgggagcaccaggacagagcagcctttgtccctccccagtctcagttccctcccactgcccctgtggacctcgaatgcagagcttatgcacctaccgaaggtcgtgtcagcacccaaggcagaacgaggctgccctgggaactagggtcaattaaaacagcttgtgctggaggaccctttacagcagatgaaggcctctccccagccagaaaagatggagcacacgctgggtggtggccccgcttcctcactggaaggagatggtgctcttcttttttctttctgaattgtggccaccttcataccagtctgtcatggaacacttaagccgcttgagtgcctgctggtactcccagccctgccatgcctgagccccctgcacacaaggagccaggagtaatcagggcagaccctttagggcacggggacttctggattgtgaaattggctctctgggggccaaggccttctaacgttggtggaagtggctttggcttattgggtcggattctaggccattcattccaacctttagagacatcccagctttccctagcccagagtctgcagcccctccaccatcccacatcctccccctccctttcctcatgaaccccagtcgcgcctctgccttctcaaacccctccaccatcccacaccctcctcctgcccttcctcatgaaccccagtcgcgcctctgccttctcatccctgcgcaccacacaggctcgctcgtgcccggtgagtgctgaggctgctctgcacgtggagtatggccctgtgggcaagggctgggctcttggaggtaggggagctacaggggcgactgggaggaggatgtcgtgttacacacgcatcagagttaactttgcagtgagagcggccttgctgcggccaaagaacatggaaaagcatgagtggggtgatgtgccttaaagcatcagacacttgggcctcgggcatcaggagccagccacagggatgtctggggaaatggcgttccatgagatgcaagcacacaagaatgcacttggcacatctggggaacagcaggcagctgatatcactgggcccaccccgcaccagggaggatggaagcaggtgaggagctagaccacactgaggcggtggtcgggactcggggtttgctcagtgagccgttcactatgtgcaggggcagttccccgtctgaatttaggtgacgacactcaggtccagccttgccagtctcagcctccggtctccgttccccctctgcagaggccacattgtctgctgcacgtgatcatgaggggttgtgaagtgcttgccccatcagtagccatgtgtgcatgtgtaaataccatcctctgtgtgccctggaggctgtccttcagatagcatgtacaggtggcagcatagggcctgtccctactgagagtgcagggaactcagca

SEQ ID NO: 440195 - DNA, 500 bp, Homo sapiens
tctgatggtgtccagagtgagctttggcagtctctaagactggagtgtaatggtgcaatcttggctcattgcaacctccgcctcctggattcaagcgactcttctgcttcagcctcctaagtagctgggactacaggtcctgattcagtaggttcaggaggagcctgattctgctcgtccaagctgccagggtctgatttcctttgtgtgagcactccgccactaggggttctttggctggcaagagaaactagagaagttttgcttccaggaggggagagggacttgagtgagaacgccatccaggccatccccaggaaagcttttcggggagctacggaccttaaaaatttttacacatacataaggccgctgcaagtcagtgaacatcgctgagcctcgatatattgttctggaaaatggggatactaagatctacttcacaggcatgttctgaggtttaaatgaaacatggaaataaatatactttgtcaaatgct

SEQ ID NO: 440196 - DNA, 650 bp, Homo sapiens
gggagagtgaatctgattggcccatcttaggtcaagaggtcacaccaggccagtgagctgttggcagggattgtgggatccgctggtgcagcaacactatggtgcccacactatctcaggagctggagtgggacctattcccttagaaggcagtgcctggcattcctgttctctcacttgttgacctcccctttgctttgtagggatctgttactaattcttcccatctggagcaaattatggactttcatgcacaggctgttatgctaaatcagcatgaaaatgggtttgagagagaccaaatgtgctgggtaaggcatggtcaccaagtctgtaggtggtggcgcagcccacatttcagttgattttgtctgtgtggcctccagaagttaaaatcctgttaggggttattctgcacgaatgtttcccctgctgtgaggttagtctgtccatttctttcctatgcaggatctatggctcagagaggtgatttgccttggaccacagagcagcttgacaatagggttggaattagacaccaggccttctaggggccctgaagagcctgaaaatggtcttaaaccttgacctaggaatctcatatttgggcatctgccctaaagaaataataaagcatgagcacagacaag

SEQ ID NO: 440197 - DNA, 454 bp, Homo sapiens
  misc_feature (32)..(32): n is a, c, g, or t
  misc_feature (57)..(57): n is a, c, g, or t
  misc_feature (60)..(60): n is a, c, g, or t
  misc_feature (107)..(107): n is a, c, g, or t
  misc_feature (111)..(111): n is a, c, g, or t
agtggacttcttcttaaatttaaccccccccncttccagggggaacctcaaatggcnaancaaccatccacctggggatcccataaagaattgacctttgcgggggncaancaagcttgcggggtcttgcagctgatggagaaccagattggagcagtggaacgtggtgcttttgatgacatgaaggagctggagcggctgcgactgaaccgaaaccagctgcacatgttaccggaactgctgttccagaacaaccaggctttgtcaagactgatctatggctcagagaggtgatttgccttggaccacagagcagcttgacaatagggttggaattagacaccaggccttctaggggccctgaagagcctgaaaatggtcttaaaccttgacctaggaatctcatatttgggcatctgccctaaagaaataataaagcatgagcacagacaag

SEQ ID NO: 440198 - DNA, 6595 bp, Homo sapiens
gggagacgcaggcggcgaaacggcagaggagccgagccccctccgcccaaggcgccctccctccgtccgcgcacaggcgccgtcgcttggaggagcaaggtgcctcccagcccgcaggggcgccgcgcgcaagcccgcgggctcttcggtggctctgccccgggactgcacctggaggcggccccggacggggatggtcagcggctgctgccgtctggctcgcgagcgggacgctgtgagggcaccatggcgctgactcccgggtgggggtcctcggcggggccggtccggccggagctctggctgctgctgtgggcagccgcgtggcgcctgggtgcctcggcgtgccccgccctctgcacctgcaccggaaccacggtggactgccacggcacggggctgcaggccattcccaagaatatacctcggaacaccgagcgcctggaactcaatggcaacaacatcactcggatccataagaatgactttgcggggctcaagcagctgcgggtgctgcagctgatggagaaccagattggagcagtggaacgtggtgcttttgatgacatgaaggagctggagcggctgcgactgaaccgaaaccagctgcacatgttaccggaactgctgttccagaacaaccaggctttgtcaagactggacttgagtgagaacgccatccaggccatccccaggaaagcttttcggggagctacggaccttaaaaatttacggctggacaagaaccagatcagctgcattgaggaaggggccttccgtgctctgcgggggctggaggtgctgaccctgaacaacaacaatatcaccaccatccccgtgtccagcttcaaccatatgcccaagctacggaccttccgcctgcactccaaccacctgttttgcgactgccacctggcctggctctcgcagtggctgaggcagcggccaaccatcgggctcttcacccagtgctcgggcccagccagcctgcgtggcctcaatgtggcagaggtccagaagagtgagttcagctgctcaggccagggagaagcggggcgcgtgcccacctgcaccctgtcctccggctcctgcccggccatgtgcacctgcagcaatggcatcgtggactgtcgtggaaaaggcctcactgccatcccggccaacctgcccgagaccatgacggagatacgcctggagctgaacggcatcaagtccatccctcctggagccttctcaccctacagaaagctacggaggatagacctgagcaacaatcagatcgctgagattgcacccgacgccttccagggcctccgctccctgaactcgctggtcctctatggaaacaagatcacagacctcccccgtggtgtgtttggaggcctatacaccctacagctcctgctcctgaatgccaacaagatcaactgcatccggcccgatgccttccaggacctgcagaacctctcactgctctccctgtatgacaacaagatccagagcctcgccaagggcactttcacctccctgcgggccatccagactctgcacctggcccagaaccctttcatttgcgactgtaacctcaagtggctggcagacttcctgcgcaccaatcccatcgagacgagtggtgcccgctgtgccagtccccggcgcctcgccaacaagcgcatcgggcagatcaagagcaagaagttccggtgctcagccaaagagcagtacttcattccaggcacggaggattaccagctgaacagcgagtgcaacagcgacgtggtctgtccccacaagtgccgctgtgaggccaacgtggtggagtgctccagcctgaagctcaccaagatccctgagcgcatcccccagtccacggcagaactgcgattgaataacaatgagatttccatcctggaggccactgggatgtttaaaaaacttacacatctgaagaaaatcaatctgagcaacaacaaggtgtcagaaattgaagatggggccttcgagggcgcagcctctgtgagcgagctgcacctaactgccaaccagctggagtccatccggagcggcatgttccggggtctggatggcttgaggaccctaatgctgcggaacaaccgcatcagctgcatccacaacgacagcttcacgggcctgcgcaacgtccggctcctctcgctctacgacaaccagatcaccaccgtatccccaggagccttcgacaccctccagtccctctccacactgaatctcctggccaaccctttcaactgcaactgccagctggcctggctaggaggctggctacggaagcgcaagatcgtgacggggaacccgcgatgccagaaccctgactttttgcggcagattcccctgcaggacgtggccttccctgacttcaggtgtgaggaaggccaggaggaggggggctgcctgccccgcccacagtgcccacaggagtgcgcctgcctggacaccgtggtccgatgcagcaacaagcacctgcgggccctgcccaagggcattcccaagaatgtcacagaactctatttggacgggaaccagttcacgctggttccgggacagctgtctaccttcaagtacctgcagctcgtggacctgagcaacaacaagatcagttccttaagcaattcctccttcaccaacatgagccagctgaccactctgatcctcagctacaatgccctgcagtgcatcccgcctttggccttccagggactccgctccctgcgcctgctgtctctccacggcaatgacatctccaccctccaagagggcatctttgcagacgtgacctccctgtctcacctggccattggtgccaaccccctatactgtgactgccacctccgctggctgtccagctgggtgaagactggctacaaggaaccgggcattgctcgttgtgctgggccccaggacatggagggcaagctgctcctcaccacgcctgccaagaagtttgaatgccaaggtcctccaacgctggctgtccaggccaagtgtgatctctgcttgtccagtccgtgccagaaccagggcacctgccacaacgacccccttgaggtgtacaggtgcgcctgccccagcggctataagggtcgagactgtgaggtgtccctggacagctgttccagtggcccctgtgaaaatgggggcacctgccatgcacaggagggcgaggatgccccgttcacgtgctcctgtcccaccggctttgaaggaccaacctgtggggtgaacacagatgactgtgtggatcatgcctgtgccaatgggggcgtctgtgtggatggtgtgggcaactacacctgccagtgccccctgcagtatgagggaaaggcctgtgagcagctggtggacttgtgctctccggatctgaacccatgtcaacacgaggcccagtgtgtgggcaccccggatgggcccaggtgtgagtgcatgccaggttatgcaggtgacaactgcagtgagaaccaggatgactgcagggaccaccgctgccagaatggggcccagtgtatggatgaagtcaacagctactcctgcctctgtgctgagggctacagtggacagctctgtgagatccctccccatctgcctgcccccaagagcccctgtgaggggactgagtgccagaatggggccaactgtgtggaccagggcaacaggcctgtgtgccagtgcctcccaggcttcggtggccctgagtgtgagaagttgctcagtgtcaactttgtggatcgggacacttacctgcagttcactgacctgcaaaactggccacgggccaacatcacgttgcaggtctccacggcagaggacaatgggatccttctgtacaacggggacaacgaccacattgcagttgagctgtaccagggccatgtgcgtgtcagctacgacccaggcagctaccccagctctgccatctacagtgctgagacgatcaacgatgggcaattccacaccgttgagctggttgcctttgaccagatggtgaatctctccattgatggcgggagccccatgaccatggacaactttggcaaacattacacgctcaacagcgaggcgccactctatgtgggagggatgcccgtggatgtcaactcagctgccttccgcctgtggcagatcctcaacggcaccggcttccacggttgcatccgaaacctgtacatcaacaacgagctgcaggacttcaccaagacgcagatgaagccaggcgtggtgccaggctgcgaaccctgccgcaagctctactgcctgcatggcatctgccagcccaatgccaccccagggcccatgtgccactgcgaggctggctgggtgggcctgcactgtgaccagcccgctgacggcccctgccatggccacaagtgtgtccatgggcaatgcgtgcccctcgacgctctttcctacagctgccagtgccaggatgggtactcgggggcactgtgcaaccaggccggggccctggcagagccctgcagaggcctgcagtgcctgcatggccactgccaggcctcaggcaccaagggggcacactgtgtgtgtgaccccggcttttcgggcgagctgtgtgagcaagagtccgagtgccggggggaccctgtccgggactttcaccaggtccagaggggctatgccatctgccagaccacgcgccccctgtcatgggtggagtgccggggctcgtgcccaggccagggctgctgccagggccttcggctgaagcggaggaagttcacctttgagtgcagcgatgggacctcttttgccgaggaggtggaaaagcccaccaagtgtggctgtgccctctgcgcatagcgctgggcgtggacaggccggtgagggcgggcaaggggccccagccgctgcagcagcggagacagtcgccagcagctgggctggggtgcaggtcatcacaggacggctcctgggcagctgggccctcctgggtggggtggtgccagagcagccttttaaaagcaaattgcgccatagctgggggcagcgggggtgggcgaggcctgagctgcgggctgccctctccggaagtgccttgcacaaataggcgcttaataaatatttgttgagtgaatgtgtgcgtgaggtcaggccaagaagtgcagaacgatgacacccctccttacctgctatctgaatctggagaagaaaaatgacagccttccaaaccaacccttccctttggcctgtggcccaggctggcttggaactgggtctgtggccccagaagcctcttacccctctgcgggcaaccatgaagtactgtcagcctccccgggaagccagcctggttcattctgctgctacagaatctgctggtggtaggccaggctctggagcgggggtgccgcctcctgctggccagggagggtcggacccttgccccctgggctgactggcagctctgcagccacggcttgggaacgaggctgtgggtggaggtggttcttaggaccaggcctctgaatcctaaagttctagcatgactactgtagctgcgagggcttatgtggaggaaacagtcacaggggctgctcagggtggcagaccccactaaagagggcagagggttctttgctctagataaacaaacatcatctgcctccagacactggccacagtaggagtattggtcctgggcttccccagccaccagtcagccacaagctgtcggtgacctattggtagagggactgggtgtgagggtctgggccagggtgcttgacctgggagcagctggttcagagtccttcacaccgcaggccagtagggagcagtggaagggacagtgctccaggcattgggaagtccctgctggctctatcactcggggcaaacttctccccacctgggccttgggttcttcagctataaaatggccagaggtggggggcgggatgactaaaggaacagtgcagactcccccactgtggtcttgggaggccagaggagttagaagacctatctatctatctatctatctacattgatcacatcaaaagtatttatgtgcctaacccggggctggggattgtggacgttctggcctaatggacagatgtgaactcatcccagagcatcgcaggaatgaccaggatgcccgggaagagttgagctgagtgggggctccagccacagacagcggcccaggccagggagttgtggcaacagggccggggctcccggtgaaggtgtcaggaagtggaaaaggctggactttgtctcctctttgcctgctggtagcctaaccgcaaaagtatctctttatacagaatacttacagattctaatatatatttgtatttcattttgttacagtatttttatatgttaaagtcaacatccagcgtcttgttttgcctttcagatgctatgtggtcgtggcacgttttgttgggggtttctgtagtcgtcttgtttggatcaactcctagaggctggtttagaacaggcccatgagggagctgcacctgccctggaagtattgttttagactatgtcgatattgtctgttgtcttccatgtgaacatgacattgagtcac

SEQ ID NO: 440199 - DNA, 6863 bp, Homo sapiens
gggagacgcaggcggcgaaacggcagaggagccgagccccctccgcccaaggcgccctccctccgtccgcgcacaggcgccgtcgcttggaggagcaaggtgcctcccagcccgcaggggcgccgcgcgcaagcccgcgggctcttcggtggctctgccccgggactgcacctggaggcggccccggacggggatggtcagcggctgctgccgtctggctcgcgagcgggacgctgtgagggcaccatggcgctgactcccgggtgggggtcctcggcggggccggtccggccggagctctggctgctgctgtgggcagccgcgtggcgcctgggtgcctcggcgtgccccgccctctgcacctgcaccggaaccacggtggactgccacggcacggggctgcaggccattcccaagaatatacctcggaacaccgagcgcctggaactcaatggcaacaacatcactcggatccataagaatgactttgcggggctcaagcagctgcgggtgctgcagctgatggagaaccagattggagcagtggaacgtggtgcttttgatgacatgaaggagctggagcggctgcgactgaaccgaaaccagctgcacatgttaccggaactgctgttccagaacaaccaggctttgtcaagactggacttgagtgagaacgccatccaggccatccccaggaaagcttttcggggagctacggaccttaaaaatttacggctggacaagaaccagatcagctgcattgaggaaggggccttccgtgctctgcgggggctggaggtgctgaccctgaacaacaacaatatcaccaccatccccgtgtccagcttcaaccatatgcccaagctacggaccttccgcctgcactccaaccacctgttttgcgactgccacctggcctggctctcgcagtggctgaggcagcggccaaccatcgggctcttcacccagtgctcgggcccagccagcctgcgtggcctcaatgtggcagaggtccagaagagtgagttcagctgctcaggccagggagaagcggggcgcgtgcccacctgcaccctgtcctccggctcctgcccggccatgtgcacctgcagcaatggcatcgtggactgtcgtggaaaaggcctcactgccatcccggccaacctgcccgagaccatgacggagatacgcctggagctgaacggcatcaagtccatccctcctggagccttctcaccctacagaaagctacggaggatagacctgagcaacaatcagatcgctgagattgcacccgacgccttccagggcctccgctccctgaactcgctggtcctctatggaaacaagatcacagacctcccccgtggtgtgtttggaggcctatacaccctacagctcctgctcctgaatgccaacaagatcaactgcatccggcccgatgccttccaggacctgcagaacctctcactgctctccctgtatgacaacaagatccagagcctcgccaagggcactttcacctccctgcgggccatccagactctgcacctggcccagaaccctttcatttgcgactgtaacctcaagtggctggcagacttcctgcgcaccaatcccatcgagacgagtggtgcccgctgtgccagtccccggcgcctcgccaacaagcgcatcgggcagatcaagagcaagaagttccggtgctcagccaaagagcagtacttcattccaggcacggaggattaccagctgaacagcgagtgcaacagcgacgtggtctgtccccacaagtgccgctgtgaggccaacgtggtggagtgctccagcctgaagctcaccaagatccctgagcgcatcccccagtccacggcagaactgcgattgaataacaatgagatttccatcctggaggccactgggatgtttaaaaaacttacacatctgaagaaaatcaatctgagcaacaacaaggtgtcagaaattgaagatggggccttcgagggcgcagcctctgtgagcgagctgcacctaactgccaaccagctggagtccatccggagcggcatgttccggggtctggatggcttgaggaccctaatgctgcggaacaaccgcatcagctgcatccacaacgacagcttcacgggcctgcgcaacgtccggctcctctcgctctacgacaaccagatcaccaccgtatccccaggagccttcgacaccctccagtccctctccacactgaatctcctggccaaccctttcaactgcaactgccagctggcctggctaggaggctggctacggaagcgcaagatcgtgacggggaacccgcgatgccagaaccctgactttttgcggcagattcccctgcaggacgtggccttccctgacttcaggtgtgaggaaggccaggaggaggggggctgcctgccccgcccacagtgcccacaggagtgcgcctgcctggacaccgtggtccgatgcagcaacaagcacctgcgggccctgcccaagggcattcccaagaatgtcacagaactctatttggacgggaaccagttcacgctggttccgggacagctgtctaccttcaagtacctgcagctcgtggacctgagcaacaacaagatcagttccttaagcaattcctccttcaccaacatgagccagctgaccactctgatcctcagctacaatgccctgcagtgcatcccgcctttggccttccagggactccgctccctgcgcctgctgtctctccacggcaatgacatctccaccctccaagagggcatctttgcagacgtgacctccctgtctcacctggccattggtgccaaccccctatactgtgactgccacctccgctggctgtccagctgggtgaagactggctacaaggaaccgggcattgctcgttgtgctgggccccaggacatggagggcaagctgctcctcaccacgcctgccaagaagtttgaatgccaaggtcctccaacgctggctgtccaggccaagtgtgatctctgcttgtccagtccgtgccagaaccagggcacctgccacaacgacccccttgaggtgtacaggtgcgcctgccccagcggctataagggtcgagactgtgaggtgtccctggacagctgttccagtggcccctgtgaaaatgggggcacctgccatgcacaggagggcgaggatgccccgttcacgtgctcctgtcccaccggctttgaaggaccaacctgtggggtgaacacagatgactgtgtggatcatgcctgtgccaatgggggcgtctgtgtggatggtgtgggcaactacacctgccagtgccccctgcagtatgagggaaaggcctgtgagcagctggtggacttgtgctctccggatctgaacccatgtcaacacgaggcccagtgtgtgggcaccccggatgggcccaggtgtgagtgcatgccaggttatgcaggtgacaactgcagtgagaaccaggatgactgcagggaccaccgctgccagaatggggcccagtgtatggatgaagtcaacagctactcctgcctctgtgctgagggctacagtggacagctctgtgagatccctccccatctgcctgcccccaagagcccctgtgaggggactgagtgccagaatggggccaactgtgtggaccagggcaacaggcctgtgtgccagtgcctcccaggcttcggtggccctgagtgtgagaagttgctcagtgtcaactttgtggatcgggacacttacctgcagttcactgacctgcaaaactggccacgggccaacatcacgttgcaggtctccacggcagaggacaatgggatccttctgtacaacggggacaacgaccacattgcagttgagctgtaccagggccatgtgcgtgtcagctacgacccaggcagctaccccagctctgccatctacagtgctgagacgatcaacgatgggcaattccacaccgttgagctggttgcctttgaccagatggtgaatctctccattgatggcgggagccccatgaccatggacaactttggcaaacattacacgctcaacagcgaggcgccactctatgtgggagggatgcccgtggatgtcaactcagctgccttccgcctgtggcagatcctcaacggcaccggcttccacggttgcatccgaaacctgtacatcaacaacgagctgcaggacttcaccaagacgcagatgaagccaggcgtggtgccaggctgcgaaccctgccgcaagctctactgcctgcatggcatctgccagcccaatgccaccccagggcccatgtgccactgcgaggctggctgggtgggcctgcactgtgaccagcccgctgacggcccctgccatggccacaagtgtgtccatgggcaatgcgtgcccctcgacgctctttcctacagctgccagtgccaggatgggtactcgggggcactgtgcaaccaggccggggccctggcagagccctgcagaggcctgcagtgcctgcatggccactgccaggcctcaggcaccaagggggcacactgtgtgtgtgaccccggcttttcgggcgagctgtgtgagcaagagtccgagtgccggggggaccctgtccgggactttcaccaggtccagaggggctatgccatctgccagaccacgcgccccctgtcatgggtggagtgccggggctcgtgcccaggccagggctgctgccagggccttcggctgaagcggaggaagttcacctttgagtgcagcgatgggacctcttttgccgaggaggtggaaaagcccaccaagtgtggctgtgccctctgcgcatagcgctgggcgtggacaggccggtgagggcgggcaaggggccccagccgctgcagcagcggagacagtcgccagcagctgggctggggtgcaggtcatcacaggacggctcctgggcagctgggccctcctgggtggggtggtgccagagcagccttttaaaagcaaattgcgccatagctgggggcagcgggggtgggcgaggcctgagctgcgggctgccctctccggaagtgccttgcacaaataggcgcttaataaatatttgttgagtgaatgtgtgcgtgaggtcaggccaagaagtgcagaacgatgacacccctccttacctgctatctgaatctggagaagaaaaatgacagccttccaaaccaacccttccctttggcctgtggcccaggctggcttggaactgggtctgtggccccagaagcctcttacccctctgcgggcaaccatgaagtactgtcagcctccccgggaagccagcctggttcattctgctgctacagaatctgctggtggtaggccaggctctggagcgggggtgccgcctcctgctggccagggagggtcggacccttgccccctgggctgactggcagctctgcagccacggcttgggaacgaggctgtgggtggaggtggttcttaggaccaggcctctgaatcctaaagttctagcatgactactgtagctgcgagggcttatgtggaggaaacagtcacaggggctgctcagggtggcagaccccactaaagagggcagagggttctttgctctagataaacaaacatcatctgcctccagacactggccacagtaggagtattggtcctgggcttccccagccaccagtcagccacaagctgtcggtgacctattggtagagggactgggtgtgagggtctgggccagggtgcttgacctgggagcagctggttcagagtccttcacaccgcaggccagtagggagcagtggaagggacagtgctccaggcattgggaagtccctgctggctctatcactcggggcaaacttctccccacctgggccttgggttcttcagctataaaatggccagaggtggggggcgggatgactaaaggaacagtgcagactcccccactgtggtcttgggaggccagaggagttagaagacctatctatctatctatctatctacattgatcacatcaaaagtatttatgtgcctaacccggggctggggattgtggacgttctggcctaatggacagatgtgaactcatcccagagcatcgcaggaatgaccaggatgcccgggaagagttgagctgagtgggggctccagccacagacagcggcccaggccagggagttgctggcaacgaaggagccagtggtggaagaagaagaggccctgaatatacgattgcctgcccacgttgtcttctcttccatacacagtgaaaatgtagaaagatgggagcaccatgtgagcttaaggctcccctgaccggccccaccacatggcccagcctcctagcacagcagcgctgacctcagtgcagtctgaggattggaatccaccatgagatgatgtgagagctgtgtgccccaggatcaactttttctccaacttggccatcagccagcgagttgctaaggacctgagtcagcactcacgttgcctattcacactccgcttgaaagtccggaaggcatgaagagatacagcagggtgcgtccggagggagctgtggccttgcaacaccactggcaacagggccggggctcccggtgaaggtgtcaggaagtggaaaaggctggactttgtctcctctttgcctgctgatgctatgtggtcgtggcacgttttgttgggggtttctgtagtcgtcttgtttggatcaactcctagaggctggtttagaacaggcccatgagggagctgcacctgccctggaagtattgttttagactatgtcgatattgtctgttgtcttccatgtgaacatgacattgagtcac

SEQ ID NO: 440200 - DNA, 5168 bp, Homo sapiens
ctctctgacttatgtcctttcctctcagtggacagctctgtgagatccctccccatctgcctgcccccaagagcccctgtgaggggactgagtgccagaatggggccaactgtgtggaccagggcaacaggcctgtgtgccagtgcctcccaggcttcggtggccctgagtgtgagaagttgctcagtgtcaactttgtggatcgggacacttacctgcagttcactgacctgcaaaactggccacgggccaacatcacgttgcaggtctccacggcagaggacaatgggatccttctgtacaacggggacaacgaccacattgcagttgagctgtaccagggccatgtgcgtgtcagctacgacccaggcagctaccccagctctgccatctacagtgctgagacgatcaacgatgggcaattccacaccgttgagctggttgcctttgaccagatggtgaatctctccattgatggcgggagccccatgaccatggacaactttggcaaacattacacgctcaacagcgaggcgccactctatgtgggagggatgcccgtggatgtcaactcagctgccttccgcctgtggcagatcctcaacggcaccggcttccacggttgcatccgaaacctgtacatcaacaacgagctgcaggacttcaccaagacgcagatgaagccaggcgtggtgccaggctgcgaaccctgccgcaagctctactgcctgcatggcatctgccagcccaatgccaccccagggcccatgtgccactgcgaggctggctgggtgggcctgcactgtgaccagcccgctgacggcccctgccatggccacaagtgtgtccatgggcaatgcgtgcccctcgacgctctttcctacagctgccagtgccaggatgggtactcgggggcactgtgcaaccaggccggggccctggcagagccctgcagaggcctgcagtgcctgcatggccactgccaggcctcaggcaccaagggggcacactgtgtgtgtgaccccggcttttcgggcgagctgtgtgagcaaggtcaggggcccccctcctgacgtgccctccccagggtcccccacaaattgctttagcaatttgactcttcctcccagtctcggcagcccttctgtcccttcccagccctgtaccatgggctactatggggctttcagagtccctccaccctctgggcactgctcccaatctctcctggcccagtttgccctgcagctcccttattcagggtatgcgcctcttctggctggggtctctccttgcagaagagaccacccagggtaacagctcctggcccaacctctgcctcttggccccatcacctcatgacctgggagcggcagcaggaagtccgagggttggggactccttcccaggccctccctggcctgcttgaccaagatggcttctgctggaatccggactgctaaggctgggcagggagaagctggagaaacccagaactcaggcaccttaagggtcccctaggctatcccctccccagcatgaatccttttcataatgttattgcccccggggcctccagcctctcttgcacgcctctagcaatggggaccccccctccctccagcagttcagtctgtcctggagggccctgacgctaggaccagactgtaggccctgggaggaagcttgtgcatgtcagtgggaggcggaagtatgctggggacagaggtggggtctgagagccaaaggatccaccccacagatgctgccctcctcctcctcttcctcctgcctccctggaggcagcagctcacccatgggtgtgccctgaggctttctcttggtgtctgtcccatccagagtccgagtgccggggggaccctgtccgggactttcaccaggtccagaggggctatgccatctgccagaccacgcgccccctgtcatgggtggagtgccggggctcgtgcccaggccagggctgctgccagggccttcggctgaagcggaggaagttcacctttgagtgcagcgatgggacctcttttgccgaggaggtggaaaagcccaccaagtgtggctgtgccctctgcgcatagcgctgggcgtggacaggccggtgagggcgggcaaggggccccagccgctgcagcagcggagacagtcgccagcagctgggctggggtgcaggtcatcacaggacggctcctgggcagctgggccctcctgggtggggtggtgccagagcagccttttaaaagcaaattgcgccatagctgggggcagcgggggtgggcgaggcctgagctgcgggctgccctctccggaagtgccttgcacaaataggcgcttaataaatatttgttgagtgaatgtgtgcgtgaggtcaggccaagaagtgcagaacgatgacacccctccttacctgctatctgaatctggagaagaaaaatgacagccttccaaaccaacccttccctttggcctgtggcccaggctggcttggaactgggtctgtggccccagaagcctcttacccctctgcgggcaaccatgaagtactgtcagcctccccgggaagccagcctggttcattctgctgctacagaatctgctggtggtaggccaggctctggagcgggggtgccgcctcctgctggccagggagggtcggacccttgccccctgggctgactggcagctctgcagccacggcttgggaacgaggctgtgggtggaggtggttcttaggaccaggcctctgaatcctaaagttctagcatgactactgtagctgcgagggcttatgtggaggaaacagtcacaggggctgctcagggtggcagaccccactaaagagggcagagggttctttgctctagataaacaaacatcatctgcctccagacactggccacagtaggagtattggtcctgggcttccccagccaccagtcagccacaagctgtcggtgacctattggtagagggactgggtgtgagggtctgggccagggtgcttgacctgggagcagctggttcagagtccttcacaccgcaggccagtagggagcagtggaagggacagtgctccaggcattgggaagtccctgctggctctatcactcggggcaaacttctccccacctgggccttgggttcttcagctataaaatggccagaggtggggggcgggatgactaaaggaacagtgcagactcccccactgtggtcttgggaggccagaggagttagaagacctatctatctatctatctatctacattgatcacatcaaaagtatttatgtgcctaacccggggctggggattgtggacgttctggcctaatggacagatgtgaactcatcccagagcatcgcaggaatgaccaggatgcccgggaagagttgagctgagtgggggctccagccacagacagcggcccaggccagggagttgctggcaacgaaggagccagtggtggaagaagaagaggccctgaatatacgattgcctgcccacgttgtcttctcttccatacacagtgaaaatgtagaaagatggtttgtgaggccaaactgtgaatgggctaaagggaggcaaagttgcactctccttccccagagggctcaccaagagggcacacccccgggggttctggtgggcaacgggggtgagcatgtccctgccctggctccctccatctgtgaccaggaggcatggctgggtgtatgttcaggtgaggctcagagtggcattgtgtccctgtcccctgcccagggcagtgaggggagcccttgatgctgattagaaggctagaactggggtagaggtgcctggcatgtctcatgccatggggactcaatctagcaactgtgagtcctggggtccctgtgatgggaagagggcagtgccctgcccaatgtggcaggtgtcctcatggcaggatctgcccctcaccagggggctgggatctacttgcttggagctctgagcaaggccacaatgcccgcccccacccccaagtagactgcagcctgggcctcatggggcttctcccaggcccacatggcatccctctctgagtttccaggccaccgtgggaccctgcagagcatctgcaccgggctggatagggcagaaaagctcaagggcagctagcttgcctcttccctggaagaaaggtgctctgggactcaccaaccctgagaaagatagctttcctggccaccaccattccccaccaccctggagaagccaattcccaggcttgaagggcactggctggcaggaggcctcttcattctgcaggaggtggaaaggacacctgtagacaggtgatgctcacccctcacctggcgccatggggctgggaggtgagcggctggcatgtttgttcctagggagcaccatgtgagcttaaggctcccctgaccggccccaccacatggcccagcctcctagcacagcagcgctgacctcagtgcagtctgaggattggaatccaccatgagatgatgtgagagctgtgtgccccaggatcaactttttctccaacttggccatcagccagcgagttgctaaggacctgagtcagcactcacgttgcctattcacactccgcttgaaagtccggaaggtggctactgcaaaatcacccctctgagaagtcctctctccacatcttgtccccctttgtgaagacccctagttcgctctgcattttaggcatgaagagatacagcagggtgcgtccggagggagctgtggccttgcaacaccactggcaacagggccggggctcccggtgaaggtgtcaggaagtggaaaaggctggactttgtctcctctttgcctgctggtagcctaaccgcaaaagtatctctttatacagaatacttacagattctaatatatatttgtatttcattttgttacagtatttttatatgttaaagtcaacatccagcgtcttgttttgcctttcagatgctatgtggtcgtggcacgttttgttgggggtttctgtagtcgtcttgtttggatcaactcctagaggctggtttagaacaggcccatgagggagctgcacctgccctggaagtattgttttagactatgtcgatattgtctgttgtcttccatgtgaacatgacattgagtcac

SEQ ID NO: 440201 - DNA, 1784 bp, Homo sapiens
ggtgtgtgccgtcccgcttctgtccctttttctgctctcgcgtttgccgtgttggccctttttttgtggtggtgtgtcgggcccgcatcgtctttcatttcggcggcccctctgccgttggtctgctctggtttgccaccagctgtcgtgcccgctcgtgcttccgcttcacttgtgtgatgccttcaagtcggtggggtcgcctttatgcatatgcttcctgtgtctgttggtcttcatactatcttggattcggttgttcttcggtataacgagttcccttttcgggtaaggctcccccgcaggcaagaggatgccaattccagcccttccccacttggcggacgccttcaccggagcccggtcctctagcagtgctgtccaagcctcgagctccctccggacgcaccctctgtagtctcgtcaggcactcaaatgcagaccgaactaggggtcttcacaaagggggacaagatcatgggagagaggacttctcagaggcgagtgatatttcaagtagccaccctctcccggactttcaagcggtagtgctgaataggcaaccgtgaagtcgctcgactcaggtccttagcaactcgctggctgtatgcccaaggctctggagaataaagttgatcctaggggcacacaagctctcacatcatctcatggtggattccaatcctcaacgactagcaactcgagagctaacgcgcttgctgtgctaggaggctgggcccatgtggtgggaccggcgtcagcgggagccttaagctcacatggtgctccctaggaacaaacatcgccacccgctcacctcccagccccatggcgccaggtgaggggtgagcatcacctgtctacaggtgtcctttccaattcccaggcttgaagggcactggctggcaggaggcctcttcattctgcaggaggtggaaaggacacctgtagacaggtgatgctcacccctcacctggcgccatggggctgggaggtgagcggctggcatgtttgttcctagggagcaccatgtgagcttaaggctcccctgaccggccccaccacatggcccagcctcctagcacagcagcgctgacctcagtgcagtctgaggattggaatccaccatgagatgatgtgagagctgtgtgccccaggatcaactttttctccaacttggccatcagccagcgagttgctaaggacctgagtcagcactcacgttgcctattcacactccgcttgaaagtccggaaggtggctactgcaaaatcacccctctgagaagtcctctctccacatcttgtccccctttgtgaagacccctagttcgctctgcattttaggcatgaagagatacagcagggtgcgtccggagggagctgtggccttgcaacaccactggcaacagggccggggctcccggtgaaggtgtcaggaagtggaaaaggctggactttgtctcctctttgcctgctggtagcctaaccgcaaaagtatctctttatacagaatacttacagattctaatatatatttgtatttcattttgttacagtatttttatatgttaaagtcaacatccagcgtcttgttttgcctttcagatgctatgtggtcgtggcacgttttgttgggggtttctgtagtcgtcttgtttggatcaactcctagaggctggtttagaacaggcccatgagggagctgcacctgccctggaagtattgttttagactatgtcgatattgtctgttgtcttccatgtgaacatgacattgagtcac

SEQ ID NO: 440202 - DNA, 841 bp, Homo sapiens
gggagacgcaggcggcgaaacggcagaggagccgagccccctccgcccaaggcgccctccctccgtccgcgcacaggcgccgtcgcttggaggagcaaggtgcctcccagcccgcaggggcgccgcgcgcaagcccgcgggctcttcggtggctctgccccgggactgcacctggaggcggccccggacggggatggtcagcggctgctgccgtctggctcgcgagcgggacgctgtgagggcaccatggcgctgactcccgggtgggggtcctcggcggggccggtccggccggagctctggctgctgctgtgggcagccgcgtggcgcctgggtgcctcggcgtgccccgccctctgcacctgcaccggaaccacggtggactgccacggcacggggctgcaggccattcccaagaatatacctcggaacaccgagcgcctggaactcaatggcaacaacatcactcggatccataagaatgactttgcggggctcaagcagctgcgggtgctgcagctgatggagaaccagattggagcagtggaacgtggtgcttttgatgacatgaaggagctggagcggctgcgactgaaccgaaaccagctgcacatgttaccggaactgctgttccagaacaaccaggctttgtcaagactgatctatggctcagagaggtgatttgccttggaccacagagcagcttgacaatagggttggaattagacaccaggccttctaggggccctgaagagcctgaaaatggtcttaaaccttgacctaggaatctcatatttgggcatctgccctaaagaaataataaagcatgagcacagacaag

SEQ ID NO: 440203 - DNA, 7920 bp, Homo sapiens
gggagacgcaggcggcgaaacggcagaggagccgagccccctccgcccaaggcgccctccctccgtccgcgcacaggcgccgtcgcttggaggagcaaggtgcctcccagcccgcaggggcgccgcgcgcaagcccgcgggctcttcggtggctctgccccgggactgcacctggaggcggccccggacggggatggtcagcggctgctgccgtctggctcgcgagcgggacgctgtgagggcaccatggcgctgactcccgggtgggggtcctcggcggggccggtccggccggagctctggctgctgctgtgggcagccgcgtggcgcctgggtgcctcggcgtgccccgccctctgcacctgcaccggaaccacggtggactgccacggcacggggctgcaggccattcccaagaatatacctcggaacaccgagcgcctggaactcaatggcaacaacatcactcggatccataagaatgactttgcggggctcaagcagctgcgggtgctgcagctgatggagaaccagattggagcagtggaacgtggtgcttttgatgacatgaaggagctggagcggctgcgactgaaccgaaaccagctgcacatgttaccggaactgctgttccagaacaaccaggctttgtcaagactggacttgagtgagaacgccatccaggccatccccaggaaagcttttcggggagctacggaccttaaaaatttacggctggacaagaaccagatcagctgcattgaggaaggggccttccgtgctctgcgggggctggaggtgctgaccctgaacaacaacaatatcaccaccatccccgtgtccagcttcaaccatatgcccaagctacggaccttccgcctgcactccaaccacctgttttgcgactgccacctggcctggctctcgcagtggctgaggcagcggccaaccatcgggctcttcacccagtgctcgggcccagccagcctgcgtggcctcaatgtggcagaggtccagaagagtgagttcagctgctcaggccagggagaagcggggcgcgtgcccacctgcaccctgtcctccggctcctgcccggccatgtgcacctgcagcaatggcatcgtggactgtcgtggaaaaggcctcactgccatcccggccaacctgcccgagaccatgacggagatacgcctggagctgaacggcatcaagtccatccctcctggagccttctcaccctacagaaagctacggaggatagacctgagcaacaatcagatcgctgagattgcacccgacgccttccagggcctccgctccctgaactcgctggtcctctatggaaacaagatcacagacctcccccgtggtgtgtttggaggcctatacaccctacagctcctgctcctgaatgccaacaagatcaactgcatccggcccgatgccttccaggacctgcagaacctctcactgctctccctgtatgacaacaagatccagagcctcgccaagggcactttcacctccctgcgggccatccagactctgcacctggcccagaaccctttcatttgcgactgtaacctcaagtggctggcagacttcctgcgcaccaatcccatcgagacgagtggtgcccgctgtgccagtccccggcgcctcgccaacaagcgcatcgggcagatcaagagcaagaagttccggtgctcagccaaagagcagtacttcattccaggcacggaggattaccagctgaacagcgagtgcaacagcgacgtggtctgtccccacaagtgccgctgtgaggccaacgtggtggagtgctccagcctgaagctcaccaagatccctgagcgcatcccccagtccacggcagaactgcgattgaataacaatgagatttccatcctggaggccactgggatgtttaaaaaacttacacatctgaagaaaatcaatctgagcaacaacaaggtgtcagaaattgaagatggggccttcgagggcgcagcctctgtgagcgagctgcacctaactgccaaccagctggagtccatccggagcggcatgttccggggtctggatggcttgaggaccctaatgctgcggaacaaccgcatcagctgcatccacaacgacagcttcacgggcctgcgcaacgtccggctcctctcgctctacgacaaccagatcaccaccgtatccccaggagccttcgacaccctccagtccctctccacactgaatctcctggccaaccctttcaactgcaactgccagctggcctggctaggaggctggctacggaagcgcaagatcgtgacggggaacccgcgatgccagaaccctgactttttgcggcagattcccctgcaggacgtggccttccctgacttcaggtgtgaggaaggccaggaggaggggggctgcctgccccgcccacagtgcccacaggagtgcgcctgcctggacaccgtggtccgatgcagcaacaagcacctgcgggccctgcccaagggcattcccaagaatgtcacagaactctatttggacgggaaccagttcacgctggttccgggacagctgtctaccttcaagtacctgcagctcgtggacctgagcaacaacaagatcagttccttaagcaattcctccttcaccaacatgagccagctgaccactctgatcctcagctacaatgccctgcagtgcatcccgcctttggccttccagggactccgctccctgcgcctgctgtctctccacggcaatgacatctccaccctccaagagggcatctttgcagacgtgacctccctgtctcacctggccattggtgccaaccccctatactgtgactgccacctccgctggctgtccagctgggtgaagactggctacaaggaaccgggcattgctcgttgtgctgggccccaggacatggagggcaagctgctcctcaccacgcctgccaagaagtttgaatgccaaggtcctccaacgctggctgtccaggccaagtgtgatctctgcttgtccagtccgtgccagaaccagggcacctgccacaacgacccccttgaggtgtacaggtgcgcctgccccagcggctataagggtcgagactgtgaggtgtccctggacagctgttccagtggcccctgtgaaaatgggggcacctgccatgcacaggagggcgaggatgccccgttcacgtgctcctgtcccaccggctttgaaggaccaacctgtggggtgaacacagatgactgtgtggatcatgcctgtgccaatgggggcgtctgtgtggatggtgtgggcaactacacctgccagtgccccctgcagtatgagggaaaggcctgtgagcagctggtggacttgtgctctccggatctgaacccatgtcaacacgaggcccagtgtgtgggcaccccggatgggcccaggtgtgagtgcatgccaggttatgcaggtgacaactgcagtgagaaccaggatgactgcagggaccaccgctgccagaatggggcccagtgtatggatgaagtcaacagctactcctgcctctgtgctgagggctacagtggacagctctgtgagatccctccccatctgcctgcccccaagagcccctgtgaggggactgagtgccagaatggggccaactgtgtggaccagggcaacaggcctgtgtgccagtgcctcccaggcttcggtggccctgagtgtgagaagttgctcagtgtcaactttgtggatcgggacacttacctgcagttcactgacctgcaaaactggccacgggccaacatcacgttgcaggtctccacggcagaggacaatgggatccttctgtacaacggggacaacgaccacattgcagttgagctgtaccagggccatgtgcgtgtcagctacgacccaggcagctaccccagctctgccatctacagtgctgagacgatcaacgatgggcaattccacaccgttgagctggttgcctttgaccagatggtgaatctctccattgatggcgggagccccatgaccatggacaactttggcaaacattacacgctcaacagcgaggcgccactctatgtgggagggatgcccgtggatgtcaactcagctgccttccgcctgtggcagatcctcaacggcaccggcttccacggttgcatccgaaacctgtacatcaacaacgagctgcaggacttcaccaagacgcagatgaagccaggcgtggtgccaggctgcgaaccctgccgcaagctctactgcctgcatggcatctgccagcccaatgccaccccagggcccatgtgccactgcgaggctggctgggtgggcctgcactgtgaccagcccgctgacggcccctgccatggccacaagtgtgtccatgggcaatgcgtgcccctcgacgctctttcctacagctgccagtgccaggatgggtactcgggggcactgtgcaaccaggccggggccctggcagagccctgcagaggcctgcagtgcctgcatggccactgccaggcctcaggcaccaagggggcacactgtgtgtgtgaccccggcttttcgggcgagctgtgtgagcaagagtccgagtgccggggggaccctgtccgggactttcaccaggtccagaggggctatgccatctgccagaccacgcgccccctgtcatgggtggagtgccggggctcgtgcccaggccagggctgctgccagggccttcggctgaagcggaggaagttcacctttgagtgcagcgatgggacctcttttgccgaggaggtggaaaagcccaccaagtgtggctgtgccctctgcgcatagcgctgggcgtggacaggccggtgagggcgggcaaggggccccagccgctgcagcagcggagacagtcgccagcagctgggctggggtgcaggtcatcacaggacggctcctgggcagctgggccctcctgggtggggtggtgccagagcagccttttaaaagcaaattgcgccatagctgggggcagcgggggtgggcgaggcctgagctgcgggctgccctctccggaagtgccttgcacaaataggcgcttaataaatatttgttgagtgaatgtgtgcgtgaggtcaggccaagaagtgcagaacgatgacacccctccttacctgctatctgaatctggagaagaaaaatgacagccttccaaaccaacccttccctttggcctgtggcccaggctggcttggaactgggtctgtggccccagaagcctcttacccctctgcgggcaaccatgaagtactgtcagcctccccgggaagccagcctggttcattctgctgctacagaatctgctggtggtaggccaggctctggagcgggggtgccgcctcctgctggccagggagggtcggacccttgccccctgggctgactggcagctctgcagccacggcttgggaacgaggctgtgggtggaggtggttcttaggaccaggcctctgaatcctaaagttctagcatgactactgtagctgcgagggcttatgtggaggaaacagtcacaggggctgctcagggtggcagaccccactaaagagggcagagggttctttgctctagataaacaaacatcatctgcctccagacactggccacagtaggagtattggtcctgggcttccccagccaccagtcagccacaagctgtcggtgacctattggtagagggactgggtgtgagggtctgggccagggtgcttgacctgggagcagctggttcagagtccttcacaccgcaggccagtagggagcagtggaagggacagtgctccaggcattgggaagtccctgctggctctatcactcggggcaaacttctccccacctgggccttgggttcttcagctataaaatggccagaggtggggggcgggatgactaaaggaacagtgcagactcccccactgtggtcttgggaggccagaggagttagaagacctatctatctatctatctatctacattgatcacatcaaaagtatttatgtgcctaacccggggctggggattgtggacgttctggcctaatggacagatgtgaactcatcccagagcatcgcaggaatgaccaggatgcccgggaagagttgagctgagtgggggctccagccacagacagcggcccaggccagggagttgctggcaacgaaggagccagtggtggaagaagaagaggccctgaatatacgattgcctgcccacgttgtcttctcttccatacacagtgaaaatgtagaaagatggtttgtgaggccaaactgtgaatgggctaaagggaggcaaagttgcactctccttccccagagggctcaccaagagggcacacccccgggggttctggtgggcaacgggggtgagcatgtccctgccctggctccctccatctgtgaccaggaggcatggctgggtgtatgttcaggtgaggctcagagtggcattgtgtccctgtcccctgcccagggcagtgaggggagcccttgatgctgattagaaggctagaactggggtagaggtgcctggcatgtctcatgccatggggactcaatctagcaactgtgagtcctggggtccctgtgatgggaagagggcagtgccctgcccaatgtggcaggtgtcctcatggcaggatctgcccctcaccagggggctgggatctacttgcttggagctctgagcaaggccacaatgcccgcccccacccccaagtagactgcagcctgggcctcatggggcttctcccaggcccacatggcatccctctctgagtttccaggccaccgtgggaccctgcagagcatctgcaccgggctggatagggcagaaaagctcaagggcagctagcttgcctcttccctggaagaaaggtgctctgggactcaccaaccctgagaaagatagctttcctggccaccaccattccccaccaccctggagaagccaattcccaggcttgaagggcactggctggcaggaggcctcttcattctgcaggaggtggaaaggacacctgtagacaggtgatgctcacccctcacctggcgccatggggctgggaggtgagcggctggcatgtttgttcctagggagcaccatgtgagcttaaggctcccctgaccggccccaccacatggcccagcctcctagcacagcagcgctgacctcagtgcagtctgaggattggaatccaccatgagatgatgtgagagctgtgtgccccaggatcaactttttctccaacttggccatcagccagcgagttgctaaggacctgagtcagcactcacgttgcctattcacactccgcttgaaagtccggaaggtggctactgcaaaatcacccctctgagaagtcctctctccacatcttgtccccctttgtgaagacccctagttcgctctgcattttaggcatgaagagatacagcagggtgcgtccggagggagctgtggccttgcaacaccactggcaacagggccggggctcccggtgaaggtgtcaggaagtggaaaaggctggactttgtctcctctttgcctgctggtagcctaaccgcaaaagtatctctttatacagaatacttacagattctaatatatatttgtatttcattttgttacagtatttttatatgttaaagtcaacatccagcgtcttgttttgcctttcagatgctatgtggtcgtggcacgttttgttgggggtttctgtagtcgtcttgtttggatcaactcctagaggctggtttagaacaggcccatgagggagctgcacctgccctggaagtattgttttagactatgtcgatattgtctgttgtcttccatgtgaacatgacattgagtcac

SEQ ID NO: 440204 - DNA, 8727 bp, Homo sapiens
gggagacgcaggcggcgaaacggcagaggagccgagccccctccgcccaaggcgccctccctccgtccgcgcacaggcgccgtcgcttggaggagcaaggtgcctcccagcccgcaggggcgccgcgcgcaagcccgcgggctcttcggtggctctgccccgggactgcacctggaggcggccccggacggggatggtcagcggctgctgccgtctggctcgcgagcgggacgctgtgagggcaccatggcgctgactcccgggtgggggtcctcggcggggccggtccggccggagctctggctgctgctgtgggcagccgcgtggcgcctgggtgcctcggcgtgccccgccctctgcacctgcaccggaaccacggtggactgccacggcacggggctgcaggccattcccaagaatatacctcggaacaccgagcgcctggaactcaatggcaacaacatcactcggatccataagaatgactttgcggggctcaagcagctgcgggtgctgcagctgatggagaaccagattggagcagtggaacgtggtgcttttgatgacatgaaggagctggagcggctgcgactgaaccgaaaccagctgcacatgttaccggaactgctgttccagaacaaccaggctttgtcaagactggacttgagtgagaacgccatccaggccatccccaggaaagcttttcggggagctacggaccttaaaaatttacggctggacaagaaccagatcagctgcattgaggaaggggccttccgtgctctgcgggggctggaggtgctgaccctgaacaacaacaatatcaccaccatccccgtgtccagcttcaaccatatgcccaagctacggaccttccgcctgcactccaaccacctgttttgcgactgccacctggcctggctctcgcagtggctgaggcagcggccaaccatcgggctcttcacccagtgctcgggcccagccagcctgcgtggcctcaatgtggcagaggtccagaagagtgagttcagctgctcaggccagggagaagcggggcgcgtgcccacctgcaccctgtcctccggctcctgcccggccatgtgcacctgcagcaatggcatcgtggactgtcgtggaaaaggcctcactgccatcccggccaacctgcccgagaccatgacggagatacgcctggagctgaacggcatcaagtccatccctcctggagccttctcaccctacagaaagctacggaggatagacctgagcaacaatcagatcgctgagattgcacccgacgccttccagggcctccgctccctgaactcgctggtcctctatggaaacaagatcacagacctcccccgtggtgtgtttggaggcctatacaccctacagctcctgctcctgaatgccaacaagatcaactgcatccggcccgatgccttccaggacctgcagaacctctcactgctctccctgtatgacaacaagatccagagcctcgccaagggcactttcacctccctgcgggccatccagactctgcacctggcccagaaccctttcatttgcgactgtaacctcaagtggctggcagacttcctgcgcaccaatcccatcgagacgagtggtgcccgctgtgccagtccccggcgcctcgccaacaagcgcatcgggcagatcaagagcaagaagttccggtgctcagccaaagagcagtacttcattccaggcacggaggattaccagctgaacagcgagtgcaacagcgacgtggtctgtccccacaagtgccgctgtgaggccaacgtggtggagtgctccagcctgaagctcaccaagatccctgagcgcatcccccagtccacggcagaactgcgattgaataacaatgagatttccatcctggaggccactgggatgtttaaaaaacttacacatctgaagaaaatcaatctgagcaacaacaaggtgtcagaaattgaagatggggccttcgagggcgcagcctctgtgagcgagctgcacctaactgccaaccagctggagtccatccggagcggcatgttccggggtctggatggcttgaggaccctaatgctgcggaacaaccgcatcagctgcatccacaacgacagcttcacgggcctgcgcaacgtccggctcctctcgctctacgacaaccagatcaccaccgtatccccaggagccttcgacaccctccagtccctctccacactgaatctcctggccaaccctttcaactgcaactgccagctggcctggctaggaggctggctacggaagcgcaagatcgtgacggggaacccgcgatgccagaaccctgactttttgcggcagattcccctgcaggacgtggccttccctgacttcaggtgtgaggaaggccaggaggaggggggctgcctgccccgcccacagtgcccacaggagtgcgcctgcctggacaccgtggtccgatgcagcaacaagcacctgcgggccctgcccaagggcattcccaagaatgtcacagaactctatttggacgggaaccagttcacgctggttccgggacagctgtctaccttcaagtacctgcagctcgtggacctgagcaacaacaagatcagttccttaagcaattcctccttcaccaacatgagccagctgaccactctgatcctcagctacaatgccctgcagtgcatcccgcctttggccttccagggactccgctccctgcgcctgctgtctctccacggcaatgacatctccaccctccaagagggcatctttgcagacgtgacctccctgtctcacctggccattggtgccaaccccctatactgtgactgccacctccgctggctgtccagctgggtgaagactggctacaaggaaccgggcattgctcgttgtgctgggccccaggacatggagggcaagctgctcctcaccacgcctgccaagaagtttgaatgccaaggtcctccaacgctggctgtccaggccaagtgtgatctctgcttgtccagtccgtgccagaaccagggcacctgccacaacgacccccttgaggtgtacaggtgcgcctgccccagcggctataagggtcgagactgtgaggtgtccctggacagctgttccagtggcccctgtgaaaatgggggcacctgccatgcacaggagggcgaggatgccccgttcacgtgctcctgtcccaccggctttgaaggaccaacctgtggggtgaacacagatgactgtgtggatcatgcctgtgccaatgggggcgtctgtgtggatggtgtgggcaactacacctgccagtgccccctgcagtatgagggaaaggcctgtgagcagctggtggacttgtgctctccggatctgaacccatgtcaacacgaggcccagtgtgtgggcaccccggatgggcccaggtgtgagtgcatgccaggttatgcaggtgacaactgcagtgagaaccaggatgactgcagggaccaccgctgccagaatggggcccagtgtatggatgaagtcaacagctactcctgcctctgtgctgagggctacagtggacagctctgtgagatccctccccatctgcctgcccccaagagcccctgtgaggggactgagtgccagaatggggccaactgtgtggaccagggcaacaggcctgtgtgccagtgcctcccaggcttcggtggccctgagtgtgagaagttgctcagtgtcaactttgtggatcgggacacttacctgcagttcactgacctgcaaaactggccacgggccaacatcacgttgcaggtctccacggcagaggacaatgggatccttctgtacaacggggacaacgaccacattgcagttgagctgtaccagggccatgtgcgtgtcagctacgacccaggcagctaccccagctctgccatctacagtgctgagacgatcaacgatgggcaattccacaccgttgagctggttgcctttgaccagatggtgaatctctccattgatggcgggagccccatgaccatggacaactttggcaaacattacacgctcaacagcgaggcgccactctatgtgggagggatgcccgtggatgtcaactcagctgccttccgcctgtggcagatcctcaacggcaccggcttccacggttgcatccgaaacctgtacatcaacaacgagctgcaggacttcaccaagacgcagatgaagccaggcgtggtgccaggctgcgaaccctgccgcaagctctactgcctgcatggcatctgccagcccaatgccaccccagggcccatgtgccactgcgaggctggctgggtgggcctgcactgtgaccagcccgctgacggcccctgccatggccacaagtgtgtccatgggcaatgcgtgcccctcgacgctctttcctacagctgccagtgccaggatgggtactcgggggcactgtgcaaccaggccggggccctggcagagccctgcagaggcctgcagtgcctgcatggccactgccaggcctcaggcaccaagggggcacactgtgtgtgtgaccccggcttttcgggcgagctgtgtgagcaaggtcaggggcccccctcctgacgtgccctccccagggtcccccacaaattgctttagcaatttgactcttcctcccagtctcggcagcccttctgtcccttcccagccctgtaccatgggctactatggggctttcagagtccctccaccctctgggcactgctcccaatctctcctggcccagtttgccctgcagctcccttattcagggtatgcgcctcttctggctggggtctctccttgcagaagagaccacccagggtaacagctcctggcccaacctctgcctcttggccccatcacctcatgacctgggagcggcagcaggaagtccgagggttggggactccttcccaggccctccctggcctgcttgaccaagatggcttctgctggaatccggactgctaaggctgggcagggagaagctggagaaacccagaactcaggcaccttaagggtcccctaggctatcccctccccagcatgaatccttttcataatgttattgcccccggggcctccagcctctcttgcacgcctctagcaatggggaccccccctccctccagcagttcagtctgtcctggagggccctgacgctaggaccagactgtaggccctgggaggaagcttgtgcatgtcagtgggaggcggaagtatgctggggacagaggtggggtctgagagccaaaggatccaccccacagatgctgccctcctcctcctcttcctcctgcctccctggaggcagcagctcacccatgggtgtgccctgaggctttctcttggtgtctgtcccatccagagtccgagtgccggggggaccctgtccgggactttcaccaggtccagaggggctatgccatctgccagaccacgcgccccctgtcatgggtggagtgccggggctcgtgcccaggccagggctgctgccagggccttcggctgaagcggaggaagttcacctttgagtgcagcgatgggacctcttttgccgaggaggtggaaaagcccaccaagtgtggctgtgccctctgcgcatagcgctgggcgtggacaggccggtgagggcgggcaaggggccccagccgctgcagcagcggagacagtcgccagcagctgggctggggtgcaggtcatcacaggacggctcctgggcagctgggccctcctgggtggggtggtgccagagcagccttttaaaagcaaattgcgccatagctgggggcagcgggggtgggcgaggcctgagctgcgggctgccctctccggaagtgccttgcacaaataggcgcttaataaatatttgttgagtgaatgtgtgcgtgaggtcaggccaagaagtgcagaacgatgacacccctccttacctgctatctgaatctggagaagaaaaatgacagccttccaaaccaacccttccctttggcctgtggcccaggctggcttggaactgggtctgtggccccagaagcctcttacccctctgcgggcaaccatgaagtactgtcagcctccccgggaagccagcctggttcattctgctgctacagaatctgctggtggtaggccaggctctggagcgggggtgccgcctcctgctggccagggagggtcggacccttgccccctgggctgactggcagctctgcagccacggcttgggaacgaggctgtgggtggaggtggttcttaggaccaggcctctgaatcctaaagttctagcatgactactgtagctgcgagggcttatgtggaggaaacagtcacaggggctgctcagggtggcagaccccactaaagagggcagagggttctttgctctagataaacaaacatcatctgcctccagacactggccacagtaggagtattggtcctgggcttccccagccaccagtcagccacaagctgtcggtgacctattggtagagggactgggtgtgagggtctgggccagggtgcttgacctgggagcagctggttcagagtccttcacaccgcaggccagtagggagcagtggaagggacagtgctccaggcattgggaagtccctgctggctctatcactcggggcaaacttctccccacctgggccttgggttcttcagctataaaatggccagaggtggggggcgggatgactaaaggaacagtgcagactcccccactgtggtcttgggaggccagaggagttagaagacctatctatctatctatctatctacattgatcacatcaaaagtatttatgtgcctaacccggggctggggattgtggacgttctggcctaatggacagatgtgaactcatcccagagcatcgcaggaatgaccaggatgcccgggaagagttgagctgagtgggggctccagccacagacagcggcccaggccagggagttgctggcaacgaaggagccagtggtggaagaagaagaggccctgaatatacgattgcctgcccacgttgtcttctcttccatacacagtgaaaatgtagaaagatggtttgtgaggccaaactgtgaatgggctaaagggaggcaaagttgcactctccttccccagagggctcaccaagagggcacacccccgggggttctggtgggcaacgggggtgagcatgtccctgccctggctccctccatctgtgaccaggaggcatggctgggtgtatgttcaggtgaggctcagagtggcattgtgtccctgtcccctgcccagggcagtgaggggagcccttgatgctgattagaaggctagaactggggtagaggtgcctggcatgtctcatgccatggggactcaatctagcaactgtgagtcctggggtccctgtgatgggaagagggcagtgccctgcccaatgtggcaggtgtcctcatggcaggatctgcccctcaccagggggctgggatctacttgcttggagctctgagcaaggccacaatgcccgcccccacccccaagtagactgcagcctgggcctcatggggcttctcccaggcccacatggcatccctctctgagtttccaggccaccgtgggaccctgcagagcatctgcaccgggctggatagggcagaaaagctcaagggcagctagcttgcctcttccctggaagaaaggtgctctgggactcaccaaccctgagaaagatagctttcctggccaccaccattccccaccaccctggagaagccaattcccaggcttgaagggcactggctggcaggaggcctcttcattctgcaggaggtggaaaggacacctgtagacaggtgatgctcacccctcacctggcgccatggggctgggaggtgagcggctggcatgtttgttcctagggagcaccatgtgagcttaaggctcccctgaccggccccaccacatggcccagcctcctagcacagcagcgctgacctcagtgcagtctgaggattggaatccaccatgagatgatgtgagagctgtgtgccccaggatcaactttttctccaacttggccatcagccagcgagttgctaaggacctgagtcagcactcacgttgcctattcacactccgcttgaaagtccggaaggtggctactgcaaaatcacccctctgagaagtcctctctccacatcttgtccccctttgtgaagacccctagttcgctctgcattttaggcatgaagagatacagcagggtgcgtccggagggagctgtggccttgcaacaccactggcaacagggccggggctcccggtgaaggtgtcaggaagtggaaaaggctggactttgtctcctctttgcctgctggtagcctaaccgcaaaagtatctctttatacagaatacttacagattctaatatatatttgtatttcattttgttacagtatttttatatgttaaagtcaacatccagcgtcttgttttgcctttcagatgctatgtggtcgtggcacgttttgttgggggtttctgtagtcgtcttgtttggatcaactcctagaggctggtttagaacaggcccatgagggagctgcacctgccctggaagtattgttttagactatgtcgatattgtctgttgtcttccatgtgaacatgacattgagtcac

SEQ ID NO: 440205 - DNA, 3819 bp, Homo sapiens
gggagacgcaggcggcgaaacggcagaggagccgagccccctccgcccaaggcgccctccctccgtccgcgcacaggcgccgtcgcttggaggagcaaggtgcctcccagcccgcaggggcgccgcgcgcaagcccgcgggctcttcggtggctctgccccgggactgcacctggaggcggccccggacggggatggtcagcggctgctgccgtctggctcgcgagcgggacgctgtgagggcaccatggcgctgactcccgggtgggggtcctcggcggggccggtccggccggagctctggctgctgctgtgggcagccgcgtggcgcctgggtgcctcggcgtgccccgccctctgcacctgcaccggaaccacggtggactgccacggcacggggctgcaggccattcccaagaatatacctcggaacaccgagcgcctggaactcaatggcaacaacatcactcggatccataagaatgactttgcggggctcaagcagctgcgggtgctgcagctgatggagaaccagattggagcagtggaacgtggtgcttttgatgacatgaaggagctggagcggctgcgactgaaccgaaaccagctgcacatgttaccggaactgctgttccagaacaaccaggctttgtcaagactggacttgagtgagaacgccatccaggccatccccaggaaagcttttcggggagctacggaccttaaaaatttacggctggacaagaaccagatcagctgcattgaggaaggggccttccgtgctctgcgggggctggaggtgctgaccctgaacaacaacaatatcaccaccatccccgtgtccagcttcaaccatatgcccaagctacggaccttccgcctgcactccaaccacctgttttgcgactgccacctggcctggctctcgcagtggctgaggcagcggccaaccatcgggctcttcacccagtgctcgggcccagccagcctgcgtggcctcaatgtggcagaggtccagaagagtgagttcagctgctcaggccagggagaagcggggcgcgtgcccacctgcaccctgtcctccggctcctgcccggccatgtgcacctgcagcaatggcatcgtggactgtcgtggaaaaggcctcactgccatcccggccaacctgcccgagaccatgacggagatacgcctggagctgaacggcatcaagtccatccctcctggagccttctcaccctacagaaagctacggaggatagacctgagcaacaatcagatcgctgagattgcacccgacgccttccagggcctccgctccctgaactcgctggtcctctatggaaacaagatcacagacctcccccgtggtgtgtttggaggcctatacaccctacagctcctgctcctgaatgccaacaagatcaactgcatccggcccgatgccttccaggacctgcagaacctctcactgctctccctgtatgacaacaagatccagagcctcgccaagggcactttcacctccctgcgggccatccagactctgcacctggcccagaaccctttcatttgcgactgtaacctcaagtggctggcagacttcctgcgcaccaatcccatcgagacgagtggtgcccgctgtgccagtccccggcgcctcgccaacaagcgcatcgggcagatcaagagcaagaagttccggtgctcagccaaagagcagtacttcattccaggcacggaggattaccagctgaacagcgagtgcaacagcgacgtggtctgtccccacaagtgccgctgtgaggccaacgtggtggagtgctccagcctgaagctcaccaagatccctgagcgcatcccccagtccacggcagaactgcgattgaataacaatgagatttccatcctggaggccactgggatgtttaaaaaacttacacatctgaagaaaatcaatctgagcaacaacaaggtgtcagaaattgaagatggggccttcgagggcgcagcctctgtgagcgagctgcacctaactgccaaccagctggagtccatccggagcggcatgttccggggtctggatggcttgaggaccctaatgctgcggaacaaccgcatcagctgcatccacaacgacagcttcacgggcctgcgcaacgtccggctcctctcgctctacgacaaccagatcaccaccgtatccccaggagccttcgacaccctccagtccctctccacactgaatctcctggccaaccctttcaactgcaactgccagctggcctggctaggaggctggctacggaagcgcaagatcgtgacggggaacccgcgatgccagaaccctgactttttgcggcagattcccctgcaggacgtggccttccctgacttcaggtgtgaggaaggccaggaggaggggggctgcctgccccgcccacagtgcccacaggagtgcgcctgcctggacaccgtggtccgatgcagcaacaagcacctgcgggccctgcccaagggcattcccaagaatgtcacagaactctatttggacgggaaccagttcacgctggttccgggacagctgtctaccttcaagtacctgcagctcgtggacctgagcaacaacaagatcagttccttaagcaattcctccttcaccaacatgagccagctgaccactctgatcctcagctacaatgccctgcagtgcatcccgcctttggccttccagggactccgctccctgcgcctgctgtctctccacggcaatgacatctccaccctccaagagggcatctttgcagacgtgacctccctgtctcacctggccattggtgccaaccccctatactgtgactgccacctccgctggctgtccagctgggtgaagactggctacaaggaaccgggcattgctcgttgtgctgggccccaggacatggagggcaagctgctcctcaccacgcctgccaagaagtttgaatgccaaggtcctccaacgctggctgtccaggccaagtgtgatctctgcttgtccagtccgtgccagaaccagggcacctgccacaacgacccccttgaggtgtacaggtgcgcctgccccagcggctataagggtcgagactgtgaggtgtccctggacagctgttccagtggcccctgtgaaaatgggggcacctgccatgcacaggagggcgaggatgccccgttcacgtgctcctgtcccaccggctttgaaggaccaacctgtggggtgaacacagatgactgtgtggatcatgcctgtgccaatgggggcgtctgtgtggatggtgtgggcaactacacctgccagtgccccctgcagtatgagggaaaggcctgtgagcagctggtggacttgtgctctccggatctgaacccatgtcaacacgaggcccagtgtgtgggcaccccggatgggcccaggtgtgagtgcatgccaggttatgcaggtgacaactgcagtgagaaccaggatgactgcagggaccaccgctgccagaatggggcccagtgtatggatgaagtcaacagctactcctgcctctgtgctgagggctacagtggacagctctgtgagatccctccccatctgcctgcccccaagagcccaggtgtgagtgcatgccaggttatgcaggtgacaactgcagtgagaaccaggatgactgcagggaccaccgctgccagaatggggcccagtgtatggatgaagtcaacagctactcctgcctctgtgctgagggctacagtggacagctctgtgagatccctccccatctgcctgcccccagag

SEQ ID NO: 440206 - DNA, 463 bp, Homo sapiens
atttattggctgaggtcctactagttgtgatgtgtaagtgttctgcttatgaatgttaagacctgtacttgatttcattttactaaaataagtgggcctgggtctttttttttttttttttcctccatcagtttatccaaggcacagcagagctccgtggtgacacctcaccacatctcaggcatccgggctgtctcccgacctccccacgggccacactcatagttccttgtcttgtgcagttgtgaatctatgtcaaacaaaagactgtccttaaaatatgagctgtgggtcagcttgctgtttctttagactgttgatttctgatgtttccatgtaatacttgtgtgcctactgtatgccagggcactgtgcagagccctggaagtacctcaggtcccagacaggatgaggcccctggccttcctggagcttttatccattctcctgacccagtgcctag

SEQ ID NO: 440207 - DNA, 450 bp, Homo sapiens
acgggtgcctgtaataaattaaattaattactattttaaaaacccaggtgttgaagggtctagtgtaatatcttttcatcctcaaaacgagttctatgagatagccaatattattccccccattttgaaaaatcaatgcccttattaatgtggttaaagtgaaagttcagaaggtaatggggagagaaccagacatatctgtttggcacttaaaaggttaagtttaatagggacaaagaagtcagtcaaagaatgcatgtaaagaaatatgcaacttatgccaggcacagtggctcacgcctgtaatcccaacactttgggaggccaaggcgggaggatcacttgagcccaggagttcaagaccagcccggtcaacagagcaagaccctgtctctattaaaaaagtatgtataccctggtgtaatgtcagcagatttacatgtatgtggg

SEQ ID NO: 440208 - DNA, 4126 bp, Homo sapiens
ctcagaggctggagggatcctccgtatgctgaacgctggtcccctgggccccctttatttctttctctatactttgtttctgtgtctttttctcttccaaagtctctcgttccacctaacgagaaacacccacaggtgtggaggggcaacccatcccttcagacaattgggaggtgagggccgattgccttacacggtgagacaagcggcctgactcgtgactatttttttggacaaatcaggcagccactgactcccttcattatggcctcagctttatctctgggcaataagtgtgatcccttccttcgctgcgtcctttgcaggggcggtggcgctctgcaaggcccaagggggcgtggtccagatgactttgaatcccagttgtcgcccccagggtcagccaggagactagtcagaagcaaacgcgcctgcggcaatccgcccgatgcctttggtctctctcgggcttccgtccacccgcccctcccccgcgtttccattggctgtagctccggcccggggcgggcgaagagggagcgagtgggcggggccgcgtggcgtcagcgcaagatggcggcctcggcagcggtgttctcgcgcttgcgaagcgggctccggctcggctcgcggggactgtgcacgaggttggcgacgccgccccgccgggccccagatcaggccgcagagatcgggagccgcgggagcactaaggcgcaagggccacagcagcagccgggctcagagggtcccagctatgccaaaaaagttgcgctctggcttgctgggctgcttggagctggtgggactgtgagcgtcgtctatatctttggaaacaacccggtggacgaaaatggtgccaagattcctgatgagttcgacaatgatccaattctggtacagcagttgcgccggacatacaaatatttcaaagattatagacagatgatcatcgagcccaccagcccttgccttctcccagaccctctgcaggaaccgtactaccagccaccctacacgctcgttttggagctcaccggcgtcctcttgcatcctgagtggtcgctggccactggctggaggtttaagaagcgcccaggcatcgagaccttgttccagcagcttgcccctttatatgaaattgtcatctttacgtcagagactggcatgactgcgtttccactcattgatagtgtggacccccatggcttcatctcctaccgcctattccgggacgccacaagatacatggatggacaccatgtaaaggatatttcatgtctgaatcgggacccagctcgagtagtagttgtggactgcaagaaggaagccttccgcctgcagccctataacggcgttgccctgcggccctgggacggcaactctgatgaccgggtcttgttggatctgtctgccttcctcaagaccattgcactgaatggtgtggaggacgtgcgaaccgtgctggagcactatgccctggaggatgacccgctggcggctttcaaacagcggcaaagccggctagagcaggaggagcagcagcgcctggccgagctctccaagtccaacaagcagaacctcttccttggctccctcaccagccgcttgtggcctcgctccaaacagccctgaactctgggcctcctcaaactcagtgcctgggtccagggccccagtgcttccagaccaagacttgggccaccacttgtccaataaagtacatcccagacgccacacctgctgtgtcccgagagtctccagatgggggcatcagggtgaggtccgggactcttgggtcatcgtcccacagtggctgatcggctgccaagcacagtgggggtgctttgttggatcagagcagatttttcaccctggtctcggaatctaaaaaccctcgctgtgtcttcctgtgtgttgcgtgatctgtgaaaaatacatctccctctgaccacagactcctcatctgtggagaagggaagagaggatggcacttggctttaaagacaggtagctgccaggctactgtggagagaatgtgttatgggcctagtgggcctctggtggaccagagattacccctctcaacaggccagctgctggttggctccagccagtgtggccctggggtaaagggggcctggagttgcttgacacgccagttgttcaaaagaagcaagaacttgggaatatttttttttttttttggagacagggtctcactgttgcccaggctggagcacagtggtgtaactatagctcactgcagtgttgaacttctgggctcaaacaatcttcctgccttggcctccccaaatgctgagattataggagtgagccactctgcccaactacttttaattaaatagccacatgtgtctcctgtattgacagtaccactgtgtattaagagtatgagtcccagattgtgtaagttcaaatccaagctctaccacttctcggctggcttgtgatcctgtgcaagttactttacctctcagtgcctcggtttctacatttataaaataataactgggcaggcacagtggctcatggctgtcatcccaacacttcaggaggccgaggtgggaggatcgcctgaggccaggagttggagagcagcctgggcaacatgggaagagcctgtctcttgcggggggggggagaagaaagttcttgtctcaggctagctttggggaccaaatgaagcactcccatgtaggcactcaaatggaactatgtaaaccttaggcaaggcacctctgcctcagtttcctcatctctaaaatggggtgatggtagtatgttagcagagtggttgtgaggagtgaacgggacagtccgtatgtgggttatatgtatatattcccaggtgcttgctgttaccaggccatatgggttattcacagattgaaatatcttagctgggcacggtggctcacccctataatcccagcactttgggagaccgaggcgggtggatcacctgaggtcaggagttcgagaccagcctggccaacatggtgaaaccctgtctctactaaaaaaatacaaataaattagctgggcatggtggtgggtgcctgtagtcccagctacttgggaggctgaggcaggagaatcgattaaacccaggaggcagaggttgcagtgagctgagatcacaccattgcactccagcctgggcgacagagtaaggctctgtctccaaaaaaaaaaaaaaaaaaaaaaacaaaaaaaaaaccagtttgactttatctccctcgccctgcctccatccccacattgccccccactatcccagtctctcctactccagccttcatctagtgctaactgattaaatattctaagatgaccttctctggtgtgtgtgatgataattaaaaggcattcagaactgtgtggaccagactgaacctctgcactctagatttttttttttttgaagcctctacaaaggataattaaaatttacaccatgactctttgtcctggggtgcactgtctgtaagccggtggagttatttcccaaaatccttggtccttcccagcttgaggaagtctgcaggactgagggaggggacctgtgctttttttttggtttttttggagatggagtctctgttgcccaggctggagtgcagtggggcgatctcggctcactgcaccctgcacctcctgggttcaagtgattctcctgcctcaggctcccaagtagctgggattacaggcgtgtgccactgtcaggcctctgagcccaagccaagccatcgcatcccctgtgccttgcacatatacacccagatggcctgaagtaactgaagaatcacaaaagaagtgaaaaggccctgccccgccttaactgatgacattccaccattgtgatttgttcctgccccaccttaactgagtgattaaccctgcaaattttcttctcctggctcagaagcacccccactgagcaccttgcgaccccccactcctgcccgccctttgactgtaattttccattaccttcccaaatactataaaacagccccacccctatctcccttcgctgactcttttcggactcagcccacctgcacccaggtgaaataaacagctttattgctcacacaaa

SEQ ID NO: 440209 - DNA, 3253 bp, Homo sapiens
ctcagaggctggagggatcctccgtatgctgaacgctggtcccctgggccccctttatttctttctctatactttgtttctgtgtctttttctcttccaaagtctctcgttccacctaacgagaaacacccacaggtgtggaggggcaacccatcccttcagacaattgggaggtgagggccgattgccttacacggtgagacaagcggcctgactcgtgactatttttttggacaaatcaggcagccactgactcccttcattatggcctcagctttatctctgggcaataagtgtgatcccttccttcgctgcgtcctttgcaggggcggtggcgctctgcaaggcccaagggggcgtggtccagatgactttgaatcccagttgtcgcccccagggtcagccaggagactagtcagaagcaaacgcgcctgcggcaatccgcccgatgcctttggtctctctcgggcttccgtccacccgcccctcccccgcgtttccattggctgtagctccggcccggggcgggcgaagagggagcgagtgggcggggccgcgtggcgtcagcgcaagatggcggcctcggcagcggtgttctcgcgcttgcgaagcgggctccggctcggctcgcggggactgtgcacgaggttggcgacgccgccccgccgggccccagatcaggccgcagagatcgggagccgcgggagcactaaggcgcaagggccacagcagcagccgggctcagagggtcccagctatgccaaaaaagttgcgctctggcttgctgggctgcttggagctggtgggactgtgagcgtcgtctatatctttggaaacaacccggtggacgaaaatggtgccaagattcctgatgagttcgacaatgatccaattctggtacagcagttgcgccggacatacaaatatttcaaagattatagacagatgatcatcgagcccaccagcccttgccttctcccagaccctctgcaggaaccgtactaccagccaccctacacgctcgttttggagctcaccggcgtcctcttgcatcctgagtggtcgctggccactggctggaggtttaagaagcgcccaggcatcgagaccttgttccagcagcttgcccctttatatgaaattgtcatctttacgtcagagactggcatgactgcgtttccactcattgatagtgtggacccccatggcttcatctcctaccgcctattccgggacgccacaagatacatggatggacaccatgtaaaggatatttcatgtctgaatcgggacccagctcgagtagtagttgtggactgcaagaaggaagccttccgcctgcagccctataacggcgttgccctgcggccctgggacggcaactctgatgaccgggtcttgttggatctgtctgccttcctcaagaccattgcactgaatggtgtggaggacgtgcgaaccgtgctggagcactatgccctggaggatgacccgctggcggctttcaaacagcggcaaagccggctagagcaggaggagcagcagcgcctggccgagctctccaagtccaacaagcagaacctcttccttggctccctcaccagccgcttgtggcctcgctccaaacagccctgaactctgggcctcctcaaactcagtgcctgggtccagggccccagtgcttccagaccaagacttgggccaccacttgtccaataaagtacatcccagacgccacacctgctgtgtcccgagagtctccagatgggggcatcagggtgaggtccgggactcttgggtcatcgtcccacagtggctgatcggctgccaagcacagtgggggtgctttgttggatcagagcagatttttcaccctggtctcggaatctaaaaaccctcgctgtgtcttcctgtgtgttgcgtgatctgtgaaaaatacatctccctctgaccacagactcctcatctgtggagaagggaagagaggatggcacttggctttaaagacaggtagctgccaggctactgtggagagaatgtgttatgggcctagtgggcctctggtggaccagagattacccctctcaacaggccagctgctggttggctccagccagtgtggccctggggtaaagggggcctggagttgcttgacacgccagttgttcaaaagaagcaagaacttgggaatatttttttttttttttggagacagggtctcactgttgcccaggctgaggcaggagaatcgattaaacccaggaggcagaggttgcagtgagctgagatcacaccattgcactccagcctgggcgacagagtaaggctctgtctccaaaaaaaaaaaaaaaaaaaaaaacaaaaaaaaaaccagtttgactttatctccctcgccctgcctccatccccacattgccccccactatcccagtctctcctactccagccttcatctagtgctaactgattaaatattctaagatgaccttctctggtgtgtgtgatgataattaaaaggcattcagaactgtgtggaccagactgaacctctgcactctagatttttttttttttgaagcctctacaaaggataattaaaatttacaccatgactctttgtcctggggtgcactgtctgtaagccggtggagttatttcccaaaatccttggtccttcccagcttgaggaagtctgcaggactgagggaggggacctgtgctttttttttggtttttttggagatggagtctctgttgcccaggctggagtgcagtggggcgatctcggctcactgcaccctgcacctcctgggttcaagtgattctcctgcctcaggctcccaagtagctgggattacaggcgtgtgccactgtcaggcctctgagcccaagccaagccatcgcatcccctgtgccttgcacatatacacccagatggcctgaagtaactgaagaatcacaaaagaagtgaaaaggccctgccccgccttaactgatgacattccaccattgtgatttgttcctgccccaccttaactgagtgattaaccctgcaaattttcttctcctggctcagaagcacccccactgagcaccttgcgaccccccactcctgcccgccctttgactgtaattttccattaccttcccaaatactataaaacagccccacccctatctcccttcgctgactcttttcggactcagcccacctgcacccaggtgaaataaacagctttattgctcacacaaa

SEQ ID NO: 440210 - DNA, 2643 bp, Homo sapiens
ctcagaggctggagggatcctccgtatgctgaacgctggtcccctgggccccctttatttctttctctatactttgtttctgtgtctttttctcttccaaagtctctcgttccacctaacgagaaacacccacaggtgtggaggggcaacccatcccttcagacaattgggaggtgagggccgattgccttacacggtgagacaagcggcctgactcgtgactatttttttggacaaatcaggcagccactgactcccttcattatggcctcagctttatctctgggcaataagtgtgatcccttccttcgctgcgtcctttgcaggggcggtggcgctctgcaaggcccaagggggcgtggtccagatgactttgaatcccagttgtcgcccccagggtcagccaggagactagtcagaagcaaacgcgcctgcggcaatccgcccgatgcctttggtctctctcgggcttccgtccacccgcccctcccccgcgtttccattggctgtagctccggcccggggcgggcgaagagggagcgagtgggcggggccgcgtggcgtcagcgcaagatggcggcctcggcagcggtgttctcgcgcttgcgaagcgggctccggctcggctcgcggggactgtgcacgaggttggcgacgccgccccgccgggccccagatcaggccgcagagatcgggagccgcgggagcactaaggcgcaagggccacagcagcagccgggctcagagggtcccagctatgccaaaaaagttgcgctctggcttgctgggctgcttggagctggtgggactgtgagcgtcgtctatatctttggaaacaacccggtggacgaaaatggtgccaagattcctgatgagttcgacaatgatccaattctggtacagcagttgcgccggacatacaaatatttcaaagattatagacagatgatcatcgagcccaccagcccttgccttctcccagaccctctgcaggaaccgtactaccagccaccctacacgctcgttttggagctcaccggcgtcctcttgcatcctgagtggtcgctggccactggctggaggtttaagaagcgcccaggcatcgagaccttgttccagcagcttgcccctttatatgaaattgtcatctttacgtcagagactggcatgactgcgtttccactcattgatagtgtggacccccatggcttcatctcctaccgcctattccgggacgccacaagatacatggatggacaccatgtaaaggatatttcatgtctgaatcgggacccagctcgagtagtagttgtggactgcaagaaggaagccttccgcctgcagccctataacggcgttgccctgcggccctgggacggcaactctgatgaccgggtcttgttggatctgtctgccttcctcaagaccattgcactgaatggtgtggaggacgtgcgaaccgtgctggagcactatgccctggaggatgacccgctggcggctttcaaacagcggcaaagccggctagagcaggaggagcagcagcgcctggccgagctctccaagtccaacaagcagaacctcttccttggctccctcaccagccgcttgtggcctcgctccaaacagccctgaactctgggcctcctcaaactcagtgcctgggtccagggccccagtgcttccagaccaagacttgggccaccacttgtccaataaagtacatcccagacgccacacctgctgtgtcccgagagtctccagatgggggcatcagggtgaggtccgggactcttgggtcatcgtcccacagtggctgatcggctgccaagcacagtgggggtgctttgttggatcagagcagatttttcaccctggtctcggaatctaaaaaccctcgctgtgtcttcctgtgtgttgcgtgatctgtgaaaaatacatctccctctgaccacagactcctcatctgtggagaagggaagagaggatggcacttggctttaaagacaggtagctgccaggctactgtggagagaatgtgttatgggcctagtgggcctctggtggaccagagattacccctctcaacaggccagctgctggttggctccagccagtgtggccctggggtaaagggggcctggagttgcttgacacgccagttgttcaaaagaagcaagaacttgggaatatttttttttttttttggagacagggtctcactgttgcccaggctggagtgcattgatgtgatcttagcttacaacagccttgacctcccgggttcaagcaatgctcccgcctcagcctcccaagtagctgagattacaggcgcacaccaccacgcccggctaatttttgtatttttttagtagagacagggtttcaccatgttggttaggctggtctcgaactcctgacctcgtgatccgcccgcctcggcctcccagggtgctgggattgcaggcatgagccaccatgcctggccccacataaagtttctgagcacttgaaatgtggctagtgtgactgagaaactgaatttttaattttgtttgagactgggcacagtggctcacgcctgtaatcctgacactttgggaggccgaagcaggaggattgcttgaatccaggagtacgaga

SEQ ID NO: 440211 - DNA, 2883 bp, Homo sapiens
ctcagaggctggagggatcctccgtatgctgaacgctggtcccctgggccccctttatttctttctctatactttgtttctgtgtctttttctcttccaaagtctctcgttccacctaacgagaaacacccacaggtgtggaggggcaacccatcccttcagacaattgggaggtgagggccgattgccttacacggtgagacaagcggcctgactcgtgactatttttttggacaaatcaggcagccactgactcccttcattatggcctcagctttatctctgggcaataagtgtgatcccttccttcgctgcgtcctttgcaggggcggtggcgctctgcaaggcccaagggggcgtggtccagatgactttgaatcccagttgtcgcccccagggtcagccaggagactagtcagaagcaaacgcgcctgcggcaatccgcccgatgcctttggtctctctcgggcttccgtccacccgcccctcccccgcgtttccattggctgtagctccggcccggggcgggcgaagagggagcgagtgggcggggccgcgtggcgtcagcgcaagatggcggcctcggcagcggtgttctcgcgcttgcgaagcgggctccggctcggctcgcggggactgtgcacgaggttggcgacgccgccccgccgggccccagatcaggccgcagagatcgggagccgcgggagcactaaggcgcaagggccacagcagcagccgggctcagagggtcccagctatgccaaaaaagttgcgctctggcttgctgggctgcttggagctggtgggactgtgagcgtcgtctatatctttggaaacaacccggtggacgaaaatggtgccaagattcctgatgagttcgacaatgatccaattctggtacagcagttgcgccggacatacaaatatttcaaagattatagacagatgatcatcgagcccaccagcccttgccttctcccagaccctctgcaggaaccgtactaccagccaccctacacgctcgttttggagctcaccggcgtcctcttgcatcctgagtggtcgctggccactggctggaggtttaagaagcgcccaggcatcgagaccttgttccagcagcttgcccctttatatgaaattgtcatctttacgtcagagactggcatgactgcgtttccactcattgatagtgtggacccccatggcttcatctcctaccgcctattccgggacgccacaagatacatggatggacaccatgtaaaggatatttcatgtctgaatcgggacccagctcgagtagtagttgtggactgcaagaaggaagccttccgcctgcagccctataacggcgttgccctgcggccctgggacggcaactctgatgaccgggtcttgttggatctgtctgccttcctcaagaccattgcactgaatggtgtggaggacgtgcgaaccgtgctggagcactatgccctggaggatgacccgctggcggctttcaaacagcggcaaagccggctagagcaggaggagcagcagcgcctggccgagctctccaagtccaacaagcagaacctcttccttggctccctcaccagccgcttgtggcctcgctccaaacagccctgaactctgggcctcctcaaactcagtgcctgggtccagggccccagtgcttccagaccaagacttgggccaccacttgtccaataaagtacatcccagacgccacacctgctgtgtcccgagagtctccagatgggggcatcagggtgaggtccgggactcttgggtcatcgtcccacagtggctgatcggctgccaagcacagtgggggtgctttgttggatcagagcagatttttcaccctggtctcggaatctaaaaaccctcgctgtgtcttcctgtgtgttgcgtgatctgtgaaaaatacatctccctctgaccacagactcctcatctgtggagaagggaagagaggatggcacttggctttaaagacaggtagctgccaggctactgtggagagaatgtgttatgggcctagtgggcctctggtggaccagagattacccctctcaacaggccagctgctggttggctccagccagtgtggccctggggtaaagggggcctggagttgcttgacacgccagttgttcaaaagaagcaagaacttgggaatatttttttttttttttggagacagggtctcactgttgcccaggctggagcacagtggtgtaactatagctcactgcagtgttgaacttctgggctcaaacaatcttcctgccttggcctccccaaatgctgagattataggagtgagccactctgcccaactacttttaattaaatagccacatgtgtctcctgtattgacagtaccactgtgtattaagagtatgagtcccagattgtgtaagttcaaatccaagctctaccacttctcggctggcttgtgatcctgtgcaagttactttacctctcagtgcctcggtttctacatttataaaataataactgggcaggcacagtggctcatggctgtcatcccaacacttcaggaggccgaggtgggaggatcgcctgaggccaggagttggagagcagcctgggcaacatgggaagagcctgtctcttgcggggggggggagaagaaagttcttgtctcaggctagctttggggaccaaatgaagcactcccattgagcaccttgcgaccccccactcctgcccgccctttgactgtaattttccattaccttcccaaatactataaaacagccccacccctatctcccttcgctgactcttttcggactcagcccacctgcacccaggtgaaataaacagctttattgctcacacaaa

SEQ ID NO: 440212 - DNA, 1780 bp, Homo sapiens
ctcagaggctggagggatcctccgtatgctgaacgctggtcccctgggccccctttatttctttctctatactttgtttctgtgtctttttctcttccaaagtctctcgttccacctaacgagaaacacccacaggtgtggaggggcaacccatcccttcagacaattgggaggtgagggccgattgccttacacggtgagacaagcggcctgactcgtgactatttttttggacaaatcaggcagccactgactcccttcattatggcctcagctttatctctgggcaataagtgtgatcccttccttcgctgcgtcctttgcaggggcggtggcgctctgcaaggcccaagggggcgtggtccagatgactttgaatcccagttgtcgcccccagggtcagccaggagactagtcagaagcaaacgcgcctgcggcaatccgcccgatgcctttggtctctctcgggcttccgtccacccgcccctcccccgcgtttccattggctgtagctccggcccggggcgggcgaagagggagcgagtgggcggggccgcgtggcgtcagcgcaagatggcggcctcggcagcggtgttctcgcgcttgcgaagcgggctccggctcggctcgcggggactgtgcacgaggttggcgacgccgccccgccgggccccagatcaggccgcagagatcgggagccgcgggagcactaaggcgcaagggccacagcagcagccgggctcagagggtcccagctatgccaaaaaagttgcgctctggcttgctgggctgcttggagctggtgggactgtgagcgtcgtctatatctttggaaacaacccggtggacgaaaatggtgccaagattcctgatgagttcgacaatgatccaattctggtacagcagttgcgccggacatacaaatatttcaaagattatagacagatgatcatcgagcccaccagcccttgccttctcccagaccctctgcaggaaccgtactaccagccaccctacacgctcgttttggagctcaccggcgtcctcttgcatcctgagtggtcgctggccactggctggaggtttaagaagcgcccaggcatcgagaccttgttccagcagcttgcccctttatatgaaattgtcatctttacgtcagagactggcatgactgcgtttccactcattgatagtgtggacccccatggcttcatctcctaccgcctattccgggacgccacaagatacatggatggacaccatgtaaaggatatttcatgtctgaatcgggacccagctcgagtagtagttgtggactgcaagaaggaagccttccgcctgcagccctataacggcgttgccctgcggccctgggacggcaactctgatgaccgggtcttgttggatctgtctgccttcctcaagaccattgcactgaatggtgtggaggacgtgcgaaccgtgctggagcactatgccctggaggatgacccgctggcggctttcaaacagcggcaaagccggctagagcaggaggagcagcagcgcctggccgagctctccaagtccaacaagcagaacctcttccttggctccctcaccagccgcttgtggcctcgctccaaacagccctgaactctgggcctcctcaaactcagtgcctgggtccagggccccagtgcttccagaccaagacttgggccaccacttgtccaataaagtacatcccagacgccacaaaaaaaaaaaaaaaaaaaccggggcctttcgggggggaaaa

SEQ ID NO: 440213 - DNA, 2927 bp, Homo sapiens
  misc_feature (4)..(4): n is a, c, g, or t
  misc_feature (31)..(31): n is a, c, g, or t
aaantacggctaggtacgaggcctggttttnaatcggccgaggcggcagcggtgttctcgcgcttgcgaagcgggctccggctcggctcgcggggactgtgcacgaggttggcgacgccgccccgccgggccccagatcaggccgcagagatcgggagccgcgggagcactaaggcgcaagggccacagcagcagccgggctcagagggtcccagctatgccaaaaaagttgcgctctggcttgctgggctgcttggagctggtgggactgtgagcgtcgtctatatctttggaaacaacccggtggacgaaaatggtgccaagattcctgatgagttcgacaatgatccaattctggtacagcagttgcgccggacatacaaatatttcaaagattatagacagatgatcatcgagcccaccagcccttgccttctcccagaccctctgcaggaaccgtactaccagccaccctacacgctcgttttggagctcaccggcgtcctcttgcatcctgagtggtcgctggccactggctggaggtttaagaagcgcccaggcatcgagaccttgttccagcagcttgcccctttatatgaaattgtcatctttacgtcagagactggcatgactgcgtttccactcattgatagtgtggacccccatggcttcatctcctaccgcctattccgggacgccacaagatacatggatggacaccatgtaaaggatatttcatgtctgaatcgggacccagctcgagtagtagttgtggactgcaagaaggaagccttccgcctgcagccctataacggcgttgccctgcggccctgggacggcaactctgatgaccgggtcttgttggatctgtctgccttcctcaagaccattgcactgaatggtgtggaggacgtgcgaaccgtgctggagcactatgccctggaggatgacccgctggcggctttcaaacagcggcaaagccggctagagcaggaggagcagcagcgcctggccgagctctccaagtccaacaagcagaacctcttccttggctccctcaccagccgcttgtggcctcgctccaaacagccctgaactctgggcctcctcaaactcagtgcctgggtccagggccccagtgcttccagaccaagacttgggccaccacttgtccaataaagtacatcccagacgccacacctgctgtgtcccgagagtctccagatgggggcatcagggtgaggtccgggactcttgggtcatcgtcccacagtggctgatcggctgccaagcacagtgggggtgctttgttggatcagagcagatttttcaccctggtctcggaatctaaaaaccctcgctgtgtcttcctgtgtgttgcgtgatctgtgaaaaatacatctccctctgaccacagactcctcatctgtggagaagggaagagaggatggcacttggctttaaagacaggtagctgccaggctactgtggagagaatgtgttatgggcctagtgggcctctggtggaccagagattacccctctcaacaggccagctgctggttggctccagccagtgtggccctggggtaaagggggcctggagttgcttgacacgccagttgttcaaaagaagcaagaacttgggaatatttttttttttttttggagacagggtctcactgttgcccaggctggagcacagtggtgtaactatagctcactgcagtgttgaacttctgggctcaaacaatcttcctgccttggcctccccaaatgctgagattataggagtgagccactctgcccaactacttttaattaaatagccacatgtgtctcctgtattgacagtaccactgtgtattaagagtatgagtcccagattgtgtaagttcaaatccaagctctaccacttctcggctggcttgtgatcctgtgcaagttactttacctctcagtgcctcggtttctacatttataaaataataactgggcaggcacagtggctcatggctgtcatcccaacacttcaggaggccgaggtgggaggatcgcctgaggccaggagttggagagcagcctgggcaacatgggaagagcctgtctcttgcggggggggggagaagaaagttcttgtctcaggctagctttggggaccaaatgaagcactcccatgtaggcactcaaatggaactatgtaaaccttaggcaaggcacctctgcctcagtttcctcatctctaaaatggggtgatggtagtatgttagcagagtggttgtgaggagtgaacgggacagtccgtatgtgggttatatgtatatattcccaggtgcttgctgttaccaggccatatgggttattcacagattgaaatatcttagctgggcacggtggctcacccctataatcccagcactttgggagaccgaggcgggtggatcacctgaggtcaggagttcgagaccagcctggccaacatggtgaaaccctgtctctactaaaaaaatacaaataaattactgggattacaggcgtgtgccactgtcaggcctctgagcccaagccaagccatcgcatcccctgtgccttgcacatatacacccagatggcctgaagtaactgaagaatcacaaaagaagtgaaaaggccctgccccgccttaactgatgacattccaccattgtgatttgttcctgccccaccttaactgagtgattaaccctgcaaattttcttctcctggctcagaagcacccccactgagcaccttgcgaccccccactcctgcccgccctttgactgtaattttccattaccttcccaaatactataaaacagccccacccctatctcccttcgctgactcttttcggactcagcccacctgcacccaggtgaaataaacagctttattgctcacacaaa

SEQ ID NO: 440214 - DNA, 3200 bp, Homo sapiens
aaaaatacggaagtttattgtaggacactcagtgtgaataaatggaatggaaaggcctacacatcgagactcatccatgattgatatgaatttaaaaattacaagcaaagacattttattcatcatgatgctttcttttgtttcttcttttcgttttcttctttttctttttcaatttcagcaacatacttctcaatttcttcaggatttaaaatcttgagggattgatctcgcctcatgacagcaagttcaatgtttttgccacctgactgaaccacttccaggagtgccttgatcaccagcttaatggtcagatcatctgtttcaatggcttcgtcagtatagttcttctccaggaactcacgcactgacttggcaccccggcctatggcattggccttccaggcatggtatgtgcccgaggggtcagtctgatagagcctaggagtgccatcaaagtcgaaacccacgatgagggcagagatgccaaacggcctgcgcccattgctctggcttgctgggctgcttggagctggtgggactgtgagcgtcgtctatatctttggaaacaacccggtggacgaaaatggtgccaagattcctgatgagttcgacaatgatccaattctggtacagcagttgcgccggacatacaaatatttcaaagattatagacagatgatcatcgagcccaccagcccttgccttctcccagaccctctgcaggaaccgtactaccagccaccctacacgctcgttttggagctcaccggcgtcctcttgcatcctgagtggtcgctggccactggctggaggtttaagaagcgcccaggcatcgagaccttgttccagcagcttgcccctttatatgaaattgtcatctttacgtcagagactggcatgactgcgtttccactcattgatagtgtggacccccatggcttcatctcctaccgcctattccgggacgccacaagatacatggatggacaccatgtaaaggatatttcatgtctgaatcgggacccagctcgagtagtagttgtggactgcaagaaggaagccttccgcctgcagccctataacggcgttgccctgcggccctgggacggcaactctgatgaccgggtcttgttggatctgtctgccttcctcaagaccattgcactgaatggtgtggaggacgtgcgaaccgtgctggagcactatgccctggaggatgacccgctggcggctttcaaacagcggcaaagccggctagagcaggaggagcagcagcgcctggccgagctctccaagtccaacaagcagaacctcttccttggctccctcaccagccgcttgtggcctcgctccaaacagccctgaactctgggcctcctcaaactcagtgcctgggtccagggccccagtgcttccagaccaagacttgggccaccacttgtccaataaagtacatcccagacgccacacctgctgtgtcccgagagtctccagatgggggcatcagggtgaggtccgggactcttgggtcatcgtcccacagtggctgatcggctgccaagcacagtgggggtgctttgttggatcagagcagatttttcaccctggtctcggaatctaaaaaccctcgctgtgtcttcctgtgtgttgcgtgatctgtgaaaaatacatctccctctgaccacagactcctcatctgtggagaagggaagagaggatggcacttggctttaaagacaggtagctgccaggctactgtggagagaatgtgttatgggcctagtgggcctctggtggaccagagattacccctctcaacaggccagctgctggttggctccagccagtgtggccctggggtaaagggggcctggagttgcttgacacgccagttgttcaaaagaagcaagaacttgggaatatttttttttttttttggagacagggtctcactgttgcccaggctggagcacagtggtgtaactatagctcactgcagtgttgaacttctgggctcaaacaatcttcctgccttggcctccccaaatgctgagattataggagtgagccactctgcccaactacttttaattaaatagccacatgtgtctcctgtattgacagtaccactgtgtattaagagtatgagtcccagattgtgtaagttcaaatccaagctctaccacttctcggctggcttgtgatcctgtgcaagttactttacctctcagtgcctcggtttctacatttataaaataataactgggcaggcacagtggctcatggctgtcatcccaacacttcaggaggccgaggtgggaggatcgcctgaggccaggagttggagagcagcctgggcaacatgggaagagcctgtctcttgcggggggggggagaagaaagttcttgtctcaggctagctttggggaccaaatgaagcactcccatgtaggcactcaaatggaactatgtaaaccttaggcaaggcacctctgcctcagtttcctcatctctaaaatggggtgatggtagtatgttagcagagtggttgtgaggagtgaacgggacagtccgtatgtgggttatatgtatatattcccaggtgcttgctgttaccaggccatatgggttattcacagattgaaatatcttagctgggcacggtggctcacccctataatcccagcactttgggagaccgaggcgggtggatcacctgaggtcaggagttcgagaccagcctggccaacatggtgaaaccctgtctctactaaaaaaatacaaataaattactgggattacaggcgtgtgccactgtcaggcctctgagcccaagccaagccatcgcatcccctgtgccttgcacatatacacccagatggcctgaagtaactgaagaatcacaaaagaagtgaaaaggccctgccccgccttaactgatgacattccaccattgtgatttgttcctgccccaccttaactgagtgattaaccctgcaaattttcttctcctggctcagaagcacccccactgagcaccttgcgaccccccactcctgcccgccctttgactgtaattttccattaccttcccaaatactataaaacagccccacccctatctcccttcgctgactcttttcggactcagcccacctgcacccaggtgaaataaacagctttattgctcacacaaa

SEQ ID NO: 440215 - DNA, 3408 bp, Homo sapiens
ctcagaggctggagggatcctccgtatgctgaacgctggtcccctgggccccctttatttctttctctatactttgtttctgtgtctttttctcttccaaagtctctcgttccacctaacgagaaacacccacaggtgtggaggggcaacccatcccttcagacaattgggaggtgagggccgattgccttacacggtgagacaagcggcctgactcgtgactatttttttggacaaatcaggcagccactgactcccttcattatggcctcagctttatctctgggcaataagtgtgatcccttccttcgctgcgtcctttgcaggggcggtggcgctctgcaaggcccaagggggcgtggtccagatgactttgaatcccagttgtcgcccccagggtcagccaggagactagtcagaagcaaacgcgcctgcggcaatccgcccgatgcctttggtctctctcgggcttccgtccacccgcccctcccccgcgtttccattggctgtagctccggcccggggcgggcgaagagggagcgagtgggcggggccgcgtggcgtcagcgcaagatggcggcctcggcagcggtgttctcgcgcttgcgaagcgggctccggctcggctcgcggggactgtgcacgaggttggcgacgccgccccgccgggccccagatcaggccgcagagatcgggagccgcgggagcactaaggcgcaagggccacagcagcagccgggctcagagggtcccagctatgccaaaaaagttgcgctctggcttgctgggctgcttggagctggtgggactgtgagcgtcgtctatatctttggaaacaacccggtggacgaaaatggtgccaagattcctgatgagttcgacaatgatgatcatcgagcccaccagcccttgccttctcccagaccctctgcaggaaccgtactaccagccaccctacacgctcgttttggagctcaccggcgtcctcttgcatcctgagtggtcgctggccactggctggaggtttaagaagcgcccaggcatcgagaccttgttccagcagcttgcccctttatatgaaattgtcatctttacgtcagagactggcatgactgcgtttccactcattgatagtgtggacccccatggcttcatctcctaccgcctattccgggacgccacaagatacatggatggacaccatgtaaaggatatttcatgtctgaatcgggacccagctcgagtagtagttgtggactgcaagaaggaagccttccgcctgcagccctataacggcgttgccctgcggccctgggacggcaactctgatgaccgggtcttgttggatctgtctgccttcctcaagaccattgcactgaatggtgtggaggacgtgcgaaccgtgctggagcactatgccctggaggatgacccgctggcggctttcaaacagcggcaaagccggctagagcaggaggagcagcagcgcctggccgagctctccaagtccaacaagcagaacctcttccttggctccctcaccagccgcttgtggcctcgctccaaacagccctgaactctgggcctcctcaaactcagtgcctgggtccagggccccagtgcttccagaccaagacttgggccaccacttgtccaataaagtacatcccagacgccacacctgctgtgtcccgagagtctccagatgggggcatcagggtgaggtccgggactcttgggtcatcgtcccacagtggctgatcggctgccaagcacagtgggggtgctttgttggatcagagcagatttttcaccctggtctcggaatctaaaaaccctcgctgtgtcttcctgtgtgttgcgtgatctgtgaaaaatacatctccctctgaccacagactcctcatctgtggagaagggaagagaggatggcacttggctttaaagacaggtagctgccaggctactgtggagagaatgtgttatgggcctagtgggcctctggtggaccagagattacccctctcaacaggccagctgctggttggctccagccagtgtggccctggggtaaagggggcctggagttgcttgacacgccagttgttcaaaagaagcaagaacttgggaatatttttttttttttttggagacagggtctcactgttgcccaggctggagcacagtggtgtaactatagctcactgcagtgttgaacttctgggctcaaacaatcttcctgccttggcctccccaaatgctgagattataggagtgagccactctgcccaactacttttaattaaatagccacatgtgtctcctgtattgacagtaccactgtgtattaagagtatgagtcccagattgtgtaagttcaaatccaagctctaccacttctcggctggcttgtgatcctgtgcaagttactttacctctcagtgcctcggtttctacatttataaaataataactgggcaggcacagtggctcatggctgtcatcccaacacttcaggaggccgaggtgggaggatcgcctgaggccaggagttggagagcagcctgggcaacatgggaagagcctgtctcttgcggggggggggagaagaaagttcttgtctcaggctagctttggggaccaaatgaagcactcccatgtaggcactcaaatggaactatgtaaaccttaggcaaggcacctctgcctcagtttcctcatctctaaaatggggtgatggtagtatgttagcagagtggttgtgaggagtgaacgggacagtccgtatgtgggttatatgtatatattcccaggtgcttgctgttaccaggccatatgggttattcacagattgaaatatcttagctgggcacggtggctcacccctataatcccagcactttgggagaccgaggcgggtggatcacctgaggtcaggagttcgagaccagcctggccaacatggtgaaaccctgtctctactaaaaaaatacaaataaattactgggattacaggcgtgtgccactgtcaggcctctgagcccaagccaagccatcgcatcccctgtgccttgcacatatacacccagatggcctgaagtaactgaagaatcacaaaagaagtgaaaaggccctgccccgccttaactgatgacattccaccattgtgatttgttcctgccccaccttaactgagtgattaaccctgcaaattttcttctcctggctcagaagcacccccactgagcaccttgcgaccccccactcctgcccgccctttgactgtaattttccattaccttcccaaatactataaaacagccccacccctatctcccttcgctgactcttttcggactcagcccacctgcacccaggtgaaataaacagctttattgctcacacaaa

SEQ ID NO: 440216 - DNA, 2768 bp, Homo sapiens
  misc_feature (14)..(15): n is a, c, g, or t
  misc_feature (21)..(21): n is a, c, g, or t
tcggcacgagggcnncgtctntatctttggaaacaacccggtggacgaaaatggtgccaagattcctgatgagttcgacaatgatccaattctggtacagcaagggccacagcagcagccgggctcagagggtcccagctatgccaaaaaagttgcgctctggcttgctgggctgcttggagctggtgggactgtgagcgtcgtctatatctttggacatacaaatatttcaaagattatagacagatgatcatcgagcccaccagcccttgccttctcccagaccctctgcaggaaccgtactaccagccaccctacacgctcgttttggagctcaccggcgtcctcttgcatcctgagtggtcgctggccactggctggaggtttaagaagcgcccaggcatcgagaccttgttccagcagcttgcccctttatatgaaattgtcatctttacgtcagagactggcatgactgcgtttccactcattgatagtgtggacccccatggcttcatctcctaccgcctattccgggacgccacaagatacatggatggacaccatgtaaaggatatttcatgtctgaatcgggacccagctcgagtagtagttgtggactgcaagaaggaagccttccgcctgcagccctataacggcgttgccctgcggccctgggacggcaactctgatgaccgggtcttgttggatctgtctgccttcctcaagaccattgcactgaatggtgtggaggacgtgcgaaccgtgctggagcactatgccctggaggatgacccgctggcggctttcaaacagcggcaaagccggctagagcaggaggagcagcagcgcctggccgagctctccaagtccaacaagcagaacctcttccttggctccctcaccagccgcttgtggcctcgctccaaacagccctgaactctgggcctcctcaaactcagtgcctgggtccagggccccagtgcttccagaccaagacttgggccaccacttgtccaataaagtacatcccagacgccacacctgctgtgtcccgagagtctccagatgggggcatcagggtgaggtccgggactcttgggtcatcgtcccacagtggctgatcggctgccaagcacagtgggggtgctttgttggatcagagcagatttttcaccctggtctcggaatctaaaaaccctcgctgtgtcttcctgtgtgttgcgtgatctgtgaaaaatacatctccctctgaccacagactcctcatctgtggagaagggaagagaggatggcacttggctttaaagacaggtagctgccaggctactgtggagagaatgtgttatgggcctagtgggcctctggtggaccagagattacccctctcaacaggccagctgctggttggctccagccagtgtggccctggggtaaagggggcctggagttgcttgacacgccagttgttcaaaagaagcaagaacttgggaatatttttttttttttttggagacagggtctcactgttgcccaggctggagcacagtggtgtaactatagctcactgcagtgttgaacttctgggctcaaacaatcttcctgccttggcctccccaaatgctgagattataggagtgagccactctgcccaactacttttaattaaatagccacatgtgtctcctgtattgacagtaccactgtgtattaagagtatgagtcccagattgtgtaagttcaaatccaagctctaccacttctcggctggcttgtgatcctgtgcaagttactttacctctcagtgcctcggtttctacatttataaaataataactgggcaggcacagtggctcatggctgtcatcccaacacttcaggaggccgaggtgggaggatcgcctgaggccaggagttggagagcagcctgggcaacatgggaagagcctgtctcttgcggggggggggagaagaaagttcttgtctcaggctagctttggggaccaaatgaagcactcccatgtaggcactcaaatggaactatgtaaaccttaggcaaggcacctctgcctcagtttcctcatctctaaaatggggtgatggtagtatgttagcagagtggttgtgaggagtgaacgggacagtccgtatgtgggttatatgtatatattcccaggtgcttgctgttaccaggccatatgggttattcacagattgaaatatcttagctgggcacggtggctcacccctataatcccagcactttgggagaccgaggcgggtggatcacctgaggtcaggagttcgagaccagcctggccaacatggtgaaaccctgtctctactaaaaaaatacaaataaattactgggattacaggcgtgtgccactgtcaggcctctgagcccaagccaagccatcgcatcccctgtgccttgcacatatacacccagatggcctgaagtaactgaagaatcacaaaagaagtgaaaaggccctgccccgccttaactgatgacattccaccattgtgatttgttcctgccccaccttaactgagtgattaaccctgcaaattttcttctcctggctcagaagcacccccactgagcaccttgcgaccccccactcctgcccgccctttgactgtaattttccattaccttcccaaatactataaaacagccccacccctatctcccttcgctgactcttttcggactcagcccacctgcacccaggtgaaataaacagctttattgctcacacaaa

SEQ ID NO: 440217 - DNA, 2763 bp, Homo sapiens
aaatctgtgttcctatctggcggtatgtcattgccttctatctttggacctagaaatgagttggttcaaaccaggcagatatgcagacctgtttgtatctggtagataagaaacccctggtttgtctgggaggttgaacagcggcttattgtggaatctctttgtgcctggtgttctcctagatccaattctggtacagcagttgcgccggacatacaaatatttcaaagattatagacagatgatcatcgagcccaccagcccttgccttctcccagaccctctgcaggaaccgtactaccagccaccctacacgctcgttttggagctcaccggcgtcctcttgcatcctgagtggtcgctggccactggctggaggtttaagaagcgcccaggcatcgagaccttgttccagcagcttgcccctttatatgaaattgtcatctttacgtcagagactggcatgactgcgtttccactcattgatagtgtggacccccatggcttcatctcctaccgcctattccgggacgccacaagatacatggatggacaccatgtaaaggatatttcatgtctgaatcgggacccagctcgagtagtagttgtggactgcaagaaggaagccttccgcctgcagccctataacggcgttgccctgcggccctgggacggcaactctgatgaccgggtcttgttggatctgtctgccttcctcaagaccattgcactgaatggtgtggaggacgtgcgaaccgtgctggagcactatgccctggaggatgacccgctggcggctttcaaacagcggcaaagccggctagagcaggaggagcagcagcgcctggccgagctctccaagtccaacaagcagaacctcttccttggctccctcaccagccgcttgtggcctcgctccaaacagccctgaactctgggcctcctcaaactcagtgcctgggtccagggccccagtgcttccagaccaagacttgggccaccacttgtccaataaagtacatcccagacgccacacctgctgtgtcccgagagtctccagatgggggcatcagggtgaggtccgggactcttgggtcatcgtcccacagtggctgatcggctgccaagcacagtgggggtgctttgttggatcagagcagatttttcaccctggtctcggaatctaaaaaccctcgctgtgtcttcctgtgtgttgcgtgatctgtgaaaaatacatctccctctgaccacagactcctcatctgtggagaagggaagagaggatggcacttggctttaaagacaggtagctgccaggctactgtggagagaatgtgttatgggcctagtgggcctctggtggaccagagattacccctctcaacaggccagctgctggttggctccagccagtgtggccctggggtaaagggggcctggagttgcttgacacgccagttgttcaaaagaagcaagaacttgggaatatttttttttttttttggagacagggtctcactgttgcccaggctggagcacagtggtgtaactatagctcactgcagtgttgaacttctgggctcaaacaatcttcctgccttggcctccccaaatgctgagattataggagtgagccactctgcccaactacttttaattaaatagccacatgtgtctcctgtattgacagtaccactgtgtattaagagtatgagtcccagattgtgtaagttcaaatccaagctctaccacttctcggctggcttgtgatcctgtgcaagttactttacctctcagtgcctcggtttctacatttataaaataataactgggcaggcacagtggctcatggctgtcatcccaacacttcaggaggccgaggtgggaggatcgcctgaggccaggagttggagagcagcctgggcaacatgggaagagcctgtctcttgcggggggggggagaagaaagttcttgtctcaggctagctttggggaccaaatgaagcactcccatgtaggcactcaaatggaactatgtaaaccttaggcaaggcacctctgcctcagtttcctcatctctaaaatggggtgatggtagtatgttagcagagtggttgtgaggagtgaacgggacagtccgtatgtgggttatatgtatatattcccaggtgcttgctgttaccaggccatatgggttattcacagattgaaatatcttagctgggcacggtggctcacccctataatcccagcactttgggagaccgaggcgggtggatcacctgaggtcaggagttcgagaccagcctggccaacatggtgaaaccctgtctctactaaaaaaatacaaataaattactgggattacaggcgtgtgccactgtcaggcctctgagcccaagccaagccatcgcatcccctgtgccttgcacatatacacccagatggcctgaagtaactgaagaatcacaaaagaagtgaaaaggccctgccccgccttaactgatgacattccaccattgtgatttgttcctgccccaccttaactgagtgattaaccctgcaaattttcttctcctggctcagaagcacccccactgagcaccttgcgaccccccactcctgcccgccctttgactgtaattttccattaccttcccaaatactataaaacagccccacccctatctcccttcgctgactcttttcggactcagcccacctgcacccaggtgaaataaacagctttattgctcacacaaa

SEQ ID NO: 440218 - DNA, 2561 bp, Homo sapiens
  misc_feature (30)..(30): n is a, c, g, or t
  misc_feature (32)..(32): n is a, c, g, or t
  misc_feature (37)..(37): n is a, c, g, or t
cggacgcgtgggtcgacccacgcgtcggtnanagacnggatgatcatcgagcccaccagcccttgccttctcccagaccctctgcaggaaccgtactaccagccaccctacacgctcgttttggagctcaccggcgtcctcttgcatcctgagtggtcgctggccactggctggaggtttaagaagcgcccaggcatcgagaccttgttccagcagcttgcccctttatatgaaattgtcatctttacgtcagagactggcatgactgcgtttccactcattgatagtgtggacccccatggcttcatctcctaccgcctattccgggacgccacaagatacatggatggacaccatgtaaaggatatttcatgtctgaatcgggacccagctcgagtagtagttgtggactgcaagaaggaagccttccgcctgcagccctataacggcgttgccctgcggccctgggacggcaactctgatgaccgggtcttgttggatctgtctgccttcctcaagaccattgcactgaatggtgtggaggacgtgcgaaccgtgctggagcactatgccctggaggatgacccgctggcggctttcaaacagcggcaaagccggctagagcaggaggagcagcagcgcctggccgagctctccaagtccaacaagcagaacctcttccttggctccctcaccagccgcttgtggcctcgctccaaacagccctgaactctgggcctcctcaaactcagtgcctgggtccagggccccagtgcttccagaccaagacttgggccaccacttgtccaataaagtacatcccagacgccacacctgctgtgtcccgagagtctccagatgggggcatcagggtgaggtccgggactcttgggtcatcgtcccacagtggctgatcggctgccaagcacagtgggggtgctttgttggatcagagcagatttttcaccctggtctcggaatctaaaaaccctcgctgtgtcttcctgtgtgttgcgtgatctgtgaaaaatacatctccctctgaccacagactcctcatctgtggagaagggaagagaggatggcacttggctttaaagacaggtagctgccaggctactgtggagagaatgtgttatgggcctagtgggcctctggtggaccagagattacccctctcaacaggccagctgctggttggctccagccagtgtggccctggggtaaagggggcctggagttgcttgacacgccagttgttcaaaagaagcaagaacttgggaatatttttttttttttttggagacagggtctcactgttgcccaggctggagcacagtggtgtaactatagctcactgcagtgttgaacttctgggctcaaacaatcttcctgccttggcctccccaaatgctgagattataggagtgagccactctgcccaactacttttaattaaatagccacatgtgtctcctgtattgacagtaccactgtgtattaagagtatgagtcccagattgtgtaagttcaaatccaagctctaccacttctcggctggcttgtgatcctgtgcaagttactttacctctcagtgcctcggtttctacatttataaaataataactgggcaggcacagtggctcatggctgtcatcccaacacttcaggaggccgaggtgggaggatcgcctgaggccaggagttggagagcagcctgggcaacatgggaagagcctgtctcttgcggggggggggagaagaaagttcttgtctcaggctagctttggggaccaaatgaagcactcccatgtaggcactcaaatggaactatgtaaaccttaggcaaggcacctctgcctcagtttcctcatctctaaaatggggtgatggtagtatgttagcagagtggttgtgaggagtgaacgggacagtccgtatgtgggttatatgtatatattcccaggtgcttgctgttaccaggccatatgggttattcacagattgaaatatcttagctgggcacggtggctcacccctataatcccagcactttgggagaccgaggcgggtggatcacctgaggtcaggagttcgagaccagcctggccaacatggtgaaaccctgtctctactaaaaaaatacaaataaattactgggattacaggcgtgtgccactgtcaggcctctgagcccaagccaagccatcgcatcccctgtgccttgcacatatacacccagatggcctgaagtaactgaagaatcacaaaagaagtgaaaaggccctgccccgccttaactgatgacattccaccattgtgatttgttcctgccccaccttaactgagtgattaaccctgcaaattttcttctcctggctcagaagcacccccactgagcaccttgcgaccccccactcctgcccgccctttgactgtaattttccattaccttcccaaatactataaaacagccccacccctatctcccttcgctgactcttttcggactcagcccacctgcacccaggtgaaataaacagctttattgctcacacaaa

SEQ ID NO: 440219 - DNA, 1716 bp, Homo sapiens
  misc_feature (1457)..(1457): n is a, c, g, or t
  misc_feature (1459)..(1459): n is a, c, g, or t
  misc_feature (1470)..(1470): n is a, c, g, or t
  misc_feature (1473)..(1473): n is a, c, g, or t
  misc_feature (1478)..(1478): n is a, c, g, or t
  misc_feature (1487)..(1487): n is a, c, g, or t
  misc_feature (1489)..(1489): n is a, c, g, or t
  misc_feature (1499)..(1499): n is a, c, g, or t
  misc_feature (1512)..(1512): n is a, c, g, or t
  misc_feature (1519)..(1519): n is a, c, g, or t
  misc_feature (1528)..(1528): n is a, c, g, or t
  misc_feature (1586)..(1586): n is a, c, g, or t
  misc_feature (1589)..(1589): n is a, c, g, or t
  misc_feature (1616)..(1616): n is a, c, g, or t
  misc_feature (1621)..(1621): n is a, c, g, or t
  misc_feature (1626)..(1626): n is a, c, g, or t
  misc_feature (1630)..(1630): n is a, c, g, or t
  misc_feature (1643)..(1643): n is a, c, g, or t
  misc_feature (1692)..(1692): n is a, c, g, or t
ctcagaggctggagggatcctccgtatgctgaacgctggtcccctgggccccctttatttctttctctatactttgtttctgtgtctttttctcttccaaagtctctcgttccacctaacgagaaacacccacaggtgtggaggggcaacccatcccttcagacaattgggaggtgagggccgattgccttacacggtgagacaagcggcctgactcgtgactatttttttggacaaatcaggcagccactgactcccttcattatggcctcagctttatctctgggcaataagtgtgatcccttccttcgctgcgtcctttgcaggggcggtggcgctctgcaaggcccaagggggcgtggtccagatgactttgaatcccagttgtcgcccccagggtcagccaggagactagtcagaagcaaacgcgcctgcggcaatccgcccgatgcctttggtctctctcgggcttccgtccacccgcccctcccccgcgtttccattggctgtagctccggcccggggcgggcgaagagggagcgagtgggcggggccgcgtggcgtcagcgcaagatggcggcctcggcagcggtgttctcgcgcttgcgaagcgggctccggctcggctcgcggggactgtgcacgaggttggcgacgccgccccgccgggccccagatcaggccgcagagatcgggagccgcgggagcactaaggcgcaagggccacagcagcagccgggctcagagggtcccagctatgccaaaaaagttgcgctctggcttgctgggctgcttggagctggtgggactgtgagcgtcgtctatatctttggaaacaacccggtggacgaaaatggtgccaagattcctgatgagttcgacaatgatccaattctggtacagcagttgcgccggacatacaaatatttcaaagattatagacagatgatcatcgagcccaccagcccttgccttctcccagaccctctgcaggaaccgtactaccagccaccctacacgctcgttttggagctcaccggcgtcctcttgcatcctgagtggtcgctggccactggctggaggtttaagaagcgcccaggcatcgagaccttgttccagcagcttgcccctttatatgaaattgtcatctttacgtcagagactggcatgactgcgtttccactcattgatagtgtggacccccatggcttcatctcctaccgcctattccgggacgccacaagatacatggatggacaccatgtaaaggatatttcatgtctgaatcgggacccagctcgagtagtagttgtggactgcaagaaggaagccttccgcctgcagccctataacggcgttgccctgcggccctgggacggcaactctgatgaccgggtcttgttggatctgtctgccttcctcaagaccaattgcacatgaaatggtgtggaagcgancngctcgccgaanccngtgcntggaggcancntattcgcccntggaaggaatganccccgcntggccggcntcttcaaaacaagcgcgcaaaagccaggcataaaagcaaggaaggaagcaagcaagcnccntggccgaagcctctccaaagatccaanaaagnaaaanaatnaatccttggctcnaaaaaaaaccagattgtagcctcagctccaaaaaagacacataaattanggctctttaaaataatgactggat

SEQ ID NO: 440220 - DNA, 2642 bp, Homo sapiens
aatcgagctcggccgtgtgcacgcacgtgcccggccattaacctcttttcttataattacccatttctttatagcaatgcaagatggcctaatacacagctctagctgactaatataccaccatctcactgaaggcttgcaaaacccagctgagaaagtcttttaataaaagcaacaacattaataaaaacagtgacaactactgagtggctgcccaactgggccaacgcaccgtggtcgctggccactggctggaggtttaagaagcgcccaggcatcgagaccttgttccagcagcttgcccctttatatgaaattgtcatctttacgtcagagactggcatgactgcgtttccactcattgatagtgtggacccccatggcttcatctcctaccgcctattccgggacgccacaagatacatggatggacaccatgtaaaggatatttcatgtctgaatcgggacccagctcgagtagtagttgtggactgcaagaaggaagccttccgcctgcagccctataacggcgttgccctgcggccctgggacggcaactctgatgaccgggtcttgttggatctgtctgccttcctcaagaccattgcactgaatggtgtggaggacgtgcgaaccgtgctggagcactatgccctggaggatgacccgctggcggctttcaaacagcggcaaagccggctagagcaggaggagcagcagcgcctggccgagctctccaagtccaacaagcagaacctcttccttggctccctcaccagccgcttgtggcctcgctccaaacagccctgaactctgggcctcctcaaactcagtgcctgggtccagggccccagtgcttccagaccaagacttgggccaccacttgtccaataaagtacatcccagacgccacacctgctgtgtcccgagagtctccagatgggggcatcagggtgaggtccgggactcttgggtcatcgtcccacagtggctgatcggctgccaagcacagtgggggtgctttgttggatcagagcagatttttcaccctggtctcggaatctaaaaaccctcgctgtgtcttcctgtgtgttgcgtgatctgtgaaaaatacatctccctctgaccacagactcctcatctgtggagaagggaagagaggatggcacttggctttaaagacaggtagctgccaggctactgtggagagaatgtgttatgggcctagtgggcctctggtggaccagagattacccctctcaacaggccagctgctggttggctccagccagtgtggccctggggtaaagggggcctggagttgcttgacacgccagttgttcaaaagaagcaagaacttgggaatatttttttttttttttggagacagggtctcactgttgcccaggctggagcacagtggtgtaactatagctcactgcagtgttgaacttctgggctcaaacaatcttcctgccttggcctccccaaatgctgagattataggagtgagccactctgcccaactacttttaattaaatagccacatgtgtctcctgtattgacagtaccactgtgtattaagagtatgagtcccagattgtgtaagttcaaatccaagctctaccacttctcggctggcttgtgatcctgtgcaagttactttacctctcagtgcctcggtttctacatttataaaataataactgggcaggcacagtggctcatggctgtcatcccaacacttcaggaggccgaggtgggaggatcgcctgaggccaggagttggagagcagcctgggcaacatgggaagagcctgtctcttgcggggggggggagaagaaagttcttgtctcaggctagctttggggaccaaatgaagcactcccatgtaggcactcaaatggaactatgtaaaccttaggcaaggcacctctgcctcagtttcctcatctctaaaatggggtgatggtagtatgttagcagagtggttgtgaggagtgaacgggacagtccgtatgtgggttatatgtatatattcccaggtgcttgctgttaccaggccatatgggttattcacagattgaaatatcttagctgggcacggtggctcacccctataatcccagcactttgggagaccgaggcgggtggatcacctgaggtcaggagttcgagaccagcctggccaacatggtgaaaccctgtctctactaaaaaaatacaaataaattactgggattacaggcgtgtgccactgtcaggcctctgagcccaagccaagccatcgcatcccctgtgccttgcacatatacacccagatggcctgaagtaactgaagaatcacaaaagaagtgaaaaggccctgccccgccttaactgatgacattccaccattgtgatttgttcctgccccaccttaactgagtgattaaccctgcaaattttcttctcctggctcagaagcacccccactgagcaccttgcgaccccccactcctgcccgccctttgactgtaattttccattaccttcccaaatactataaaacagccccacccctatctcccttcgctgactcttttcggactcagcccacctgcacccaggtgaaataaacagctttattgctcacacaaa

SEQ ID NO: 440221 - DNA, 2336 bp, Homo sapiens
  misc_feature (30)..(30): n is a, c, g, or t
  misc_feature (32)..(32): n is a, c, g, or t
  misc_feature (37)..(37): n is a, c, g, or t
cggacgcgtgggtcgacccacgcgtcggtnanagacnggactgcgtttccactcattgatagtgtggacccccatggcttcatctcctaccgcctattccgggacgccacaagatacatggatggacaccatgtaaaggatatttcatgtctgaatcgggacccagctcgagtagtagttgtggactgcaagaaggaagccttccgcctgcagccctataacggcgttgccctgcggccctgggacggcaactctgatgaccgggtcttgttggatctgtctgccttcctcaagaccattgcactgaatggtgtggaggacgtgcgaaccgtgctggagcactatgccctggaggatgacccgctggcggctttcaaacagcggcaaagccggctagagcaggaggagcagcagcgcctggccgagctctccaagtccaacaagcagaacctcttccttggctccctcaccagccgcttgtggcctcgctccaaacagccctgaactctgggcctcctcaaactcagtgcctgggtccagggccccagtgcttccagaccaagacttgggccaccacttgtccaataaagtacatcccagacgccacacctgctgtgtcccgagagtctccagatgggggcatcagggtgaggtccgggactcttgggtcatcgtcccacagtggctgatcggctgccaagcacagtgggggtgctttgttggatcagagcagatttttcaccctggtctcggaatctaaaaaccctcgctgtgtcttcctgtgtgttgcgtgatctgtgaaaaatacatctccctctgaccacagactcctcatctgtggagaagggaagagaggatggcacttggctttaaagacaggtagctgccaggctactgtggagagaatgtgttatgggcctagtgggcctctggtggaccagagattacccctctcaacaggccagctgctggttggctccagccagtgtggccctggggtaaagggggcctggagttgcttgacacgccagttgttcaaaagaagcaagaacttgggaatatttttttttttttttggagacagggtctcactgttgcccaggctggagcacagtggtgtaactatagctcactgcagtgttgaacttctgggctcaaacaatcttcctgccttggcctccccaaatgctgagattataggagtgagccactctgcccaactacttttaattaaatagccacatgtgtctcctgtattgacagtaccactgtgtattaagagtatgagtcccagattgtgtaagttcaaatccaagctctaccacttctcggctggcttgtgatcctgtgcaagttactttacctctcagtgcctcggtttctacatttataaaataataactgggcaggcacagtggctcatggctgtcatcccaacacttcaggaggccgaggtgggaggatcgcctgaggccaggagttggagagcagcctgggcaacatgggaagagcctgtctcttgcggggggggggagaagaaagttcttgtctcaggctagctttggggaccaaatgaagcactcccatgtaggcactcaaatggaactatgtaaaccttaggcaaggcacctctgcctcagtttcctcatctctaaaatggggtgatggtagtatgttagcagagtggttgtgaggagtgaacgggacagtccgtatgtgggttatatgtatatattcccaggtgcttgctgttaccaggccatatgggttattcacagattgaaatatcttagctgggcacggtggctcacccctataatcccagcactttgggagaccgaggcgggtggatcacctgaggtcaggagttcgagaccagcctggccaacatggtgaaaccctgtctctactaaaaaaatacaaataaattactgggattacaggcgtgtgccactgtcaggcctctgagcccaagccaagccatcgcatcccctgtgccttgcacatatacacccagatggcctgaagtaactgaagaatcacaaaagaagtgaaaaggccctgccccgccttaactgatgacattccaccattgtgatttgttcctgccccaccttaactgagtgattaaccctgcaaattttcttctcctggctcagaagcacccccactgagcaccttgcgaccccccactcctgcccgccctttgactgtaattttccattaccttcccaaatactataaaacagccccacccctatctcccttcgctgactcttttcggactcagcccacctgcacccaggtgaaataaacagctttattgctcacacaaa

SEQ ID NO: 440222 - DNA, 2254 bp, Homo sapiens
ttgatggggggagagttgggcacagatgttgacctgatctgtcactcacttccagggatatttcatgtctgaatcgggacccagctcgagtagtagttgtggactgcaagaaggaagccttccgcctgcagccctataacggcgttgccctgcggccctgggacggcaactctgatgaccgggtcttgttggatctgtctgccttcctcaagaccattgcactgaatggtgtggaggacgtgcgaaccgtgctggagcactatgccctggaggatgacccgctggcggctttcaaacagcggcaaagccggctagagcaggaggagcagcagcgcctggccgagctctccaagtccaacaagcagaacctcttccttggctccctcaccagccgcttgtggcctcgctccaaacagccctgaactctgggcctcctcaaactcagtgcctgggtccagggccccagtgcttccagaccaagacttgggccaccacttgtccaataaagtacatcccagacgccacacctgctgtgtcccgagagtctccagatgggggcatcagggtgaggtccgggactcttgggtcatcgtcccacagtggctgatcggctgccaagcacagtgggggtgctttgttggatcagagcagatttttcaccctggtctcggaatctaaaaaccctcgctgtgtcttcctgtgtgttgcgtgatctgtgaaaaatacatctccctctgaccacagactcctcatctgtggagaagggaagagaggatggcacttggctttaaagacaggtagctgccaggctactgtggagagaatgtgttatgggcctagtgggcctctggtggaccagagattacccctctcaacaggccagctgctggttggctccagccagtgtggccctggggtaaagggggcctggagttgcttgacacgccagttgttcaaaagaagcaagaacttgggaatatttttttttttttttggagacagggtctcactgttgcccaggctggagcacagtggtgtaactatagctcactgcagtgttgaacttctgggctcaaacaatcttcctgccttggcctccccaaatgctgagattataggagtgagccactctgcccaactacttttaattaaatagccacatgtgtctcctgtattgacagtaccactgtgtattaagagtatgagtcccagattgtgtaagttcaaatccaagctctaccacttctcggctggcttgtgatcctgtgcaagttactttacctctcagtgcctcggtttctacatttataaaataataactgggcaggcacagtggctcatggctgtcatcccaacacttcaggaggccgaggtgggaggatcgcctgaggccaggagttggagagcagcctgggcaacatgggaagagcctgtctcttgcggggggggggagaagaaagttcttgtctcaggctagctttggggaccaaatgaagcactcccatgtaggcactcaaatggaactatgtaaaccttaggcaaggcacctctgcctcagtttcctcatctctaaaatggggtgatggtagtatgttagcagagtggttgtgaggagtgaacgggacagtccgtatgtgggttatatgtatatattcccaggtgcttgctgttaccaggccatatgggttattcacagattgaaatatcttagctgggcacggtggctcacccctataatcccagcactttgggagaccgaggcgggtggatcacctgaggtcaggagttcgagaccagcctggccaacatggtgaaaccctgtctctactaaaaaaatacaaataaattactgggattacaggcgtgtgccactgtcaggcctctgagcccaagccaagccatcgcatcccctgtgccttgcacatatacacccagatggcctgaagtaactgaagaatcacaaaagaagtgaaaaggccctgccccgccttaactgatgacattccaccattgtgatttgttcctgccccaccttaactgagtgattaaccctgcaaattttcttctcctggctcagaagcacccccactgagcaccttgcgaccccccactcctgcccgccctttgactgtaattttccattaccttcccaaatactataaaacagccccacccctatctcccttcgctgactcttttcggactcagcccacctgcacccaggtgaaataaacagctttattgctcacacaaa

SEQ ID NO: 440223 - DNA, 1663 bp, Homo sapiens
ctcagaggctggagggatcctccgtatgctgaacgctggtcccctgggccccctttatttctttctctatactttgtttctgtgtctttttctcttccaaagtctctcgttccacctaacgagaaacacccacaggtgtggaggggcaacccatcccttcagacaattgggaggtgagggccgattgccttacacggtgagacaagcggcctgactcgtgactatttttttggacaaatcaggcagccactgactcccttcattatggcctcagctttatctctgggcaataagtgtgatcccttccttcgctgcgtcctttgcaggggcggtggcgctctgcaaggcccaagggggcgtggtccagatgactttgaatcccagttgtcgcccccagggtcagccaggagactagtcagaagcaaacgcgcctgcggcaatccgcccgatgcctttggtctctctcgggcttccgtccacccgcccctcccccgcgtttccattggctgtagctccggcccggggcgggcgaagagggagcgagtgggcggggccgcgtggcgtcagcgcaagatggcggcctcggcagcggtgttctcgcgcttgcgaagcgggctccggctcggctcgcggggactgtgcacgaggttggcgacgccgccccgccgggccccagatcaggccgcagagatcgggagccgcgggagcactaaggcgcaagggccacagcagcagccgggctcagagggtcccagctatgccaaaaaagttgcgctctggcttgctgggctgcttggagctggtgggactgtgagcgtcgtctatatctttggaaacaacccggtggacgaaaatggtgccaagattcctgatgagttcgacaatgatccaattctggtacagcagttgcgccggacatacaaatatttcaaagattatagacagatgatcatcgagcccaccagcccttgccttctcccagaccctctgcaggaaccgtactaccagccaccctacacgctcgttttggagctcaccggcgtcctcttgcatcctgagtggtcgctggccactggctggaggtttaagaagcgcccaggcatcgagaccttgttccagcagcttgcccctttatatgaaattgtcatctttacgtcagagactggcatgactgcgtttccactcattgatagtgtggacccccatggcttcatctcctaccgcctattccgggacgccacaagatacatggatggacaccatgtaaaggtgccgtgggttcatgggtgggcctctgggatttggcggagttggcaccacctgagggaaggagggcccagctctgaccctagcctcacctggcttatggttctgcccagattcgattcctgctggcaggcacatgcctgcctctagccttggccagacatctgcacccttctttgttccctggaatctgggtgtgggagtggggggaaatggggtctctctaaagaagacagttgggggttagtggtaaggtcgtacgatttagaagctggttttatcttgctgtgtctgtaacttagtgtttctgggaaggtttgcttatagttgtacatatgagactggttggggtttgtttgacccgggctctgttactgtggccagtgctgtattcagg

SEQ ID NO: 440224 - DNA, 1665 bp, Homo sapiens
  misc_feature (4)..(4): n is a, c, g, or t
  misc_feature (31)..(31): n is a, c, g, or t
aaantacggctaggtacgaggcctggttttnaatcggccgaggctcggtttctacatttataaaataataactgggcaggcacagtggctcatggctgtcatcccaacacttcaggaggccgaggtgggaggatcgcctgaggccaggagttggagagcagcctgggcaacatgggaagagcctgtctcttgcggggggggggagaagaaagttcttgtctcaggctagctttggggaccaaatgaagcactcccatgtaggcactcaaatggaactatgtaaaccttaggcaaggcacctctgcctcagtttcctcatctctaaaatggggtgatggtagtatgttagcagagtggttgtgaggagtgaacgggacagtccgtatgtgggttatatgtatatattcccaggtgcttgctgttaccaggccatatgggttattcacagattgaaatatcttagctgggcacggtggctcacccctataatcccagcactttgggagaccgaggcgggtggatcacctgaggtcaggagttcgagaccagcctggccaacatggtgaaaccctgtctctactaaaaaaatacaaataaattagctgggcatggtggtgggtgcctgtagtcccagctacttgggaggctgaggcaggagaatcgattaaacccaggaggcagaggttgcagtgagctgagatcacaccattgcactccagcctgggcgacagagtaaggctctgtctccaaaaaaaaaaaaaaaaaaaaaaacaaaaaaaaaaccagtttgactttatctccctcgccctgcctccatccccacattgccccccactatcccagtctctcctactccagccttcatctagtgctaactgattaaatattctaagatgaccttctctggtgtgtgtgatgataattaaaaggcattcagaactgtgtggaccagactgaacctctgcactctagatttttttttttttgaagcctctacaaaggataattaaaatttacaccatgactctttgtcctggggtgcactgtctgtaagccggtggagttatttcccaaaatccttggtccttcccagcttgaggaagtctgcaggactgagggaggggacctgtgctttttttttggtttttttggagatggagtctctgttgcccaggctggagtgcagtggggcgatctcggctcactgcaccctgcacctcctgggttcaagtgattctcctgcctcaggctcccaagtagctgggattacaggcgtgtgccactgtcaggcctctgagcccaagccaagccatcgcatcccctgtgccttgcacatatacacccagatggcctgaagtaactgaagaatcacaaaagaagtgaaaaggccctgccccgccttaactgatgacattccaccattgtgatttgttcctgccccaccttaactgagtgattaaccctgcaaattttcttctcctggctcagaagcacccccactgagcaccttgcgaccccccactcctgcccgccctttgactgtaattttccattaccttcccaaatactataaaacagccccacccctatctcccttcgctgactcttttcggactcagcccacctgcacccaggtgaaataaacagctttattgctcacacaaa

SEQ ID NO: 440225 - DNA, 1558 bp, Homo sapiens
  misc_feature (4)..(4): n is a, c, g, or t
  misc_feature (31)..(31): n is a, c, g, or t
aaantacggctaggtacgaggcctggttttnaatcggccgaggttggagagcagcctgggcaacatgggaagagcctgtctcttgcggggggggggagaagaaagttcttgtctcaggctagctttggggaccaaatgaagcactcccatgtaggcactcaaatggaactatgtaaaccttaggcaaggcacctctgcctcagtttcctcatctctaaaatggggtgatggtagtatgttagcagagtggttgtgaggagtgaacgggacagtccgtatgtgggttatatgtatatattcccaggtgcttgctgttaccaggccatatgggttattcacagattgaaatatcttagctgggcacggtggctcacccctataatcccagcactttgggagaccgaggcgggtggatcacctgaggtcaggagttcgagaccagcctggccaacatggtgaaaccctgtctctactaaaaaaatacaaataaattagctgggcatggtggtgggtgcctgtagtcccagctacttgggaggctgaggcaggagaatcgattaaacccaggaggcagaggttgcagtgagctgagatcacaccattgcactccagcctgggcgacagagtaaggctctgtctccaaaaaaaaaaaaaaaaaaaaaaacaaaaaaaaaaccagtttgactttatctccctcgccctgcctccatccccacattgccccccactatcccagtctctcctactccagccttcatctagtgctaactgattaaatattctaagatgaccttctctggtgtgtgtgatgataattaaaaggcattcagaactgtgtggaccagactgaacctctgcactctagatttttttttttttgaagcctctacaaaggataattaaaatttacaccatgactctttgtcctggggtgcactgtctgtaagccggtggagttatttcccaaaatccttggtccttcccagcttgaggaagtctgcaggactgagggaggggacctgtgctttttttttggtttttttggagatggagtctctgttgcccaggctggagtgcagtggggcgatctcggctcactgcaccctgcacctcctgggttcaagtgattctcctgcctcaggctcccaagtagctgggattacaggcgtgtgccactgtcaggcctctgagcccaagccaagccatcgcatcccctgtgccttgcacatatacacccagatggcctgaagtaactgaagaatcacaaaagaagtgaaaaggccctgccccgccttaactgatgacattccaccattgtgatttgttcctgccccaccttaactgagtgattaaccctgcaaattttcttctcctggctcagaagcacccccactgagcaccttgcgaccccccactcctgcccgccctttgactgtaattttccattaccttcccaaatactataaaacagccccacccctatctcccttcgctgactcttttcggactcagcccacctgcacccaggtgaaataaacagctttattgctcacacaaa

SEQ ID NO: 440226 - DNA, 3467 bp, Homo sapiens
ctcagaggctggagggatcctccgtatgctgaacgctggtcccctgggccccctttatttctttctctatactttgtttctgtgtctttttctcttccaaagtctctcgttccacctaacgagaaacacccacaggtgtggaggggcaacccatcccttcagacaattgggaggtgagggccgattgccttacacggtgagacaagcggcctgactcgtgactatttttttggacaaatcaggcagccactgactcccttcattatggcctcagctttatctctgggcaataagtgtgatcccttccttcgctgcgtcctttgcaggggcggtggcgctctgcaaggcccaagggggcgtggtccagatgactttgaatcccagttgtcgcccccagggtcagccaggagactagtcagaagcaaacgcgcctgcggcaatccgcccgatgcctttggtctctctcgggcttccgtccacccgcccctcccccgcgtttccattggctgtagctccggcccggggcgggcgaagagggagcgagtgggcggggccgcgtggcgtcagcgcaagatggcggcctcggcagcggtgttctcgcgcttgcgaagcgggctccggctcggctcgcggggactgtgcacgaggttggcgacgccgccccgccgggccccagatcaggccgcagagatcgggagccgcgggagcactaaggcgcaagggccacagcagcagccgggctcagagggtcccagctatgccaaaaaagttgcgctctggcttgctgggctgcttggagctggtgggactgtgagcgtcgtctatatctttggaaacaacccggtggacgaaaatggtgccaagattcctgatgagttcgacaatgatccaattctggtacagcagttgcgccggacatacaaatatttcaaagattatagacagatgatcatcgagcccaccagcccttgccttctcccagaccctctgcaggaaccgtactaccagccaccctacacgctcgttttggagctcaccggcgtcctcttgcatcctgagtggtcgctggccactggctggaggtttaagaagcgcccaggcatcgagaccttgttccagcagcttgcccctttatatgaaattgtcatctttacgtcagagactggcatgactgcgtttccactcattgatagtgtggacccccatggcttcatctcctaccgcctattccgggacgccacaagatacatggatggacaccatgtaaaggatatttcatgtctgaatcgggacccagctcgagtagtagttgtggactgcaagaaggaagccttccgcctgcagccctataacggcgttgccctgcggccctgggacggcaactctgatgaccgggtcttgttggatctgtctgccttcctcaagaccattgcactgaatggtgtggaggacgtgcgaaccgtgctggagcactatgccctggaggatgacccgctggcggctttcaaacagcggcaaagccggctagagcaggaggagcagcagcgcctggccgagctctccaagtccaacaagcagaacctcttccttggctccctcaccagccgcttgtggcctcgctccaaacagccctgaactctgggcctcctcaaactcagtgcctgggtccagggccccagtgcttccagaccaagacttgggccaccacttgtccaataaagtacatcccagacgccacacctgctgtgtcccgagagtctccagatgggggcatcagggtgaggtccgggactcttgggtcatcgtcccacagtggctgatcggctgccaagcacagtgggggtgctttgttggatcagagcagatttttcaccctggtctcggaatctaaaaaccctcgctgtgtcttcctgtgtgttgcgtgatctgtgaaaaatacatctccctctgaccacagactcctcatctgtggagaagggaagagaggatggcacttggctttaaagacaggtagctgccaggctactgtggagagaatgtgttatgggcctagtgggcctctggtggaccagagattacccctctcaacaggccagctgctggttggctccagccagtgtggccctggggtaaagggggcctggagttgcttgacacgccagttgttcaaaagaagcaagaacttgggaatatttttttttttttttggagacagggtctcactgttgcccaggctggagcacagtggtgtaactatagctcactgcagtgttgaacttctgggctcaaacaatcttcctgccttggcctccccaaatgctgagattataggagtgagccactctgcccaactacttttaattaaatagccacatgtgtctcctgtattgacagtaccactgtgtattaagagtatgagtcccagattgtgtaagttcaaatccaagctctaccacttctcggctggcttgtgatcctgtgcaagttactttacctctcagtgcctcggtttctacatttataaaataataactgggcaggcacagtggctcatggctgtcatcccaacacttcaggaggccgaggtgggaggatcgcctgaggccaggagttggagagcagcctgggcaacatgggaagagcctgtctcttgcggggggggggagaagaaagttcttgtctcaggctagctttggggaccaaatgaagcactcccatgtaggcactcaaatggaactatgtaaaccttaggcaaggcacctctgcctcagtttcctcatctctaaaatggggtgatggtagtatgttagcagagtggttgtgaggagtgaacgggacagtccgtatgtgggttatatgtatatattcccaggtgcttgctgttaccaggccatatgggttattcacagattgaaatatcttagctgggcacggtggctcacccctataatcccagcactttgggagaccgaggcgggtggatcacctgaggtcaggagttcgagaccagcctggccaacatggtgaaaccctgtctctactaaaaaaatacaaataaattactgggattacaggcgtgtgccactgtcaggcctctgagcccaagccaagccatcgcatcccctgtgccttgcacatatacacccagatggcctgaagtaactgaagaatcacaaaagaagtgaaaaggccctgccccgccttaactgatgacattccaccattgtgatttgttcctgccccaccttaactgagtgattaaccctgcaaattttcttctcctggctcagaagcacccccactgagcaccttgcgaccccccactcctgcccgccctttgactgtaattttccattaccttcccaaatactataaaacagccccacccctatctcccttcgctgactcttttcggactcagcccacctgcacccaggtgaaataaacagctttattgctcacacaaa

SEQ ID NO: 440227 - DNA, 3064 bp, Homo sapiens
ctcagaggctggagggatcctccgtatgctgaacgctggtcccctgggccccctttatttctttctctatactttgtttctgtgtctttttctcttccaaagtctctcgttccacctaacgagaaacacccacaggtgtggaggggcaacccatcccttcagacaattgggaggtgagggccgattgccttacacggtgagacaagcggcctgactcgtgactatttttttggacaaatcaggcagccactgactcccttcattatggcctcagctttatctctgggcaataagtgtgatcccttccttcgctgcgtcctttgcaggggcggtggcgctctgcaaggcccaagggggcgtggtccagatgactttgaatcccagttgtcgcccccagggtcagccaggagactagtcagaagcaaacgcgcctgcggcaatccgcccgatgcctttggtctctctcgggcttccgtccacccgcccctcccccgcgtttccattggctgtagctccggcccggggcgggcgaagagggagcgagtgggcggggccgcgtggcgtcagcgcaagatggcggcctcggcagcggtgttctcgcgcttgcgaagcgggctccggctcggctcgcggggactgtgcacgaggttggcgacgccgccccgccgggccccagatcaggccgcagagatcgggagccgcgggagcactaaggcgcaagggccacagcagcagccgggctcagagggtcccagctatgccaaaaaagttgcgctctggcttgctgggctgcttggagctggtgggactgtgagcgtcgtctatatctttggaaacaacccggtggacgaaaatggtgccaagattcctgatgagttcgacaatgatccaattctggtacagcagttgcgccggacatacaaatatttcaaagattatagacagatgatcatcgagcccaccagcccttgccttctcccagaccctctgcaggaaccgtactaccagccaccctacacgctcgttttggagctcaccggcgtcctcttgcatcctgagtggtcgctggccactggctggaggtttaagaagcgcccaggcatcgagaccttgttccagcagcttgcccctttatatgaaattgtcatctttacgtcagagactggcatgactgcgtttccactcattgatagtgtggacccccatggcttcatctcctaccgcctattccgggacgccacaagatacatggatggacaccatgtaaaggatatttcatgtctgaatcgggacccagctcgagtagtagttgtggactgcaagaaggaagccttccgcctgcagccctataacggcgttgccctgcggccctgggacggcaactctgatgaccgggtcttgttggatctgtctgccttcctcaagaccattgcactgaatggtgtggaggacgtgcgaaccgtgctggagcactatgccctggaggatgacccgctggcggctttcaaacagcggcaaagccggctagagcaggaggagcagcagcgcctggccgagctctccaagtccaacaagcagaacctcttccttggctccctcaccagccgcttgtggcctcgctccaaacagccctgaactctgggcctcctcaaactcagtgcctgggtccagggccccagtgcttccagaccaagacttgggccaccacttgtccaataaagtacatcccagacgccacacctgctgtgtcccgagagtctccagatgggggcatcagggtgaggtccgggactcttgggtcatcgtcccacagtggctgatcggctgccaagcacagtgggggtgctttgttggatcagagcagatttttcaccctggtctcggaatctaaaaaccctcgctgtgtcttcctgtgtgttgcgtgatctgtgaaaaatacatctccctctgaccacagactcctcatctgtggagaagggaagagaggatggcacttggctttaaagacaggtagctgccaggctactgtggagagaatgtgttatgggcctagtgggcctctggtggaccagagattacccctctcaacaggccagctgctggttggctccagccagtgtggccctggggtaaagggggcctggagttgcttgacacgccagttgttcaaaagaagcaagaacttgggaatatttttttttttttttggagacagggtctcactgttgcccaggctggagcacagtggtgtaactatagctcactgcagtgttgaacttctgggctcaaacaatcttcctgccttggcctccccaaatgctgagattataggagtgagccactctgcccaactacttttaattaaatagccacatgtgtctcctgtattgacagtaccactgtgtattaagagtatgagtcccagattgtgtaagttcaaatccaagctctaccacttctcggctggcttgtgatcctgtgcaagttactttacctctcagtgcctcggtttctacatttataaaataataactgggcaggcacagtggctcatggctgtcatcccaacacttcaggaggccgaggtgggaggatcgcctgaggccaggagttggagagcagcctgggcaacatgggaagagcctgtctcttgcggggggggggagaagaaagttcttgtctcaggctagctttggggaccaaatgaagcactcccatgtaggcactcaaatggaactatgtaaaccttaggcaaggcacctctgcctcagtttcctcatctctaaaatggggtgatggtagtatgttagcagagtggttgtgaggagtgaacgggacagtccgtatgtgggttatatgtatatattcccaggtgcttgctgttaccaggccatatgggttattcacagattgaaatatcttagctgggattgcaggcatgagccaccatgcctggccccacataaagtttctgagcacttgaaatgtggctagtgtgactgagaaactgaatttttaatttcgtttgagactgggcacagtggctcacgcctgtagtcctgac

SEQ ID NO: 440228 - DNA, 3012 bp, Homo sapiens
ctcagaggctggagggatcctccgtatgctgaacgctggtcccctgggccccctttatttctttctctatactttgtttctgtgtctttttctcttccaaagtctctcgttccacctaacgagaaacacccacaggtgtggaggggcaacccatcccttcagacaattgggaggtgagggccgattgccttacacggtgagacaagcggcctgactcgtgactatttttttggacaaatcaggcagccactgactcccttcattatggcctcagctttatctctgggcaataagtgtgatcccttccttcgctgcgtcctttgcaggggcggtggcgctctgcaaggcccaagggggcgtggtccagatgactttgaatcccagttgtcgcccccagggtcagccaggagactagtcagaagcaaacgcgcctgcggcaatccgcccgatgcctttggtctctctcgggcttccgtccacccgcccctcccccgcgtttccattggctgtagctccggcccggggcgggcgaagagggagcgagtgggcggggccgcgtggcgtcagcgcaagatggcggcctcggcagcggtgttctcgcgcttgcgaagcgggctccggctcggctcgcggggactgtgcacgaggttggcgacgccgccccgccgggccccagatcaggccgcagagatcgggagccgcgggagcactaaggcgcaagggccacagcagcagccgggctcagagggtcccagctatgccaaaaaagttgcgctctggcttgctgggctgcttggagctggtgggactgtgagcgtcgtctatatctttggaaacaacccggtggacgaaaatggtgccaagattcctgatgagttcgacaatgatccaattctggtacagcagttgcgccggacatacaaatatttcaaagattatagacagatgatcatcgagcccaccagcccttgccttctcccagaccctctgcaggaaccgtactaccagccaccctacacgctcgttttggagctcaccggcgtcctcttgcatcctgagtggtcgctggccactggctggaggtttaagaagcgcccaggcatcgagaccttgttccagcagcttgcccctttatatgaaattgtcatctttacgtcagagactggcatgactgcgtttccactcattgatagtgtggacccccatggcttcatctcctaccgcctattccgggacgccacaagatacatggatggacaccatgtaaaggatatttcatgtctgaatcgggacccagctcgagtagtagttgtggactgcaagaaggaagccttccgcctgcagccctataacggcgttgccctgcggccctgggacggcaactctgatgaccgggtcttgttggatctgtctgccttcctcaagaccattgcactgaatggtgtggaggacgtgcgaaccgtgctggagcactatgccctggaggatgacccgctggcggctttcaaacagcggcaaagccggctagagcaggaggagcagcagcgcctggccgagctctccaagtccaacaagcagaacctcttccttggctccctcaccagccgcttgtggcctcgctccaaacagccctgaactctgggcctcctcaaactcagtgcctgggtccagggccccagtgcttccagaccaagacttgggccaccacttgtccaataaagtacatcccagacgccacacctgctgtgtcccgagagtctccagatgggggcatcagggtgaggtccgggactcttgggtcatcgtcccacagtggctgatcggctgccaagcacagtgggggtgctttgttggatcagagcagatttttcaccctggtctcggaatctaaaaaccctcgctgtgtcttcctgtgtgttgcgtgatctgtgaaaaatacatctccctctgaccacagactcctcatctgtggagaagggaagagaggatggcacttggctttaaagacaggtagctgccaggctactgtggagagaatgtgttatgggcctagtgggcctctggtggaccagagattacccctctcaacaggccagctgctggttggctccagccagtgtggccctggggtaaagggggcctggagttgcttgacacgccagttgttcaaaagaagcaagaacttgggaatatttttttttttttttggagacagggtctcactgttgcccaggctggagtgcattgatgtgatcttagcttacaacagccttgacctcccggctcaagtgatctccaagtgaccctcctgcctcagcctcctgagtaccctcctggggactacaggtgcgtgctaccatacccagctaatttaaacaaattttttttttgtagagatggggtcttggtgcccaagctggtctcaaactcctagtcttaagcaatcttcctgctttggcctcccaaggcgctgggattccaggtgtgagctactgtgcccagctaaaatagggatttttatattaaatctccctattttaaaatgttggctcctagcggggcgcagtggctcacgcctgtaatcccagcactttgggaggctgaggtgggtggatcacctgaggtcaggagttcaagaccagcctcaacatggagaaaccccatctctactaaaaatacaaaattagctgggcattacaggcgcacaccaccacgcccggctaatttttgtatttttttagtagagacagggtttcaccatgttggttaggctggtctcgaactcctgacctcgtgatccgcccgcctcggcctcccagggtgctgggattgcaggcatgagccaccatgcctggccccacataaagtttctgagcacttgaaatgtggctagtgtgactgagaaactgaatttttaattttgtttgagactgggcacagtggctcacgcctgtaatcctgacactttgggaggccgaagcaggaggattgcttgaatccaggagtacgaga

SEQ ID NO: 440229 - DNA, 2709 bp, Homo sapiens
ctcagaggctggagggatcctccgtatgctgaacgctggtcccctgggccccctttatttctttctctatactttgtttctgtgtctttttctcttccaaagtctctcgttccacctaacgagaaacacccacaggtgtggaggggcaacccatcccttcagacaattgggaggtgagggccgattgccttacacggtgagacaagcggcctgactcgtgactatttttttggacaaatcaggcagccactgactcccttcattatggcctcagctttatctctgggcaataagtgtgatcccttccttcgctgcgtcctttgcaggggcggtggcgctctgcaaggcccaagggggcgtggtccagatgactttgaatcccagttgtcgcccccagggtcagccaggagactagtcagaagcaaacgcgcctgcggcaatccgcccgatgcctttggtctctctcgggcttccgtccacccgcccctcccccgcgtttccattggctgtagctccggcccggggcgggcgaagagggagcgagtgggcggggccgcgtggcgtcagcgcaagatggcggcctcggcagcggtgttctcgcgcttgcgaagcgggctccggctcggctcgcggggactgtgcacgaggttggcgacgccgccccgccgggccccagatcaggccgcagagatcgggagccgcgggagcactaaggcgcaagggccacagcagcagccgggctcagagggtcccagctatgccaaaaaagttgcgctctggcttgctgggctgcttggagctggtgggactgtgagcgtcgtctatatctttggaaacaacccggtggacgaaaatggtgccaagattcctgatgagttcgacaatgatccaattctggtacagcagttgcgccggacatacaaatatttcaaagattatagacagatgatcatcgagcccaccagcccttgccttctcccagaccctctgcaggaaccgtactaccagccaccctacacgctcgttttggagctcaccggcgtcctcttgcatcctgagtggtcgctggccactggctggaggtttaagaagcgcccaggcatcgagaccttgttccagcagcttgcccctttatatgaaattgtcatctttacgtcagagactggcatgactgcgtttccactcattgatagtgtggacccccatggcttcatctcctaccgcctattccgggacgccacaagatacatggatggacaccatgtaaaggatatttcatgtctgaatcgggacccagctcgagtagtagttgtggactgcaagaaggaagccttccgcctgcagccctataacggcgttgccctgcggccctgggacggcaactctgatgaccgggtcttgttggatctgtctgccttcctcaagaccattgcactgaatggtgtggaggacgtgcgaaccgtgctggagcactatgccctggaggatgacccgctggcggctttcaaacagcggcaaagccggctagagcaggaggagcagcagcgcctggccgagctctccaagtccaacaagcagaacctcttccttggctccctcaccagccgcttgtggcctcgctccaaacagccctgaactctgggcctcctcaaactcagtgcctgggtccagggccccagtgcttccagaccaagacttgggccaccacttgtccaataaagtacatcccagacgccacacctgctgtgtcccgagagttccagcctgggcgacagagtaaggctctgtctccaaaaaaaaaaaaaaaaaaaaaaacaaaaaaaaaaccagtttgactttatctccctcgccctgcctccatccccacattgccccccactatcccagtctctcctactccagccttcatctagtgctaactgattaaatattctaagatgaccttctctggtgtgtgtgatgataattaaaaggcattcagaactgtgtggaccagactgaacctctgcactctagatttttttttttttgaagcctctacaaaggataattaaaatttacaccatgactctttgtcctggggtgcactgtctgtaagccggtggagttatttcccaaaatccttggtccttcccagcttgaggaagtctgcaggactgagggaggggacctgtgctttttttttggtttttttggagatggagtctctgttgcccaggctggagtgcagtggggcgatctcggctcactgcaccctgcacctcctgggttcaagtgattctcctgcctcaggctcccaagtagctgggattacaggcgtgtgccactgtcaggcctctgagcccaagccaagccatcgcatcccctgtgccttgcacatatacacccagatggcctgaagtaactgaagaatcacaaaagaagtgaaaaggccctgccccgccttaactgatgacattccaccattgtgatttgttcctgccccaccttaactgagtgattaaccctgcaaattttcttctcctggctcagaagcacccccactgagcaccttgcgaccccccactcctgcccgccctttgactgtaattttccattaccttcccaaatactataaaacagccccacccctatctcccttcgctgactcttttcggactcagcccacctgcacccaggtgaaataaacagctttattgctcacacaaa

SEQ ID NO: 440230 - DNA, 2878 bp, Homo sapiens
ctcaggtgatacttgagcaggaggggcctgggacgctggagtcccagtctggccgtgggagttattttctctgtggcgttggtggtggcgaggccgcagagatcgggagccgcgggagcactaaggcgcaagggccacagcagcagccgggctcagagggtcccagctatgccaaaaaagttgcgctctggcttgctgggctgcttggagctggtgggactgtgagcgtcgtctatatctttggaaacaacccggtggacgaaaatggtgccaagattcctgatgagttcgacaatgatccaattctggtacagcagttgcgccggacatacaaatatttcaaagattatagacagatgatcatcgagcccaccagcccttgccttctcccagaccctctgcaggaaccgtactaccagccaccctacacgctcgttttggagctcaccggcgtcctcttgcatcctgagtggtcgctggccactggctggaggtttaagaagcgcccaggcatcgagaccttgttccagcagcttgcccctttatatgaaattgtcatctttacgtcagagactggcatgactgcgtttccactcattgatagtgtggacccccatggcttcatctcctaccgcctattccgggacgccacaagatacatggatggacaccatgtaaaggatatttcatgtctgaatcgggacccagctcgagtagtagttgtggactgcaagaaggaagccttccgcctgcagccctataacggcgttgccctgcggccctgggacggcaactctgatgaccgggtcttgttggatctgtctgccttcctcaagaccattgcactgaatggtgtggaggacgtgcgaaccgtgctggagcactatgccctggaggatgacccgctggcggctttcaaacagcggcaaagccggctagagcaggaggagcagcagcgcctggccgagctctccaagtccaacaagcagaacctcttccttggctccctcaccagccgcttgtggcctcgctccaaacagccctgaactctgggcctcctcaaactcagtgcctgggtccagggccccagtgcttccagaccaagacttgggccaccacttgtccaataaagtacatcccagacgccacacctgctgtgtcccgagagtctccagatgggggcatcagggtgaggtccgggactcttgggtcatcgtcccacagtggctgatcggctgccaagcacagtgggggtgctttgttggatcagagcagatttttcaccctggtctcggaatctaaaaaccctcgctgtgtcttcctgtgtgttgcgtgatctgtgaaaaatacatctccctctgaccacagactcctcatctgtggagaagggaagagaggatggcacttggctttaaagacaggtagctgccaggctactgtggagagaatgtgttatgggcctagtgggcctctggtggaccagagattacccctctcaacaggccagctgctggttggctccagccagtgtggccctggggtaaagggggcctggagttgcttgacacgccagttgttcaaaagaagcaagaacttgggaatatttttttttttttttggagacagggtctcactgttgcccaggctggagcacagtggtgtaactatagctcactgcagtgttgaacttctgggctcaaacaatcttcctgccttggcctccccaaatgctgagattataggagtgagccactctgcccaactacttttaattaaatagccacatgtgtctcctgtattgacagtaccactgtgtattaagagtatgagtcccagattgtgtaagttcaaatccaagctctaccacttctcggctggcttgtgatcctgtgcaagttactttacctctcagtgcctcggtttctacatttataaaataataactgggcaggcacagtggctcatggctgtcatcccaacacttcaggaggccgaggtgggaggatcgcctgaggccaggagttggagagcagcctgggcaacatgggaagagcctgtctcttgcggggggggggagaagaaagttcttgtctcaggctagctttggggaccaaatgaagcactcccatgtaggcactcaaatggaactatgtaaaccttaggcaaggcacctctgcctcagtttcctcatctctaaaatggggtgatggtagtatgttagcagagtggttgtgaggagtgaacgggacagtccgtatgtgggttatatgtatatattcccaggtgcttgctgttaccaggccatatgggttattcacagattgaaatatcttagctgggcacggtggctcacccctataatcccagcactttgggagaccgaggcgggtggatcacctgaggtcaggagttcgagaccagcctggccaacatggtgaaaccctgtctctactaaaaaaatacaaataaattactgggattacaggcgtgtgccactgtcaggcctctgagcccaagccaagccatcgcatcccctgtgccttgcacatatacacccagatggcctgaagtaactgaagaatcacaaaagaagtgaaaaggccctgccccgccttaactgatgacattccaccattgtgatttgttcctgccccaccttaactgagtgattaaccctgcaaattttcttctcctggctcagaagcacccccactgagcaccttgcgaccccccactcctgcccgccctttgactgtaattttccattaccttcccaaatactataaaacagccccacccctatctcccttcgctgactcttttcggactcagcccacctgcacccaggtgaaataaacagctttattgctcacacaaa

SEQ ID NO: 440231 - DNA, 3514 bp, Homo sapiens
ctcagaggctggagggatcctccgtatgctgaacgctggtcccctgggccccctttatttctttctctatactttgtttctgtgtctttttctcttccaaagtctctcgttccacctaacgagaaacacccacaggtgtggaggggcaacccatcccttcagacaattgggaggtgagggccgattgccttacacggtgagacaagcggcctgactcgtgactatttttttggacaaatcaggcagccactgactcccttcattatggcctcagctttatctctgggcaataagtgtgatcccttccttcgctgcgtcctttgcaggggcggtggcgctctgcaaggcccaagggggcgtggtccagatgactttgaatcccagttgtcgcccccagggtcagccaggagactagtcagaagcaaacgcgcctgcggcaatccgcccgatgcctttggtctctctcgggcttccgtccacccgcccctcccccgcgtttccattggctgtagctccggcccggggcgggcgaagagggagcgagtgggcggggccgcgtggcgtcagcgcaagatggcggcctcggcagcggtgttctcgcgcttgcgaagcgggctccggctcggctcgcggggactgtgcacgaggttggcgacgccgccccgccgggccccagatcaggccgcagagatcgggagccgcgggagcactaaggcgcaagggccacagcagcagccgggctcagagggtcccagctatgccaaaaaagttgcgctctggcttgctgggctgcttggagctggtgggactgtgagcgtcgtctatatctttggaaacaacccggtggacgaaaatggtgccaaggtgagggggaaagagaccgaggccttgccaggagtcctagtctgtggattcctgatgagttcgacaatgatccaattctggtacagcagttgcgccggacatacaaatatttcaaagattatagacagatgatcatcgagcccaccagcccttgccttctcccagaccctctgcaggaaccgtactaccagccaccctacacgctcgttttggagctcaccggcgtcctcttgcatcctgagtggtcgctggccactggctggaggtttaagaagcgcccaggcatcgagaccttgttccagcagcttgcccctttatatgaaattgtcatctttacgtcagagactggcatgactgcgtttccactcattgatagtgtggacccccatggcttcatctcctaccgcctattccgggacgccacaagatacatggatggacaccatgtaaaggatatttcatgtctgaatcgggacccagctcgagtagtagttgtggactgcaagaaggaagccttccgcctgcagccctataacggcgttgccctgcggccctgggacggcaactctgatgaccgggtcttgttggatctgtctgccttcctcaagaccattgcactgaatggtgtggaggacgtgcgaaccgtgctggagcactatgccctggaggatgacccgctggcggctttcaaacagcggcaaagccggctagagcaggaggagcagcagcgcctggccgagctctccaagtccaacaagcagaacctcttccttggctccctcaccagccgcttgtggcctcgctccaaacagccctgaactctgggcctcctcaaactcagtgcctgggtccagggccccagtgcttccagaccaagacttgggccaccacttgtccaataaagtacatcccagacgccacacctgctgtgtcccgagagtctccagatgggggcatcagggtgaggtccgggactcttgggtcatcgtcccacagtggctgatcggctgccaagcacagtgggggtgctttgttggatcagagcagatttttcaccctggtctcggaatctaaaaaccctcgctgtgtcttcctgtgtgttgcgtgatctgtgaaaaatacatctccctctgaccacagactcctcatctgtggagaagggaagagaggatggcacttggctttaaagacaggtagctgccaggctactgtggagagaatgtgttatgggcctagtgggcctctggtggaccagagattacccctctcaacaggccagctgctggttggctccagccagtgtggccctggggtaaagggggcctggagttgcttgacacgccagttgttcaaaagaagcaagaacttgggaatatttttttttttttttggagacagggtctcactgttgcccaggctggagcacagtggtgtaactatagctcactgcagtgttgaacttctgggctcaaacaatcttcctgccttggcctccccaaatgctgagattataggagtgagccactctgcccaactacttttaattaaatagccacatgtgtctcctgtattgacagtaccactgtgtattaagagtatgagtcccagattgtgtaagttcaaatccaagctctaccacttctcggctggcttgtgatcctgtgcaagttactttacctctcagtgcctcggtttctacatttataaaataataactgggcaggcacagtggctcatggctgtcatcccaacacttcaggaggccgaggtgggaggatcgcctgaggccaggagttggagagcagcctgggcaacatgggaagagcctgtctcttgcggggggggggagaagaaagttcttgtctcaggctagctttggggaccaaatgaagcactcccatgtaggcactcaaatggaactatgtaaaccttaggcaaggcacctctgcctcagtttcctcatctctaaaatggggtgatggtagtatgttagcagagtggttgtgaggagtgaacgggacagtccgtatgtgggttatatgtatatattcccaggtgcttgctgttaccaggccatatgggttattcacagattgaaatatcttagctgggcacggtggctcacccctataatcccagcactttgggagaccgaggcgggtggatcacctgaggtcaggagttcgagaccagcctggccaacatggtgaaaccctgtctctactaaaaaaatacaaataaattactgggattacaggcgtgtgccactgtcaggcctctgagcccaagccaagccatcgcatcccctgtgccttgcacatatacacccagatggcctgaagtaactgaagaatcacaaaagaagtgaaaaggccctgccccgccttaactgatgacattccaccattgtgatttgttcctgccccaccttaactgagtgattaaccctgcaaattttcttctcctggctcagaagcacccccactgagcaccttgcgaccccccactcctgcccgccctttgactgtaattttccattaccttcccaaatactataaaacagccccacccctatctcccttcgctgactcttttcggactcagcccacctgcacccaggtgaaataaacagctttattgctcacacaaa

SEQ ID NO: 440232 - DNA, 3666 bp, Homo sapiens
ctcagaggctggagggatcctccgtatgctgaacgctggtcccctgggccccctttatttctttctctatactttgtttctgtgtctttttctcttccaaagtctctcgttccacctaacgagaaacacccacaggtgtggaggggcaacccatcccttcagacaattgggaggtgagggccgattgccttacacggtgagacaagcggcctgactcgtgactatttttttggacaaatcaggcagccactgactcccttcattatggcctcagctttatctctgggcaataagtgtgatcccttccttcgctgcgtcctttgcaggggcggtggcgctctgcaaggcccaagggggcgtggtccagatgactttgaatcccagttgtcgcccccagggtcagccaggagactagtcagaagcaaacgcgcctgcggcaatccgcccgatgcctttggtctctctcgggcttccgtccacccgcccctcccccgcgtttccattggctgtagctccggcccggggcgggcgaagagggagcgagtgggcggggccgcgtggcgtcagcgcaagatggcggcctcggcagcggtgttctcgcgcttgcgaagcgggctccggctcggctcgcggggactgtgcacgaggttggcgacgccgccccgccgggccccagatcaggccgcagagatcgggagccgcgggagcactaaggcgcaagggccacagcagcagccgggctcagagggtcccagctatgccaaaaaagttgcgctctggcttgctgggctgcttggagctggtgggactgtgagcgtcgtctatatctttggaaacaacccggtggacgaaaatggtgccaagattcctgatgagttcgacaatgattcagcacactggattaaagtgggcagatctggaagcctagtgattcaaagtgggcaaaatacagtggcataaattaggtgtggtggctcacgcctgtaatcccaacactttgggaggccaaggcgggaggatcacttgagcccaggagttcaagaccagcccggtcaacagagcaagaccctgtctctattaaaaaaatccaattctggtacagcagttgcgccggacatacaaatatttcaaagattatagacagatgatcatcgagcccaccagcccttgccttctcccagaccctctgcaggaaccgtactaccagccaccctacacgctcgttttggagctcaccggcgtcctcttgcatcctgagtggtcgctggccactggctggaggtttaagaagcgcccaggcatcgagaccttgttccagcagcttgcccctttatatgaaattgtcatctttacgtcagagactggcatgactgcgtttccactcattgatagtgtggacccccatggcttcatctcctaccgcctattccgggacgccacaagatacatggatggacaccatgtaaaggatatttcatgtctgaatcgggacccagctcgagtagtagttgtggactgcaagaaggaagccttccgcctgcagccctataacggcgttgccctgcggccctgggacggcaactctgatgaccgggtcttgttggatctgtctgccttcctcaagaccattgcactgaatggtgtggaggacgtgcgaaccgtgctggagcactatgccctggaggatgacccgctggcggctttcaaacagcggcaaagccggctagagcaggaggagcagcagcgcctggccgagctctccaagtccaacaagcagaacctcttccttggctccctcaccagccgcttgtggcctcgctccaaacagccctgaactctgggcctcctcaaactcagtgcctgggtccagggccccagtgcttccagaccaagacttgggccaccacttgtccaataaagtacatcccagacgccacacctgctgtgtcccgagagtctccagatgggggcatcagggtgaggtccgggactcttgggtcatcgtcccacagtggctgatcggctgccaagcacagtgggggtgctttgttggatcagagcagatttttcaccctggtctcggaatctaaaaaccctcgctgtgtcttcctgtgtgttgcgtgatctgtgaaaaatacatctccctctgaccacagactcctcatctgtggagaagggaagagaggatggcacttggctttaaagacaggtagctgccaggctactgtggagagaatgtgttatgggcctagtgggcctctggtggaccagagattacccctctcaacaggccagctgctggttggctccagccagtgtggccctggggtaaagggggcctggagttgcttgacacgccagttgttcaaaagaagcaagaacttgggaatatttttttttttttttggagacagggtctcactgttgcccaggctggagcacagtggtgtaactatagctcactgcagtgttgaacttctgggctcaaacaatcttcctgccttggcctccccaaatgctgagattataggagtgagccactctgcccaactacttttaattaaatagccacatgtgtctcctgtattgacagtaccactgtgtattaagagtatgagtcccagattgtgtaagttcaaatccaagctctaccacttctcggctggcttgtgatcctgtgcaagttactttacctctcagtgcctcggtttctacatttataaaataataactgggcaggcacagtggctcatggctgtcatcccaacacttcaggaggccgaggtgggaggatcgcctgaggccaggagttggagagcagcctgggcaacatgggaagagcctgtctcttgcggggggggggagaagaaagttcttgtctcaggctagctttggggaccaaatgaagcactcccatgtaggcactcaaatggaactatgtaaaccttaggcaaggcacctctgcctcagtttcctcatctctaaaatggggtgatggtagtatgttagcagagtggttgtgaggagtgaacgggacagtccgtatgtgggttatatgtatatattcccaggtgcttgctgttaccaggccatatgggttattcacagattgaaatatcttagctgggcacggtggctcacccctataatcccagcactttgggagaccgaggcgggtggatcacctgaggtcaggagttcgagaccagcctggccaacatggtgaaaccctgtctctactaaaaaaatacaaataaattactgggattacaggcgtgtgccactgtcaggcctctgagcccaagccaagccatcgcatcccctgtgccttgcacatatacacccagatggcctgaagtaactgaagaatcacaaaagaagtgaaaaggccctgccccgccttaactgatgacattccaccattgtgatttgttcctgccccaccttaactgagtgattaaccctgcaaattttcttctcctggctcagaagcacccccactgagcaccttgcgaccccccactcctgcccgccctttgactgtaattttccattaccttcccaaatactataaaacagccccacccctatctcccttcgctgactcttttcggactcagcccacctgcacccaggtgaaataaacagctttattgctcacacaaa

SEQ ID NO: 440233 - DNA, 3386 bp, Homo sapiens
ctcagaggctggagggatcctccgtatgctgaacgctggtcccctgggccccctttatttctttctctatactttgtttctgtgtctttttctcttccaaagtctctcgttccacctaacgagaaacacccacaggtgtggaggggcaacccatcccttcagacaattgggaggtgagggccgattgccttacacggtgagacaagcggcctgactcgtgactatttttttggacaaatcaggcagccactgactcccttcattatggcctcagctttatctctgggcaataagtgtgatcccttccttcgctgcgtcctttgcaggggcggtggcgctctgcaaggcccaagggggcgtggtccagatgactttgaatcccagttgtcgcccccagggtcagccaggagactagtcagaagcaaacgcgcctgcggcaatccgcccgatgcctttggtctctctcgggcttccgtccacccgcccctcccccgcgtttccattggctgtagctccggcccggggcgggcgaagagggagcgagtgggcggggccgcgtggcgtcagcgcaagatggcggcctcggcagcggtgttctcgcgcttgcgaagcgggctccggctcggctcgcggggactgtgcacgaggttggcgacgccgccccgccgggccccagatcaggccgcagagatcgggagccgcgggagcactaaggcgcaagggccacagcagcagccgggctcagagggtcccagctatgccaaaaaagttgcgctctggcttgctgggctgcttggagctggtgggactgtgagcgtcgtctatatctttggaaacaacccggtggacgaaaatggtgccaagatgatcatcgagcccaccagcccttgccttctcccagaccctctgcaggaaccgtactaccagccaccctacacgctcgttttggagctcaccggcgtcctcttgcatcctgagtggtcgctggccactggctggaggtttaagaagcgcccaggcatcgagaccttgttccagcagcttgcccctttatatgaaattgtcatctttacgtcagagactggcatgactgcgtttccactcattgatagtgtggacccccatggcttcatctcctaccgcctattccgggacgccacaagatacatggatggacaccatgtaaaggatatttcatgtctgaatcgggacccagctcgagtagtagttgtggactgcaagaaggaagccttccgcctgcagccctataacggcgttgccctgcggccctgggacggcaactctgatgaccgggtcttgttggatctgtctgccttcctcaagaccattgcactgaatggtgtggaggacgtgcgaaccgtgctggagcactatgccctggaggatgacccgctggcggctttcaaacagcggcaaagccggctagagcaggaggagcagcagcgcctggccgagctctccaagtccaacaagcagaacctcttccttggctccctcaccagccgcttgtggcctcgctccaaacagccctgaactctgggcctcctcaaactcagtgcctgggtccagggccccagtgcttccagaccaagacttgggccaccacttgtccaataaagtacatcccagacgccacacctgctgtgtcccgagagtctccagatgggggcatcagggtgaggtccgggactcttgggtcatcgtcccacagtggctgatcggctgccaagcacagtgggggtgctttgttggatcagagcagatttttcaccctggtctcggaatctaaaaaccctcgctgtgtcttcctgtgtgttgcgtgatctgtgaaaaatacatctccctctgaccacagactcctcatctgtggagaagggaagagaggatggcacttggctttaaagacaggtagctgccaggctactgtggagagaatgtgttatgggcctagtgggcctctggtggaccagagattacccctctcaacaggccagctgctggttggctccagccagtgtggccctggggtaaagggggcctggagttgcttgacacgccagttgttcaaaagaagcaagaacttgggaatatttttttttttttttggagacagggtctcactgttgcccaggctggagcacagtggtgtaactatagctcactgcagtgttgaacttctgggctcaaacaatcttcctgccttggcctccccaaatgctgagattataggagtgagccactctgcccaactacttttaattaaatagccacatgtgtctcctgtattgacagtaccactgtgtattaagagtatgagtcccagattgtgtaagttcaaatccaagctctaccacttctcggctggcttgtgatcctgtgcaagttactttacctctcagtgcctcggtttctacatttataaaataataactgggcaggcacagtggctcatggctgtcatcccaacacttcaggaggccgaggtgggaggatcgcctgaggccaggagttggagagcagcctgggcaacatgggaagagcctgtctcttgcggggggggggagaagaaagttcttgtctcaggctagctttggggaccaaatgaagcactcccatgtaggcactcaaatggaactatgtaaaccttaggcaaggcacctctgcctcagtttcctcatctctaaaatggggtgatggtagtatgttagcagagtggttgtgaggagtgaacgggacagtccgtatgtgggttatatgtatatattcccaggtgcttgctgttaccaggccatatgggttattcacagattgaaatatcttagctgggcacggtggctcacccctataatcccagcactttgggagaccgaggcgggtggatcacctgaggtcaggagttcgagaccagcctggccaacatggtgaaaccctgtctctactaaaaaaatacaaataaattactgggattacaggcgtgtgccactgtcaggcctctgagcccaagccaagccatcgcatcccctgtgccttgcacatatacacccagatggcctgaagtaactgaagaatcacaaaagaagtgaaaaggccctgccccgccttaactgatgacattccaccattgtgatttgttcctgccccaccttaactgagtgattaaccctgcaaattttcttctcctggctcagaagcacccccactgagcaccttgcgaccccccactcctgcccgccctttgactgtaattttccattaccttcccaaatactataaaacagccccacccctatctcccttcgctgactcttttcggactcagcccacctgcacccaggtgaaataaacagctttattgctcacacaaa

SEQ ID NO: 440234 - DNA, 2587 bp, Homo sapiens
gtgcgggacatccctcatatatttcaaacgtagttatgcatgcgatgatcgatcgcatggccccgatgatcatcgagcccaccagcccttgccttctcccagaccctctgcaggaaccgtactaccagccaccctacacgctcgttttggagctcaccggcgtcctcttgcatcctgagtggtcgctggccactggctggaggtttaagaagcgcccaggcatcgagaccttgttccagcagcttgcccctttatatgaaattgtcatctttacgtcagagactggcatgactgcgtttccactcattgatagtgtggacccccatggcttcatctcctaccgcctattccgggacgccacaagatacatggatggacaccatgtaaaggatatttcatgtctgaatcgggacccagctcgagtagtagttgtggactgcaagaaggaagccttccgcctgcagccctataacggcgttgccctgcggccctgggacggcaactctgatgaccgggtcttgttggatctgtctgccttcctcaagaccattgcactgaatggtgtggaggacgtgcgaaccgtgctggagcactatgccctggaggatgacccgctggcggctttcaaacagcggcaaagccggctagagcaggaggagcagcagcgcctggccgagctctccaagtccaacaagcagaacctcttccttggctccctcaccagccgcttgtggcctcgctccaaacagccctgaactctgggcctcctcaaactcagtgcctgggtccagggccccagtgcttccagaccaagacttgggccaccacttgtccaataaagtacatcccagacgccacacctgctgtgtcccgagagtctccagatgggggcatcagggtgaggtccgggactcttgggtcatcgtcccacagtggctgatcggctgccaagcacagtgggggtgctttgttggatcagagcagatttttcaccctggtctcggaatctaaaaaccctcgctgtgtcttcctgtgtgttgcgtgatctgtgaaaaatacatctccctctgaccacagactcctcatctgtggagaagggaagagaggatggcacttggctttaaagacaggtagctgccaggctactgtggagagaatgtgttatgggcctagtgggcctctggtggaccagagattacccctctcaacaggccagctgctggttggctccagccagtgtggccctggggtaaagggggcctggagttgcttgacacgccagttgttcaaaagaagcaagaacttgggaatatttttttttttttttggagacagggtctcactgttgcccaggctggagcacagtggtgtaactatagctcactgcagtgttgaacttctgggctcaaacaatcttcctgccttggcctccccaaatgctgagattataggagtgagccactctgcccaactacttttaattaaatagccacatgtgtctcctgtattgacagtaccactgtgtattaagagtatgagtcccagattgtgtaagttcaaatccaagctctaccacttctcggctggcttgtgatcctgtgcaagttactttacctctcagtgcctcggtttctacatttataaaataataactgggcaggcacagtggctcatggctgtcatcccaacacttcaggaggccgaggtgggaggatcgcctgaggccaggagttggagagcagcctgggcaacatgggaagagcctgtctcttgcggggggggggagaagaaagttcttgtctcaggctagctttggggaccaaatgaagcactcccatgtaggcactcaaatggaactatgtaaaccttaggcaaggcacctctgcctcagtttcctcatctctaaaatggggtgatggtagtatgttagcagagtggttgtgaggagtgaacgggacagtccgtatgtgggttatatgtatatattcccaggtgcttgctgttaccaggccatatgggttattcacagattgaaatatcttagctgggcacggtggctcacccctataatcccagcactttgggagaccgaggcgggtggatcacctgaggtcaggagttcgagaccagcctggccaacatggtgaaaccctgtctctactaaaaaaatacaaataaattactgggattacaggcgtgtgccactgtcaggcctctgagcccaagccaagccatcgcatcccctgtgccttgcacatatacacccagatggcctgaagtaactgaagaatcacaaaagaagtgaaaaggccctgccccgccttaactgatgacattccaccattgtgatttgttcctgccccaccttaactgagtgattaaccctgcaaattttcttctcctggctcagaagcacccccactgagcaccttgcgaccccccactcctgcccgccctttgactgtaattttccattaccttcccaaatactataaaacagccccacccctatctcccttcgctgactcttttcggactcagcccacctgcacccaggtgaaataaacagctttattgctcacacaaa

SEQ ID NO: 440235 - DNA, 2593 bp, Homo sapiens
caggcacgctataagtgccacaaaggagccagacccgcagtcacagcctatgaacttcttgacctccaagagccacagagacagagggagagaactctgttctgggaatcccccaggctggatctttgtcctcttggggactctgaggacctctgggtcttggtgtttcactgtcctcactgtcttcccagctggccactggctggaggtttaagaagcgcccaggcatcgagaccttgttccagcagcttgcccctttatatgaaattgtcatctttacgtcagagactggcatgactgcgtttccactcattgatagtgtggacccccatggcttcatctcctaccgcctattccgggacgccacaagatacatggatggacaccatgtaaaggatatttcatgtctgaatcgggacccagctcgagtagtagttgtggactgcaagaaggaagccttccgcctgcagccctataacggcgttgccctgcggccctgggacggcaactctgatgaccgggtcttgttggatctgtctgccttcctcaagaccattgcactgaatggtgtggaggacgtgcgaaccgtgctggagcactatgccctggaggatgacccgctggcggctttcaaacagcggcaaagccggctagagcaggaggagcagcagcgcctggccgagctctccaagtccaacaagcagaacctcttccttggctccctcaccagccgcttgtggcctcgctccaaacagccctgaactctgggcctcctcaaactcagtgcctgggtccagggccccagtgcttccagaccaagacttgggccaccacttgtccaataaagtacatcccagacgccacacctgctgtgtcccgagagtctccagatgggggcatcagggtgaggtccgggactcttgggtcatcgtcccacagtggctgatcggctgccaagcacagtgggggtgctttgttggatcagagcagatttttcaccctggtctcggaatctaaaaaccctcgctgtgtcttcctgtgtgttgcgtgatctgtgaaaaatacatctccctctgaccacagactcctcatctgtggagaagggaagagaggatggcacttggctttaaagacaggtagctgccaggctactgtggagagaatgtgttatgggcctagtgggcctctggtggaccagagattacccctctcaacaggccagctgctggttggctccagccagtgtggccctggggtaaagggggcctggagttgcttgacacgccagttgttcaaaagaagcaagaacttgggaatatttttttttttttttggagacagggtctcactgttgcccaggctggagcacagtggtgtaactatagctcactgcagtgttgaacttctgggctcaaacaatcttcctgccttggcctccccaaatgctgagattataggagtgagccactctgcccaactacttttaattaaatagccacatgtgtctcctgtattgacagtaccactgtgtattaagagtatgagtcccagattgtgtaagttcaaatccaagctctaccacttctcggctggcttgtgatcctgtgcaagttactttacctctcagtgcctcggtttctacatttataaaataataactgggcaggcacagtggctcatggctgtcatcccaacacttcaggaggccgaggtgggaggatcgcctgaggccaggagttggagagcagcctgggcaacatgggaagagcctgtctcttgcggggggggggagaagaaagttcttgtctcaggctagctttggggaccaaatgaagcactcccatgtaggcactcaaatggaactatgtaaaccttaggcaaggcacctctgcctcagtttcctcatctctaaaatggggtgatggtagtatgttagcagagtggttgtgaggagtgaacgggacagtccgtatgtgggttatatgtatatattcccaggtgcttgctgttaccaggccatatgggttattcacagattgaaatatcttagctgggcacggtggctcacccctataatcccagcactttgggagaccgaggcgggtggatcacctgaggtcaggagttcgagaccagcctggccaacatggtgaaaccctgtctctactaaaaaaatacaaataaattactgggattacaggcgtgtgccactgtcaggcctctgagcccaagccaagccatcgcatcccctgtgccttgcacatatacacccagatggcctgaagtaactgaagaatcacaaaagaagtgaaaaggccctgccccgccttaactgatgacattccaccattgtgatttgttcctgccccaccttaactgagtgattaaccctgcaaattttcttctcctggctcagaagcacccccactgagcaccttgcgaccccccactcctgcccgccctttgactgtaattttccattaccttcccaaatactataaaacagccccacccctatctcccttcgctgactcttttcggactcagcccacctgcacccaggtgaaataaacagctttattgctcacacaaa

SEQ ID NO: 440236 - DNA, 2879 bp, Homo sapiens
ctcagaggctggagggatcctccgtatgctgaacgctggtcccctgggccccctttatttctttctctatactttgtttctgtgtctttttctcttccaaagtctctcgttccacctaacgagaaacacccacaggtgtggaggggcaacccatcccttcagacaattgggaggtgagggccgattgccttacacggtgagacaagcggcctgactcgtgactatttttttggacaaatcaggcagccactgactcccttcattatggcctcagctttatctctgggcaataagtgtgatcccttccttcgctgcgtcctttgcaggggcggtggcgctctgcaaggcccaagggggcgtggtccagatgactttgaatcccagttgtcgcccccagggtcagccaggagactagtcagaagcaaacgcgcctgcggcaatccgcccgatgcctttggtctctctcgggcttccgtccacccgcccctcccccgcgtttccattggctgtagctccggcccggggcgggcgaagagggagcgagtgggcggggccgcgtggcgtcagcgcaagatggcggcctcggcagcggtgttctcgcgcttgcgaagcgggctccggctcggctcgcggggactgtgcacgaggttggcgacgccgccccgccgggccccagatcaggatatttcatgtctgaatcgggacccagctcgagtagtagttgtggactgcaagaaggaagccttccgcctgcagccctataacggcgttgccctgcggccctgggacggcaactctgatgaccgggtcttgttggatctgtctgccttcctcaagaccattgcactgaatggtgtggaggacgtgcgaaccgtgctggagcactatgccctggaggatgacccgctggcggctttcaaacagcggcaaagccggctagagcaggaggagcagcagcgcctggccgagctctccaagtccaacaagcagaacctcttccttggctccctcaccagccgcttgtggcctcgctccaaacagccctgaactctgggcctcctcaaactcagtgcctgggtccagggccccagtgcttccagaccaagacttgggccaccacttgtccaataaagtacatcccagacgccacacctgctgtgtcccgagagtctccagatgggggcatcagggtgaggtccgggactcttgggtcatcgtcccacagtggctgatcggctgccaagcacagtgggggtgctttgttggatcagagcagatttttcaccctggtctcggaatctaaaaaccctcgctgtgtcttcctgtgtgttgcgtgatctgtgaaaaatacatctccctctgaccacagactcctcatctgtggagaagggaagagaggatggcacttggctttaaagacaggtagctgccaggctactgtggagagaatgtgttatgggcctagtgggcctctggtggaccagagattacccctctcaacaggccagctgctggttggctccagccagtgtggccctggggtaaagggggcctggagttgcttgacacgccagttgttcaaaagaagcaagaacttgggaatatttttttttttttttggagacagggtctcactgttgcccaggctggagcacagtggtgtaactatagctcactgcagtgttgaacttctgggctcaaacaatcttcctgccttggcctccccaaatgctgagattataggagtgagccactctgcccaactacttttaattaaatagccacatgtgtctcctgtattgacagtaccactgtgtattaagagtatgagtcccagattgtgtaagttcaaatccaagctctaccacttctcggctggcttgtgatcctgtgcaagttactttacctctcagtgcctcggtttctacatttataaaataataactgggcaggcacagtggctcatggctgtcatcccaacacttcaggaggccgaggtgggaggatcgcctgaggccaggagttggagagcagcctgggcaacatgggaagagcctgtctcttgcggggggggggagaagaaagttcttgtctcaggctagctttggggaccaaatgaagcactcccatgtaggcactcaaatggaactatgtaaaccttaggcaaggcacctctgcctcagtttcctcatctctaaaatggggtgatggtagtatgttagcagagtggttgtgaggagtgaacgggacagtccgtatgtgggttatatgtatatattcccaggtgcttgctgttaccaggccatatgggttattcacagattgaaatatcttagctgggcacggtggctcacccctataatcccagcactttgggagaccgaggcgggtggatcacctgaggtcaggagttcgagaccagcctggccaacatggtgaaaccctgtctctactaaaaaaatacaaataaattactgggattacaggcgtgtgccactgtcaggcctctgagcccaagccaagccatcgcatcccctgtgccttgcacatatacacccagatggcctgaagtaactgaagaatcacaaaagaagtgaaaaggccctgccccgccttaactgatgacattccaccattgtgatttgttcctgccccaccttaactgagtgattaaccctgcaaattttcttctcctggctcagaagcacccccactgagcaccttgcgaccccccactcctgcccgccctttgactgtaattttccattaccttcccaaatactataaaacagccccacccctatctcccttcgctgactcttttcggactcagcccacctgcacccaggtgaaataaacagctttattgctcacacaaa

SEQ ID NO: 440237 - DNA, 2559 bp, Homo sapiens
atggtgttcacgatcacatttccactcacggcaccagtgggcatgctcgtcccagtaacggagtgttttaatggttcctgccagtacggctgcactgccccccgtcgtgattgcgggctgcgccttcgctggggcctgcacaggctgtggctgggtctggggctgtggctggggttggggctggacagctggtggccctgctggcggctggctgcccgctgcctgtggttgtggcagcggtggcggtggctgctgcgggggtggtgggggctgcggctggggcgggggtggctgggccacggccggctgctgtgccttctgctgatcagccagagcctttttctcttttgcgattcgctctgatatttcatgtctgaatcgggacccagctcgagtagtagttgtggactgcaagaaggaagccttccgcctgcagccctataacggcgttgccctgcggccctgggacggcaactctgatgaccgggtcttgttggatctgtctgccttcctcaagaccattgcactgaatggtgtggaggacgtgcgaaccgtgctggagcactatgccctggaggatgacccgctggcggctttcaaacagcggcaaagccggctagagcaggaggagcagcagcgcctggccgagctctccaagtccaacaagcagaacctcttccttggctccctcaccagccgcttgtggcctcgctccaaacagccctgaactctgggcctcctcaaactcagtgcctgggtccagggccccagtgcttccagaccaagacttgggccaccacttgtccaataaagtacatcccagacgccacacctgctgtgtcccgagagtctccagatgggggcatcagggtgaggtccgggactcttgggtcatcgtcccacagtggctgatcggctgccaagcacagtgggggtgctttgttggatcagagcagatttttcaccctggtctcggaatctaaaaaccctcgctgtgtcttcctgtgtgttgcgtgatctgtgaaaaatacatctccctctgaccacagactcctcatctgtggagaagggaagagaggatggcacttggctttaaagacaggtagctgccaggctactgtggagagaatgtgttatgggcctagtgggcctctggtggaccagagattacccctctcaacaggccagctgctggttggctccagccagtgtggccctggggtaaagggggcctggagttgcttgacacgccagttgttcaaaagaagcaagaacttgggaatatttttttttttttttggagacagggtctcactgttgcccaggctggagcacagtggtgtaactatagctcactgcagtgttgaacttctgggctcaaacaatcttcctgccttggcctccccaaatgctgagattataggagtgagccactctgcccaactacttttaattaaatagccacatgtgtctcctgtattgacagtaccactgtgtattaagagtatgagtcccagattgtgtaagttcaaatccaagctctaccacttctcggctggcttgtgatcctgtgcaagttactttacctctcagtgcctcggtttctacatttataaaataataactgggcaggcacagtggctcatggctgtcatcccaacacttcaggaggccgaggtgggaggatcgcctgaggccaggagttggagagcagcctgggcaacatgggaagagcctgtctcttgcggggggggggagaagaaagttcttgtctcaggctagctttggggaccaaatgaagcactcccatgtaggcactcaaatggaactatgtaaaccttaggcaaggcacctctgcctcagtttcctcatctctaaaatggggtgatggtagtatgttagcagagtggttgtgaggagtgaacgggacagtccgtatgtgggttatatgtatatattcccaggtgcttgctgttaccaggccatatgggttattcacagattgaaatatcttagctgggcacggtggctcacccctataatcccagcactttgggagaccgaggcgggtggatcacctgaggtcaggagttcgagaccagcctggccaacatggtgaaaccctgtctctactaaaaaaatacaaataaattactgggattacaggcgtgtgccactgtcaggcctctgagcccaagccaagccatcgcatcccctgtgccttgcacatatacacccagatggcctgaagtaactgaagaatcacaaaagaagtgaaaaggccctgccccgccttaactgatgacattccaccattgtgatttgttcctgccccaccttaactgagtgattaaccctgcaaattttcttctcctggctcagaagcacccccactgagcaccttgcgaccccccactcctgcccgccctttgactgtaattttccattaccttcccaaatactataaaacagccccacccctatctcccttcgctgactcttttcggactcagcccacctgcacccaggtgaaataaacagctttattgctcacacaaa

SEQ ID NO: 440238 - DNA, 1057 bp, Homo sapiens
agcgggttgttcccttttcggctctgcaacaccgcctagaccgaccggatacacgggtagggcttccgctttacccgtctccctcctggcgcttgtcctcctctcccagtcggcaccacagcggtggctgccgggcgtggtgtcggtgggtcggttggtttttgtctcaccgttggtgtccgtgccgttcagttgcccgccatggctgagctggatccgttcggcgcccctgccggcgcccctggcggtcccgcgctggggaacggagtggccggcgccggcgaagaagacccggctgcggccttcttggcgcagcaagagagcgagattgcgggcatcgagaacgacgaggccttcgccatcctggacggcggcgcccccgggccccagccgcacggcgagccgccggggggtccggatgctgttgatggagtaatgaatggtgaatactaccaggaaagtaatggtccaacagacagttatgcagctatttcacaagtggatcgattgcagtcagagcctgaaagtatccgtaaatggagagaagaacaaatggaacgcttggaagcccttgatgccaattctcggaagcaagaagcagagtggaaagaaaaggcaataaaggagctagaagaatggtatgcaagacaggacgagcagctacagaaaacaaaagcaaacaacagggtggcagatgaagctttctacaaacaacccttcgctgacgtgattggttatgtggcagcagaagaagcctttgtaaatgacattgacgagtcgtccccaggcactgagtgggaacgggtggcccggctgtgtgactttaaccccaaacagtcattggattaattatgttgagttcttttggaccaaacctttttgtctttagagttgttcattgtttgtgattgcatgtttccttccttcaactgtgttctccctggcattcagagaggagggagaggaggaagaggaaggggagggaagcttcccaagagtagcctcaacctgtgcttctgtgcattattctgagaataaatttctgtttcaaactgta

SEQ ID NO: 440239 - DNA, 1043 bp, Homo sapiens
  misc_feature (3)..(3): n is a, c, g, or t
  misc_feature (17)..(17): n is a, c, g, or t
  misc_feature (922)..(924): n is a, c, g, or t
  misc_feature (927)..(927): n is a, c, g, or t
  misc_feature (934)..(934): n is a, c, g, or t
  misc_feature (950)..(950): n is a, c, g, or t
atngctagtacgaggcntggtgttgaatcggccgagtctccctcctggcgcttgtcctcctctcccagtcggcaccacagcggtggctgccgggcgtggtgtcggtgggtcggttggtttttgtctcaccgttggtgtccgtgccgttcagttgcccgccatggctgagctggatccgttcggcgcccctgccggcgcccctggcggtcccgcgctggggaacggagtggccggcgccggcgaagaagacccggctgcggccttcttggcgcagcaagagagcgagattgcgggcatcgagaacgacgaggccttcgccatcctggacggcggcgcccccgggccccagccgcacggcgagccgccggggggtccggatgctgttgatggagtaatgaatggtgaatactaccaggaaagtaatggtccaacagacagttatgcagctatttcacaagtggatcgattgcagtcagagcctgaaagtatccgtaaatggagagaagaacaaatggaacgcttggaagcccttgatgccaattctcggaagcaagaagcagagtggaaagaaaaggcaataaaggagctagaagaatggtatgcaagacaggacgagcagctacagaaaacaaaagcaaacaacagggcagcagaagaagcctttgtaaatgacattgacgagtcgtccccaggcactgagtgggaacgggtggcccggctgtgtgactttaaccccaagtctagcaagcaggccaaagatgtctcccgcatgcgctcagtcctcatctccctcaagcaggccccgctggtgcactgaagagccaccctgtggaaacactacatctgcaatatcttaatcctactcagtgaagctcttcccagcctgggttataagtcgggctttgggccaccttgttaaatnnnacngggaagngtctcaaggtcccggntaaaggaagaaaaagagaacacaaacaagagtggtataaatttagaaaaaggtaacgagacacaaaacagaaaggaagaatacaaactagtta

SEQ ID NO: 440240 - DNA, 1058 bp, Homo sapiens
  misc_feature (9)..(9): n is a, c, g, or t
  misc_feature (1058)..(1058): n is a, c, g, or t
gagggcaanaaaaacgaaataggctaggtacgaggctgggtgttggtctccctcctggcgcttgtcctcctctcccagtcggcaccacagcggtggctgccgggcgtggtgtcggtgggtcggttggtttttgtctcaccgttggtgtccgtgccgttcagttgcccgccatggctgagctggatccgttcggcgcccctgccggcgcccctggcggtcccgcgctggggaacggagtggccggcgccggcgaagaagacccggctgcggccttcttggcgcagcaagagagcgagattgcgggcatcgagaacgacgaggccttcgccatcctggacggcggcgcccccgggccccagccgcacggcgagccgccggggggtccggatgctgttgatggagtaatgaatggtgaatactaccaggaaagtaatggtccaacagacagttatgcagctatttcacaagtggatcgattgcagtcagagcctgaaagtatccgtaaatggagagaagaacaaatggaacgcttggaagcccttgatgccaattctcggaagcaagaagcagagtggaaagaaaaggcaataaaggagctagaagaatggtatgcaagacaggacgagcagctacagaaaacaaaagcaaacaacagggcagcagaagaagcctttgtaaatgacattgacgagtcgtccccaggcactgagtgggaacgggtggcccggctgtgtgactttaaccccaagtctagcaagcaggccaaagatgtctcccgcatgcgctcagtcctcatctccctcaagcaggccccgctggtgcactgaagagccaccctgatatttatctatcagtgagtctcaagtcatgttatttgttggtctttggccaaccttgttttagtgtcatgttgggatggtggcctcttaaggttccgggctaagaggcgggggggagggggggccagaccacacggttggtttgaaattggcgggaaaaaacgtttgggaagatgggtgtccttttgcttagccttttatgggccggatctataaccn

SEQ ID NO: 440241 - DNA, 1014 bp, Homo sapiens
  misc_feature (9)..(9): n is a, c, g, or t
  misc_feature (971)..(971): n is a, c, g, or t
  misc_feature (974)..(974): n is a, c, g, or t
  misc_feature (982)..(982): n is a, c, g, or t
  misc_feature (985)..(985): n is a, c, g, or t
gagggcaanaaaaacgaaataggctaggtacgaggctgggtgttgcagcggtggctgccgggcgtggtgtcggtgggtcggttggtttttgtctcaccgttggtgtccgtgccgttcagttgcccgccatggctgagctggatccgttcggcgcccctgccggcgcccctggcggtcccgcgctggggaacggagtggccggcgccggcgaagaagacccggctgcggccttcttggcgcagcaagagagcgagattgcgggcatcgagaacgacgaggccttcgccatcctggacggcggcgcccccgggccccagccgcacggcgagccgccggggggtccggatgctgttgatggagtaatgaatggtgaatactaccaggaaagtaatggtccaacagacagttatgcagctatttcacaagtggatcgattgcagtcagagcctgaaagtatccgtaaatggagagaagaacaaatggaacgcttggaagcccttgatgccaattctcggaagcaagaagcagagtggaaagaaaaggcaataaaggagctagaagaatggtatgcaagacaggacgagcagctacagaaaacaaaagcaaacaacagggcagcagaagaagcctttgtaaatgacattgacgagtcgtccccaggcactgagtgggaacgggtggcccggctgtgtgactttaaccccaagtctagcaagcaggccaaagatgtctcccgcatgcgctcagtcctcatctccctcaagcaggccccgctggtgcactgaagagccaccctgtggaaacactacatctgcaatatcttaatcctactcagtgaagctcttcacagtcattggattaattatgttgagttcttttggaccaaacctttttgtctgtctggtgggatgcgcgttcctctcaagggtttccggctcaaaggggggggagagggggggccccaaaacccnggngggtttgnaantgtgggaaaaaacggttttgggggagggg

SEQ ID NO: 440242 - DNA, 551 bp, Homo sapiens
  misc_feature (71)..(71): n is a, c, g, or t
  misc_feature (78)..(78): n is a, c, g, or t
  misc_feature (91)..(92): n is a, c, g, or t
aagagcgcccccaacaataaggggattttgggcccctcgagggccaagtatttcgggcgcagggcaggctncagaaancaaaagcaaacannagggcagcagaagaagcctttgtaaatgacattgacgagtcgtccccaggcactgagtgggaacgggtggcccggctgtgtgactttaaccccaagtctagcaagcaggccaaagatgtctcccgcatgcgctcagtcctcatctccctcaagcaggccccgctggtgcactgaagagccaccctgtggaaacactacatctgcaatatcttaatcctactcagtgaagctcttcacagtcattggattaattatgttgagttcttttggaccaaacctttttgtctttagagttgttcattgtttgtgattgcatgtttccttccttcaactgtgttctccctggcattcagagaggagggagaggaggaagaggaaggggagggaagcttcccaagagtagcctcaacctgtgcttctgtgcattattctgagaataaatttctgtttcaaactgta

SEQ ID NO: 440243 - DNA, 510 bp, Homo sapiens
cgagtggaggaagagaaacaaaatcgaaaaaaagggggggcgctgggcgaaaaggcagcagaagaagcctttgtaaatgacattgacgagtcgtccccaggcactgagtgggaacgggtggcccggctgtgtgactttaaccccaagtctagcaagcaggccaaagatgtctcccgcatgcgctcagtcctcatctccctcaagcaggccccgctggtgcactgaagagccaccctgtggaaacactacatctgcaatatcttaatcctactcagtgaagctcttcacagtcattggattaattatgttgagttcttttggaccaaacctttttgtctttagagttgttcattgtttgtgattgcatgtttccttccttcaactgtgttctccctggcattcagagaggagggagaggaggaagaggaaggggagggaagcttcccaagagtagcctcaacctgtgcttctgtgcattattctgagaataaatttctgtttcaaactgta

SEQ ID NO: 440244 - DNA, 514 bp, Homo sapiens
cacaaacacactgcagaccaagtaggagtagatgctttgtggtcctctctagtgctaatattctgtgttctatcattctctggttcctgaatcatctctacctttggtaattgtcctaatagcaccctgcctcacagaagtgcttctaccatatttagttatgagagtgccaccttgtgttccacaaaaccattgtcaaacctggaatatggactagtttgggagaagaggtaaaagattaagatgaataccctactatgaactaatattggcagcattggtaaagaatcatctataattgtttctcccccaattggtgcccagaaggcttttttcctattaataatagaagtcagtatttccacatacacccttctcttttgctctgcccaaaacaagacaaaacaaaactaatgacccactaagatgtcagtggactgggataagaccaggaataggactgtgggaaagaccaggcaggaatagaagcactgaaatcagagttggttgtgca

SEQ ID NO: 440245 - DNA, 1143 bp, Homo sapiens
agcgggttgttcccttttcggctctgcaacaccgcctagaccgaccggatacacgggtagggcttccgctttacccgtctccctcctggcgcttgtcctcctctcccagtcggcaccacagcggtggctgccgggcgtggtgtcggtgggtcggttggtttttgtctcaccgttggtgtccgtgccgttcagttgcccgccatggctgagctggatccgttcggcgcccctgccggcgcccctggcggtcccgcgctggggaacggagtggccggcgccggcgaagaagacccggctgcggccttcttggcgcagcaagagagcgagattgcgggcatcgagaacgacgaggccttcgccatcctggacggcggcgcccccgggccccagccgcacggcgagccgccggggggtccggatgctgttgatggagtaatgaatggtgaatactaccaggaaagtaatggtccaacagacagttatgcagctatttcacaagtggatcgattgcagtcagagcctgaaagtatccgtaaatggagagaagaacaaatggaacgcttggaagcccttgatgccaattctcggaagcaagaagcagagtggaaagaaaaggcaataaaggagctagaagaatggtatgcaagacaggacgagcagctacagaaaacaaaagcaaacaacagggcagcagaagaagcctttgtaaatgacattgacgagtcgtccccaggcactgagtgggaacgggtggcccggctgtgtgactttaaccccaagtctagcaagcaggccaaagatgtctcccgcatgcgctcagtcctcatctccctcaagcaggccccgctggtgcactgaagagccaccctgtggaaacactacatctgcaatatcttaatcctactcagtgaagctcttcacagtcattggattaattatgttgagttcttttggaccaaacctttttgtctttagagttgttcattgtttgtgattgcatgtttccttccttcaactgtgttctccctggcattcagagaggagggagaggaggaagaggaaggggagggaagcttcccaagagtagcctcaacctgtgcttctgtgcattattctgagaataaatttctgtttcaaactgta

SEQ ID NO: 440246 - DNA, 1112 bp, Homo sapiens
  misc_feature (9)..(9): n is a, c, g, or t
gagggcaanaaaaacgaaataggctaggtacgaggctgggtgttggtctccctcctggcgcttgtcctcctctcccagtcggcaccacagcggtggctgccgggcgtggtgtcggtgggtcggttggtttttgtctcaccgttggtgtccgtgccgttcagttgcccgccatggctgagctggatccgttcggcgcccctgccggcgcccctggcggtcccgcgctggggaacggagtggccggcgccggcgaagaagacccggctgcggccttcttggcgcagcaagagagcgagattgcgggcatcgagaacgacgaggccttcgccatcctggacggcggcgcccccgggccccagccgcacggcgagccgccggggggtccggatgctgttgatggagtaatgaatggtgaatactaccaggaaagtaatggtccaacagacagttatgcagctatttcacaagtggatcgattgcagtcagagcctgaaagtatccgtaaatggagagaagaacaaatggaacgcttggaagcccttgatgccaattctcggaagcaagaagcagagtggaaagaaaaggcaataaaggagctagaagaatggtatgcaagacaggacgagcagctacagaaaacaaaagcaaacaacagggcagcagaagaagcctttgtaaatgacattgacgagtcgtccccaggcactgagtgggaacgggtggcccggctgtgtgactttaaccccaagtctagcaagcaggccaaagatgtctcccgcatgcgctcagtcctcatctccctcaagcaggccccgctggtgcactgaagagccaccctgtggaaacactacatctgcaatatcttaatcctactcagtgaagctcttcacagtcattggattaattatgttgagttcttttggaccaaacctttttgtctttagagttgttcattgtttgtgattgcatgtttccttccttcaactgtgttctccctggcattcagagaggagggagaggaggaagaggaaggggagggaagcttcccaagagtagcctcaacctgtgcttctgtgcattattctgagaataaatttctgtttcaaactgta

SEQ ID NO: 440247 - DNA, 1285 bp, Homo sapiens
  misc_feature (1234)..(1234): n is a, c, g, or t
  misc_feature (1243)..(1243): n is a, c, g, or t
  misc_feature (1247)..(1247): n is a, c, g, or t
  misc_feature (1260)..(1260): n is a, c, g, or t
  misc_feature (1272)..(1272): n is a, c, g, or t
  misc_feature (1279)..(1279): n is a, c, g, or t
  misc_feature (1282)..(1282): n is a, c, g, or t
agcgggttgttcccttttcggctctgcaacaccgcctagaccgaccggatacacgggtagggcttccgctttacccgtctccctcctggcgcttgtcctcctctcccagtcggcaccacagcggtggctgccgggcgtggtgtcggtgggtcggttggtttttgtctcaccgttggtgtccgtgccgttcagttgcccgccatggctgagctggatccgttcggcgcccctgccggcgcccctggcggtcccgcgctggggaacggagtggccggcgccggcgaagaagacccggctgcggccttcttggcgcagcaagagagcgagattgcgggcatcgagaacgacgaggccttcgccatcctggacggcggcgcccccgggccccagccgcacggcgagccgccggggggtccggatgctgttgatggagtaatgaatggtgaatactaccaggaaagtaatggtccaacagacagttatgcagctatttcacaagtggatcgattgcagtcagagcctgaaagtatccgtaaatggagagaagaacaaatggaacgcttggaagcccttgatgccaattctcggaagcaagaagcagagtggaaagaaaaggcaataaaggagctagaagaatggtatgcaagacaggacgagcagctacagaaaacaaaagcaaacaacagggcagcagaagaagcctttgtaaatgacattgacgagtcgtccccaggcactgagtgggaacgggtggcccggctgtgtgactttaaccccaagtctagcaagcaggccaaagatgtctcccgcatgcgctcagtcctcatctccctcaagcaggccccgctggtgcactgaagagccaccctgtggaaacactacatctgcaatatcttaatcctactcagtgaagctcttcacagtcattggattaattatgttgagttcttttggaccaaacctttttgtctttagagttgttcattgtttgtgattgcatgtttccttccttcaactgtgttctccctggcattcagagaggagggagaggaggaagaggaaggggagggaagcttcccaagagtagcctcaacctgtgcttctgtgcattattctgagaataaatttctgtttcaaactgtaaaaaaaaaaaaaaaaaaaaaacaaaaaaaaaaaaaaaaaaaaaaaaaaaaaaacaaacacacaaaaacacaaaaacacaaaaaaaaaaacnaaaacacanaaancaaacacacacanacaccacaccancaaaaancanaca

SEQ ID NO: 440248 - DNA, 1391 bp, Homo sapiens
agcgggttgttcccttttcggctctgcaacaccgcctagaccgaccggatacacgggtagggcttccgctttacccgtctccctcctggcgcttgtcctcctctcccagtcggcaccacagcggtggctgccgggcgtggtgtcggtgggtcggttggtttttgtctcaccgttggtgtccgtgccgttcagttgcccgccatggctgagctggatccgttcggcgcccctgccggcgcccctggcggtcccgcgctggggaacggagtggccggcgccggcgaagaagacccggctgcggccttcttggcgcagcaagagagcgagattgcgggcatcgagaacgacgaggccttcgccatcctggacggcggcgcccccgggccccagccgcacggcgagccgccggggggtccggatgctgttgatggagtaatgaatggtgaatactaccaggaaagtaatggtccaacagacagttatgcagctatttcacaagtggatcgattgcagtcagagcctgaaagtatccgtaaatggagagaagaacaaatggaacgcttggaagcccttgatgccaattctcggaagcaagaagcagagtggaaagaaaaggcaataaaggagctagaagaatggtatgcaagacaggacgagcagctacagaaaacaaaagcaaacaacagggcagcagaagaagcctttgtaaatgacattgacgagtcgtccccaggcactgagtgggaacgggtggcccggctgtgtgactttaaccccaagtctagcaagcaggccaaagatgtctcccgcatgcgctcagtcctcatctccctcaagcaggccccgctggtgcactgaagagccaccctgtggaaacactacatctgcaatatcttaatcctactcagtgaagctcttcacagtcattggattaattatgttgagttcttttggaccaaacctttttgtctttagagttgttcattgtttgtgattgcatgtttccttccttcaactgtgttctccctggcattcagagaggagggagaggaggaagaggaaggggagggaagcttcccaagagtagcctcaacctgtgcttctgtgcattattctgagaataaatttctgtttcaaactgtataacaaaaaaaaaaacaccaaaacaaccaccagcagactccacaccagtaaaaaacaactagcaacccgacggcaaataccgggacgcacgagcaaaacgacgggagcacaaaagcgcacacacagcgaaagaaggggagacagaggacagacgagctgcgagcaacaagagggggaaacacgcccgcacacccacacacaagagagacggcaaaaccgacaaggaggcggagtacggcacaaagaaa

SEQ ID NO: 440249 - DNA, 1060 bp, Homo sapiens
  misc_feature (3)..(3): n is a, c, g, or t
  misc_feature (17)..(17): n is a, c, g, or t
atngctagtacgaggcntggtgttgaatcggccgacagcggtggctgccgggcgtggtgtcggtgggtcggttggtttttgtctcaccgttggtgtccgtgccgttcagttgcccgccatggctgagctggatccgttcggcgcccctgccggcgcccctggcggtcccgcgctggggaacggagtggccggcgccggcgaagaagacccggctgcggccttcttggcgcagcaagagagcgagattgcgggcatcgagaacgacgaggccttcgccatcctggacggcggcgcccccgggccccagccgcacggcgagccgccggggggtccggatgctgttgatggagtaatgaatggtgaatactaccaggaaagtaatggtccaacagacagttatgcagctatttcacaagtggatcgattgcagtcagagcctgaaagtatccgtaaatggagagaagaacaaatggaacgcttggaagcccttgatgccaattctcggaagcaagaagcagagtggaaagaaaaggcaataaaggagctagaagaatggtatgcaagacaggacgagcagctacagaaaacaaaagcaaacaacagggcagcagaagaagcctttgtaaatgacattgacgagtcgtccccaggcactgagtgggaacgggtggcccggctgtgtgactttaaccccaagtctagcaagcaggccaaagatgtctcccgcatgcgctcagtcctcatctccctcaagcaggccccgctggtgcactgaagagccaccctgtggaaacactacatctgcaatatcttaatcctactcagtgaagctcttcacagtcattggattaattatgttgagttcttttggaccaaacctttttgtctttagagttgttcattgtttgtgattgcatgtttccttccttcaactgtgttctccctggcattcagagaggagggagaggaggaagaggaaggggagggaagcttcccaagagtagcctcaacctgtgcttctgtgcattattctgagaataaatttctgtttcaaactgta

SEQ ID NO: 440250 - DNA, 1087 bp, Homo sapiens
  misc_feature (1044)..(1044): n is a, c, g, or t
  misc_feature (1047)..(1047): n is a, c, g, or t
  misc_feature (1055)..(1055): n is a, c, g, or t
  misc_feature (1058)..(1058): n is a, c, g, or t
agcgggttgttcccttttcggctctgcaacaccgcctagaccgaccggatacacgggtagggcttccgctttacccgtctccctcctggcgcttgtcctcctctcccagtcggcaccacagcggtggctgccgggcgtggtgtcggtgggtcggttggtttttgtctcaccgttggtgtccgtgccgttcagttgcccgccatggctgagctggatccgttcggcgcccctgccggcgcccctggcggtcccgcgctggggaacggagtggccggcgccggcgaagaagacccggctgcggccttcttggcgcagcaagagagcgagattgcgggcatcgagaacgacgaggccttcgccatcctggacggcggcgcccccgggccccagccgcacggcgagccgccggggggtccggatgctgttgatggagtaatgaatggtgaatactaccaggaaagtaatggtccaacagacagttatgcagctatttcacaagtggatcgattgcagtcagagcctgaaagtatccgtaaatggagagaagaacaaatggaacgcttggaagcccttgatgccaattctcggaagcaagaagcagagtggaaagaaaaggcaataaaggagctagaagaatggtatgcaagacaggacgagcagctacagaaaacaaaagcaaacaacagggcagcagaagaagcctttgtaaatgacattgacgagtcgtccccaggcactgagtgggaacgggtggcccggctgtgtgactttaaccccaagtctagcaagcaggccaaagatgtctcccgcatgcgctcagtcctcatctccctcaagcaggccccgctggtgcactgaagagccaccctgtggaaacactacatctgcaatatcttaatcctactcagtgaagctcttcacagtcattggattaattatgttgagttcttttggaccaaacctttttgtctgtctggtgggatgcgcgttcctctcaagggtttccggctcaaaggggggggagagggggggccccaaaacccnggngggtttgnaantgtgggaaaaaacggttttgggggagggg

SEQ ID NO: 440251 - DNA, 3475 bp, Homo sapiens
  misc_feature (1149)..(1149): n is a, c, g, or t
  misc_feature (1612)..(1612): n is a, c, g, or t
  misc_feature (2195)..(2195): n is a, c, g, or t
agcgggttgttcccttttcggctctgcaacaccgcctagaccgaccggatacacgggtagggcttccgctttacccgtctccctcctggcgcttgtcctcctctcccagtcggcaccacagcggtggctgccgggcgtggtgtcggtgggtcggttggtttttgtctcaccgttggtgtccgtgccgttcagttgcccgccatggctgagctggatccgttcggcgcccctgccggcgcccctggcggtcccgcgctggggaacggagtggccggcgccggcgaagaagacccggctgcggccttcttggcgcagcaagagagcgagattgcgggcatcgagaacgacgaggccttcgccatcctggacggcggcgcccccgggccccagccgcacggcgagccgccggggggtccggatgctgttgatggagtaatgaatggtgaatactaccaggaaagtaatggtccaacagacagttatgcagctatttcacaagtggatcgattgcagtcagagcctgaaagtatccgtaaatggagagaagaacaaatggaacgcttggaagcccttgatgccaattctcggaagcaagaagcagagtggaaagaaaaggcaataaaggagctagaagaatggtatgcaagacaggacgagcagctacagaaaacaaaagcaaacaacagggtggcagatgaagctttctacaaacaacccttcgctgacgtgattggttatgtgtatgttgcaaaactaattcctttttctacatctgattctttctacttttgtttagagttaatgctccttttatgtcacaagttgctttgctttttaaattatttcaaattggcactttgggggctgcctaagaattgataagcggggtatgatctgttgatgaatcttccagatttgtgactccctgcatcctctgatggccatttttcatatttggggttttggagggaagaaagctaactcgctttcaaaatgtgtcatttgcgatcttatctgggaacggtttgaggctcgggggaactctgctctcttgctcttggctgccatcactgctgccatgccctgttgcctgcctgcctcaggtgggaaggaggtttccccacctgggagcaggtggcagtcccaggnggttaggagccagtgagcagcagcaccttgcattgccaaaatcagagctgtggggcagcattttccatacttggttcattcaaacaatgtggggtcgtttgcctctccctcaggcagaagagtccagagcagagggggttgtctccagtgggtgtctataattgttcctctgtggtcttgcatgtcagaaattgctatttagtggtcagcttctgatgtcctgtctcctagcacagggaagcccccagctttgagatcaggatagtcaaagtgtcttgatacgggccacttgggcttctccccctgacccccccaaaagaaacctgcatcttctctggagaaggtgtttttcttattcttttttttttctttttttcttttttcttttttttaaggatttcttttatcaaagcagtattgctgaagagttggaaacagttctcattgtctcctccttaaaaanagggctggctttacatgagaagtaagggtggaatggaagaggagaggaacctgtggaaggtgggcgatgagctcaggtctgtagagcctctcagggcctatgaccttgagatgttcatccccttagaagatagaactgggtttcctgggcccccagatgcatttgcagtgagacttgtgaaatgctggacttacaggtggtgtttgatttgatttctgcacattctctctggagtagaaatggagactggaaaggtcgagtctggttttgctgggcagctgggtggccagcaaagccagctgcacgtccccaagcacagatagagtggcaagggcatgtccagcttactgaccatctgcattgagctcattctcattttctatatctgacttaaagtttctctcgtttcttttcttctcttcacctttaagcacaaacataaaccatccttgctacagcctagaacagttaagtaaacctttctcactgcccctaactgtgtgtgccatgaagtcgcagtgttgtagtggctctgggcttcagcggtgtttgccacggccatccctgtgatagtgccacctcngtccccacagaccagtcatctccattgcttttctttgcccgtgatgcttgttggagtagatgaatatagtgtgtcttagcgctgtcctttccggctgtagctcccaccagttaattccgaactgggggtgggctgaccttgatgtgaaagaatgttggagcagcatcctgccaaaaagcaactcacgttggctctcctgccagtgtgccctgagtggccccaaggcacctggctggagggaaaatggcaaacttttggctgaactggagaatgtcctaacaaacccccttccagaatggctttagtctctagtgcttgctagcatgggagctttgtcttgaattccttttgatctgccccgtttctctccagccttaggaataaatctagaggctattgtgcaatgatctgtgggctttttagaagtctctaaatttccttgaaattcagtacagcccagcataaactactcaagttcttgatcagcctgctgctttgttcttattaataaaagcagtgtgtagctggctaaggacttgttttattaatgctccacaggagcagagacagacagagagacatagtgagccttgaaccaaacacctgtattccaacattttacacagcggtctgggcaccctgtgcctaggagagccagctacgtgtctacctgagtctgacctgggccaggggctgttatcttgggaaagccagaatgtcattaagaaagggacaaataggcagttgcttgtgtagcaaggcagccaccaggttgctcaaagggggttctgcataaaccaacatattttgttgttgcttccagggcagcagaagaagcctttgtaaatgacattgacgagtcgtccccaggcactgagtgggaacgggtggcccggctgtgtgactttaaccccaagtctagcaagcaggccaaagatgtctcccgcatgcgctcagtcctcatctccctcaagcaggccccgctggtgcactgaagagccaccctgtggaaacactacatctgcaatatcttaatcctactcagtgaagctcttcacagtcattggattaattatgttgagttcttttggaccaaacctttttgtctttagagttgttcattgtttgtgattgcatgtttccttccttcaactgtgttctccctggcattcagagaggagggagaggaggaagaggaaggggagggaagcttcccaagagtagcctcaacctgtgcttctgtgcattattctgagaataaatttctgtttcaaactgta

SEQ ID NO: 440252 - DNA, 2172 bp, Homo sapiens
  misc_feature (892)..(892): n is a, c, g, or t
agcgggttgttcccttttcggctctgcaacaccgcctagaccgaccggatacacgggtagggcttccgctttacccgtctccctcctggcgcttgtcctcctctcccagtcggcaccacagcggtggctgccgggcgtggtgtcggtgggtcggttggtttttgtctcaccgttggtgtccgtgccgttcagttgcccgccatggctgagctggatccgttcggcgcccctgccggcgcccctggcggtcccgcgctggggaacggagtggccggcgccggcgaagaagacccggctgcggccttcttggcgcagcaagagagcgagattgcgggcatcgagaacgacgaggccttcgccatcctggacggcggcgcccccgggccccagccgcacggcgagccgccggggggtccggatgctgttgatggagtaatgaatggtgaatactaccaggaaagtaatggtccaacagacagttatgcagctatttcacaagtggatcgattgcagtcagagcctgaaagtatccgtaaatggagagaagaacaaatggaacgcttggaagcccttgatgccaattctcggaagcaagaagcagagtggaaagaaaaggcaataaaggagctagaagaatggtatgcaagacaggacgagcagctacagaaaacaaaagcaaacaacagggtggcagatgaagctttctacaaacaacccttcgctgacgtgattggttatgtcacaaacataaaccatccttgctacagcctagaacagttaagtaaacctttctcactgcccctaactgtgtgtgccatgaagtcgcagtgttgtagtggctctgggcttcagcggtgtttgccacggccatccctgtgatagtgccacctcngtccccacagaccagtcatctccattgcttttctttgcccgtgatgcttgttggagtagatgaatatagtgtgtcttagcgctgtcctttccggctgtagctcccaccagttaattccgaactgggggtgggctgaccttgatgtgaaagaatgttggagcagcatcctgccaaaaagcaactcacgttggctctcctgccagtgtgccctgagtggccccaaggcacctggctggagggaaaatggcaaacttttggctgaactggagaatgtcctaacaaacccccttccagaatggctttagtctctagtgcttgctagcatgggagctttgtcttgaattccttttgatctgccccgtttctctccagccttaggaataaatctagaggctattgtgcaatgatctgtgggctttttagaagtctctaaatttccttgaaattcagtacagcccagcataaactactcaagttcttgatcagcctgctgctttgttcttattaataaaagcagtgtgtagctggctaaggacttgttttattaatgctccacaggagcagagacagacagagagacatagtgagccttgaaccaaacacctgtattccaacattttacacagcggtctgggcaccctgtgcctaggagagccagctacgtgtctacctgagtctgacctgggccaggggctgttatcttgggaaagccagaatgtcattaagaaagggacaaataggcagttgcttgtgtagcaaggcagccaccaggttgctcaaagggggttctgcataaaccaacatattttgttgttgcttccagggcagcagaagaagcctttgtaaatgacattgacgagtcgtccccaggcactgagtgggaacgggtggcccggctgtgtgactttaaccccaagtctagcaagcaggccaaagatgtctcccgcatgcgctcagtcctcatctccctcaagcaggccccgctggtgcactgaagagccaccctgtggaaacactacatctgcaatatcttaatcctactcagtgaagctcttcacagtcattggattaattatgttgagttcttttggaccaaacctttttgtctttagagttgttcattgtttgtgattgcatgtttccttccttcaactgtgttctccctggcattcagagaggagggagaggaggaagaggaaggggagggaagcttcccaagagtagcctcaacctgtgcttctgtgcattattctgagaataaatttctgtttcaaactgta

SEQ ID NO: 440253 - DNA, 1105 bp, Homo sapiens
agcgggttgttcccttttcggctctgcaacaccgcctagaccgaccggatacacgggtagggcttccgctttacccgtctccctcctggcgcttgtcctcctctcccagtcggcaccacagcggtggctgccgggcgtggtgtcggtgggtcggttggtttttgtctcaccgttggtgtccgtgccgttcagttgcccgccatggctgagctggatccgttcggcgcccctgccggcgcccctggcggtcccgcgctggggaacggagtggccggcgccggcgaagaagacccggctgcggccttcttggcgcagcaagagagcgagattgcgggcatcgagaacgacgaggccttcgccatcctggacggcggcgcccccgggccccagccgcacggcgagccgccggggggtccgggaaagtaatggtccaacagacagttatgcagctatttcacaagtggatcgattgcagtcagagcctgaaagtatccgtaaatggagagaagaacaaatggaacgcttggaagcccttgatgccaattctcggaagcaagaagcagagtggaaagaaaaggcaataaaggagctagaagaatggtatgcaagacaggacgagcagctacagaaaacaaaagcaaacaacagggcagcagaagaagcctttgtaaatgacattgacgagtcgtccccaggcactgagtgggaacgggtggcccggctgtgtgactttaaccccaagtctagcaagcaggccaaagatgtctcccgcatgcgctcagtcctcatctccctcaagcaggccccgctggtgcactgaagagccaccctgtggaaacactacatctgcaatatcttaatcctactcagtgaagctcttcacagtcattggattaattatgttgagttcttttggaccaaacctttttgtctttagagttgttcattgtttgtgattgcatgtttccttccttcaactgtgttctccctggcattcagagaggagggagaggaggaagaggaaggggagggaagcttcccaagagtagcctcaacctgtgcttctgtgcattattctgagaataaatttctgtttcaaactgta

SEQ ID NO: 440254 - DNA, 1189 bp, Homo sapiens
agcgggttgttcccttttcggctctgcaacaccgcctagaccgaccggatacacgggtagggcttccgctttacccgtctccctcctggcgcttgtcctcctctcccagtcggcaccacagcggtggctgccgggcgtggtgtcggtgggtcggttggtttttgtctcaccgttggtgtccgtgccgttcagttgcccgccatggctgagctggatccgttcggcgcccctgccggcgcccctggcggtcccgcgctggggaacggagtggccggcgccggcgaagaagacccggctgcggccttcttggcgcagcaagagagcgagattgcgggcatcgagaacgacgaggccttcgccatcctggacggcggcgcccccgggccccagccgcacggcgagccgccggggggtccggatgctgttgatggagtaatgaatggtgaatactaccaggaaagtaatggtccaacagacagttatgcagctatttcacaagtggatcgattgcagtcagagcctgaaagtatccgtaaatggagagaagaacaaatggaacgcttggaagcccttgatgccaattctcggaagcaagaagcagagtggaaagaaaaggcaataaaggagctagaagaatggtatgcaagacaggacgagcagctacagaaaacaaaagcaaacaacagggcagcagaagaagcctttgtaaatgacattgacgagtcgtccccaggcactgagtgggaacgggtggcccggctgtgtgactttaaccccaagtctagcaagcaggccaaagatgtctcccgcatgcgctcagtcctcatctccctcaagcaggccccgctggtgcactgaagagccaccccatcgataaacaccggtgtttatcgatgccacccctggccttcttttgcccgaccaggggtggctggcagataccacccgagagattaagagctgttctctggagttccaatcccacctttaccgtttaatagctgtgtgactttaggtaagttacttaacctctctgtgctttatttcctcacctgtcaaatggtaatcataataggacccaccttagaagaattaaatgggaccatataagctaagtgcttagacatattattctcttccagacatgaaataagcctcttggcctcccgagttacccaagaagatgtgg

SEQ ID NO: 440255 - DNA, 1197 bp, Homo sapiens
agcgggttgttcccttttcggctctgcaacaccgcctagaccgaccggatacacgggtagggcttccgctttacccgtctccctcctggcgcttgtcctcctctcccagtcggcaccacagcggtggctgccgggcgtggtgtcggtgggtcggttggtttttgtctcaccgttggtgtccgtgccgttcagttgcccgccatggctgagctggatccgttcggcgcccctgccggcgcccctggcggtcccgcgctggggaacggagtggccggcgccggcgaagaagacccggctgcggccttcttggcgcagcaagagagcgagattgcgggcatcgagaacgacgaggccttcgccatcctggacggcggcgcccccgggccccagccgcacggcgagccgccggggggtccggatgctgttgatggagtaatgaatggtgaatactaccaggaaagtaatggtccaacagacagttatgcagctatttcacaagtggatcgattgcagtcagagcctgaaagtatccgtaaatggagagaagaacaaatggaacgcttggaagcccttgatgccaattctcggaagcaagaagcagagtggaaagaaaaggcaataaaggagctagaagaatggtatgcaagacaggacgagcagctacagaaaacaaaagcaaacaacagggtggcagatgaagctttctacaaacaacccttcgctgacgtgattggttatgtggcagcagaagaagcctttgtaaatgacattgacgagtcgtccccaggcactgagtgggaacgggtggcccggctgtgtgactttaaccccaagtctagcaagcaggccaaagatgtctcccgcatgcgctcagtcctcatctccctcaagcaggccccgctggtgcactgaagagccaccctgtggaaacactacatctgcaatatcttaatcctactcagtgaagctcttcacagtcattggattaattatgttgagttcttttggaccaaacctttttgtctttagagttgttcattgtttgtgattgcatgtttccttccttcaactgtgttctccctggcattcagagaggagggagaggaggaagaggaaggggagggaagcttcccaagagtagcctcaacctgtgcttctgtgcattattctgagaataaatttctgtttcaaactgta

SEQ ID NO: 440256 - DNA, 3587 bp, Homo sapiens
  misc_feature (1149)..(1149): n is a, c, g, or t
  misc_feature (1612)..(1612): n is a, c, g, or t
  misc_feature (2195)..(2195): n is a, c, g, or t
  misc_feature (3536)..(3536): n is a, c, g, or t
  misc_feature (3545)..(3545): n is a, c, g, or t
  misc_feature (3549)..(3549): n is a, c, g, or t
  misc_feature (3562)..(3562): n is a, c, g, or t
  misc_feature (3574)..(3574): n is a, c, g, or t
  misc_feature (3581)..(3581): n is a, c, g, or t
  misc_feature (3584)..(3584): n is a, c, g, or t
agcgggttgttcccttttcggctctgcaacaccgcctagaccgaccggatacacgggtagggcttccgctttacccgtctccctcctggcgcttgtcctcctctcccagtcggcaccacagcggtggctgccgggcgtggtgtcggtgggtcggttggtttttgtctcaccgttggtgtccgtgccgttcagttgcccgccatggctgagctggatccgttcggcgcccctgccggcgcccctggcggtcccgcgctggggaacggagtggccggcgccggcgaagaagacccggctgcggccttcttggcgcagcaagagagcgagattgcgggcatcgagaacgacgaggccttcgccatcctggacggcggcgcccccgggccccagccgcacggcgagccgccggggggtccggatgctgttgatggagtaatgaatggtgaatactaccaggaaagtaatggtccaacagacagttatgcagctatttcacaagtggatcgattgcagtcagagcctgaaagtatccgtaaatggagagaagaacaaatggaacgcttggaagcccttgatgccaattctcggaagcaagaagcagagtggaaagaaaaggcaataaaggagctagaagaatggtatgcaagacaggacgagcagctacagaaaacaaaagcaaacaacagggtggcagatgaagctttctacaaacaacccttcgctgacgtgattggttatgtgtatgttgcaaaactaattcctttttctacatctgattctttctacttttgtttagagttaatgctccttttatgtcacaagttgctttgctttttaaattatttcaaattggcactttgggggctgcctaagaattgataagcggggtatgatctgttgatgaatcttccagatttgtgactccctgcatcctctgatggccatttttcatatttggggttttggagggaagaaagctaactcgctttcaaaatgtgtcatttgcgatcttatctgggaacggtttgaggctcgggggaactctgctctcttgctcttggctgccatcactgctgccatgccctgttgcctgcctgcctcaggtgggaaggaggtttccccacctgggagcaggtggcagtcccaggnggttaggagccagtgagcagcagcaccttgcattgccaaaatcagagctgtggggcagcattttccatacttggttcattcaaacaatgtggggtcgtttgcctctccctcaggcagaagagtccagagcagagggggttgtctccagtgggtgtctataattgttcctctgtggtcttgcatgtcagaaattgctatttagtggtcagcttctgatgtcctgtctcctagcacagggaagcccccagctttgagatcaggatagtcaaagtgtcttgatacgggccacttgggcttctccccctgacccccccaaaagaaacctgcatcttctctggagaaggtgtttttcttattcttttttttttctttttttcttttttcttttttttaaggatttcttttatcaaagcagtattgctgaagagttggaaacagttctcattgtctcctccttaaaaanagggctggctttacatgagaagtaagggtggaatggaagaggagaggaacctgtggaaggtgggcgatgagctcaggtctgtagagcctctcagggcctatgaccttgagatgttcatccccttagaagatagaactgggtttcctgggcccccagatgcatttgcagtgagacttgtgaaatgctggacttacaggtggtgtttgatttgatttctgcacattctctctggagtagaaatggagactggaaaggtcgagtctggttttgctgggcagctgggtggccagcaaagccagctgcacgtccccaagcacagatagagtggcaagggcatgtccagcttactgaccatctgcattgagctcattctcattttctatatctgacttaaagtttctctcgtttcttttcttctcttcacctttaagcacaaacataaaccatccttgctacagcctagaacagttaagtaaacctttctcactgcccctaactgtgtgtgccatgaagtcgcagtgttgtagtggctctgggcttcagcggtgtttgccacggccatccctgtgatagtgccacctcngtccccacagaccagtcatctccattgcttttctttgcccgtgatgcttgttggagtagatgaatatagtgtgtcttagcgctgtcctttccggctgtagctcccaccagttaattccgaactgggggtgggctgaccttgatgtgaaagaatgttggagcagcatcctgccaaaaagcaactcacgttggctctcctgccagtgtgccctgagtggccccaaggcacctggctggagggaaaatggcaaacttttggctgaactggagaatgtcctaacaaacccccttccagaatggctttagtctctagtgcttgctagcatgggagctttgtcttgaattccttttgatctgccccgtttctctccagccttaggaataaatctagaggctattgtgcaatgatctgtgggctttttagaagtctctaaatttccttgaaattcagtacagcccagcataaactactcaagttcttgatcagcctgctgctttgttcttattaataaaagcagtgtgtagctggctaaggacttgttttattaatgctccacaggagcagagacagacagagagacatagtgagccttgaaccaaacacctgtattccaacattttacacagcggtctgggcaccctgtgcctaggagagccagctacgtgtctacctgagtctgacctgggccaggggctgttatcttgggaaagccagaatgtcattaagaaagggacaaataggcagttgcttgtgtagcaaggcagccaccaggttgctcaaagggggttctgcataaaccaacatattttgttgttgcttccagggcagcagaagaagcctttgtaaatgacattgacgagtcgtccccaggcactgagtgggaacgggtggcccggctgtgtgactttaaccccaagtctagcaagcaggccaaagatgtctcccgcatgcgctcagtcctcatctccctcaagcaggccccgctggtgcactgaagagccaccctgtggaaacactacatctgcaatatcttaatcctactcagtgaagctcttcacagtcattggattaattatgttgagttcttttggaccaaacctttttgtctttagagttgttcattgtttgtgattgcatgtttccttccttcaactgtgttctccctggcattcagagaggagggagaggaggaagaggaaggggagggaagcttcccaagagtagcctcaacctgtgcttctgtgcattattctgagaataaatttctgtttcaaactgtaaaaaaaaaaaaaaaaaaaaaaaacaaacacacaaaaacacaaaaacacaaaaaaaaaaacnaaaacacanaaancaaacacacacanacaccacaccancaaaaancanaca

SEQ ID NO: 440257 - DNA, 1147 bp, Homo sapiens
  misc_feature (1096)..(1096): n is a, c, g, or t
  misc_feature (1105)..(1105): n is a, c, g, or t
  misc_feature (1109)..(1109): n is a, c, g, or t
  misc_feature (1122)..(1122): n is a, c, g, or t
  misc_feature (1134)..(1134): n is a, c, g, or t
  misc_feature (1141)..(1141): n is a, c, g, or t
  misc_feature (1144)..(1144): n is a, c, g, or t
agcgggttgttcccttttcggctctgcaacaccgcctagaccgaccggatacacgggtagggcttccgctttacccgtctccctcctggcgcttgtcctcctctcccagtcggcaccacagcggtggctgccgggcgtggtgtcggtgggtcggttggtttttgtctcaccgttggtgtccgtgccgttcagttgcccgccatggctgagctggatccgttcggcgcccctgccggcgcccctggcggtcccgcgctggggaacggagtggccggcgccggcgaagaagacccggctgcggccttcttggcgcagcaagagagcgagattgcgggcatcgagaacgacgaggccttcgccatcctggacggcggcgcccccgggccccagccgcacggcgagccgccggggggtccggatgctgttgatggagtaatgaatggtgaatactaccaggaaagtaatggtccaacagacagttatgcagctatttcacaagtggatcgattgcagtcagagcctgaaagtatccgtaaatggagagaagaacaaatggaacgcttggaagcccttgatgccaattctcggaagcaagaagcagagtggaaagaaaaggcaataaaggagctagaagaatggtatgcaagacaggacgagcagctacagaaaacaaaagcaaacaacagggcagcagaagaagcctttgtaaatgacattgacgagtcgtccccaggcactgagtgggaacgggtggcccggctgtgtgactttaaccccaagtctagcaagcaggccaaagatgtctcccgcaacagtcattggattaattatgttgagttcttttggaccaaacctttttgtctttagagttgttcattgtttgtgattgcatgtttccttccttcaactgtgttctccctggcattcagagaggagggagaggaggaagaggaaggggagggaagcttcccaagagtagcctcaacctgtgcttctgtgcattattctgagaataaatttctgtttcaaactgtaaaaaaaaaaaaaaaaaaaaaaaacaaacacacaaaaacacaaaaacacaaaaaaaaaaacnaaaacacanaaancaaacacacacanacaccacaccancaaaaancanaca

SEQ ID NO: 440258 - DNA, 979 bp, Homo sapiens
agcgggttgttcccttttcggctctgcaacaccgcctagaccgaccggatacacgggtagggcttccgctttacccgtctccctcctggcgcttgtcctcctctcccagtcggcaccacagcggtggctgccgggcgtggtgtcggtgggtcggttggtttttgtctcaccgttggtgtccgtgccgttcagttgcccgccatggctgagctggatccgttcggcgcccctgccggcgcccctggcggtcccgcgctggggaacggagtggccggcgccggcgaagaagacccggctgcggccttcttggcgcagcaagagagcgagattgcgggcatcgagaacgacgaggccttcgccatcctggacggcggcgcccccgggccccagccgcacggcgagccgccggggggtccggatgctgttgatggagtaatgaatggtgaatactaccaggaaagtaatggtccaacagacagttatgcagctatttcacaagtggatcgattgcagtcagagcctgaaagtatccgtaaatggagagaagaacaaatggaacgcttggaagcccttgatgccaattctcggaagcaagaagcagagtggaaagaaaaggcaataaaggagctagaagaatggtatgcaagacaggacgagcagctacagaaaacaaaagcaaacaacagggcagcagaagaagcctttgtaaatgacattgacgagtcgtccccaggcactgagtgggaacgggtggcccggctgtgtgactttaaccccaagtctagcaagcaggccaaagatgtctcccgcacggtgggccagctatttctcagaggccgggggctgagacccggtggactattgggttacttccggggcccagcttgttttgtggccttgccccttgttggtgccttgggggtcccggtccggaggggggggggggcccccctggtttgtgtcaaaagcgcctgggtgg

SEQ ID NO: 440259 - DNA, 1077 bp, Homo sapiens
agcgggttgttcccttttcggctctgcaacaccgcctagaccgaccggatacacgggtagggcttccgctttacccgtctccctcctggcgcttgtcctcctctcccagtcggcaccacagcggtggctgccgggcgtggtgtcggtgggtcggttggtttttgtctcaccgttggtgtccgtgccgttcagttgcccgccatggctgagctggatccgttcggcgcccctgccggcgcccctggcggtcccgcgctggggaacggagtggccggcgccggcgaagaagacccggctgcggccttcttggcgcagcaagagagcgagattgcgggcatcgagaacgacgaggccttcgccatcctggacggcggcgcccccgggccccagccgcacggcgagccgccggggggtccggatgccaattctcggaagcaagaagcagagtggaaagaaaaggcaataaaggagctagaagaatggtatgcaagacaggacgagcagctacagaaaacaaaagcaaacaacagggtggcagatgaagctttctacaaacaacccttcgctgacgtgattggttatgtcacaaacataaaccatccttgctacagcctagaacaggcagcagaagaagcctttgtaaatgacattgacgagtcgtccccaggcactgagtgggaacgggtggcccggctgtgtgactttaaccccaagtctagcaagcaggccaaagatgtctcccgcatgcgctcagtcctcatctccctcaagcaggccccgctggtgcactgaagagccaccctgtggaaacactacatctgcaatatcttaatcctactcagtgaagctcttcacagtcattggattaattatgttgagttcttttggaccaaacctttttgtctttagagttgttcattgtttgtgattgcatgtttccttccttcaactgtgttctccctggcattcagagaggagggagaggaggaagaggaaggggagggaagcttcccaagagtagcctcaacctgtgcttctgtgcattattctgagaataaatttctgtttcaaactgta

SEQ ID NO: 440260 - DNA, 1195 bp, Homo sapiens
agcgggttgttcccttttcggctctgcaacaccgcctagaccgaccggatacacgggtagggcttccgctttacccgtctccctcctggcgcttgtcctcctctcccagtcggcaccacagcggtggctgccgggcgtggtgtcggtgggtcggttggtttttgtctcaccgttggtgtccgtgccgttcagttgcccgccatggctgagctggatccgttcggcgcccctgccggcgcccctggcggtcccgcgctggggaacggagtggccggcgccggcgaagaagacccggctgcggccttcttggcgcagcaagagagcgagattgcgggcatcgagaacgacgaggccttcgccatcctggacggcggcgcccccgggccccagccgcacggcgagccgccggggggtccgggaaagtaatggtccaacagacagttatgcagctatttcacaagtggatcgattgcagtcagagcctgaaagtatccgtaaatggagagaagaacaaatggaacgcttggaagcccttgatgccaattctcggaagcaagaagcagagtggaaagaaaaggcaataaaggagctagaagaatggtatgcaagacaggacgagcagctacagaaaacaaaagcaaacaacagggtggcagatgaagctttctacaaacaacccttcgctgacgtgattggttatgtcacaaacataaaccatccttgctacagcctagaacaggcagcagaagaagcctttgtaaatgacattgacgagtcgtccccaggcactgagtgggaacgggtggcccggctgtgtgactttaaccccaagtctagcaagcaggccaaagatgtctcccgcatgcgctcagtcctcatctccctcaagcaggccccgctggtgcactgaagagccaccctgtggaaacactacatctgcaatatcttaatcctactcagtgaagctcttcacagtcattggattaattatgttgagttcttttggaccaaacctttttgtctttagagttgttcattgtttgtgattgcatgtttccttccttcaactgtgttctccctggcattcagagaggagggagaggaggaagaggaaggggagggaagcttcccaagagtagcctcaacctgtgcttctgtgcattattctgagaataaatttctgtttcaaactgta

SEQ ID NO: 440261 - DNA, 1058 bp, Homo sapiens
  misc_feature (932)..(932): n is a, c, g, or t
  misc_feature (1058)..(1058): n is a, c, g, or t
agcgggttgttcccttttcggctctgcaacaccgcctagaccgaccggatacacgggtagggcttccgctttacccgtctccctcctggcgcttgtcctcctctcccagtcggcaccacagcggtggctgccgggcgtggtgtcggtgggtcggttggtttttgtctcaccgttggtgtccgtgccgttcagttgcccgccatggctgagctggatccgttcggcgcccctgccggcgcccctggcggtcccgcgctggggaacggagtggccggcgccggcgaagaagacccggctgcggccttcttggcgcagcaagagagcgagattgcgggcatcgagaacgacgaggccttcgccatcctggacggcggcgcccccgggccccagccgcacggcgagccgccggggggtccggatgctgttgatggagtaatgaatggtgaatactaccaggaaagtaatggtccaacagacagttatgcagctatttcacaagtggatcgattgcagtcagagcctgaaagtatccgtaaatggagagaagaacaaatggaacgcttggaagcccttgatgccaattctcggaagcaagaagcagagtggaaagaaaaggcaataaaggagctagaagaatggtatgcaagacaggacgagcagctacagaaaacaaaagcaaacaacagctgtgcttctgtgcattattctgagaataaatttctgtttcaaactgtaaaaaaaataacgacaaaaaaacaaaaacgtgggcgcttttatgtcgggggggggaaaaaaaaggggtattgaagggggcgtggggcaattggttgtttccgtgcacccggtttttgtgtacagggggactctgggggggcccataagggagaggggataaattgaaacgcgggttacctgtgtgtttgtggtgaaangaagagaaaaaaagaagtgagtataaatttacaaagaggtagagagaggaaacaagtatatatgcagaaaaaaagaatatcgataataataagagaagagtaaagagaaggtgagagatactaagn

SEQ ID NO: 440262 - DNA, 693 bp, Homo sapiens
  misc_feature (71)..(71): n is a, c, g, or t
  misc_feature (78)..(78): n is a, c, g, or t
  misc_feature (91)..(92): n is a, c, g, or t
  misc_feature (642)..(642): n is a, c, g, or t
  misc_feature (651)..(651): n is a, c, g, or t
  misc_feature (655)..(655): n is a, c, g, or t
  misc_feature (668)..(668): n is a, c, g, or t
  misc_feature (680)..(680): n is a, c, g, or t
  misc_feature (687)..(687): n is a, c, g, or t
  misc_feature (690)..(690): n is a, c, g, or t
aagagcgcccccaacaataaggggattttgggcccctcgagggccaagtatttcgggcgcagggcaggctncagaaancaaaagcaaacannagggcagcagaagaagcctttgtaaatgacattgacgagtcgtccccaggcactgagtgggaacgggtggcccggctgtgtgactttaaccccaagtctagcaagcaggccaaagatgtctcccgcatgcgctcagtcctcatctccctcaagcaggccccgctggtgcactgaagagccaccctgtggaaacactacatctgcaatatcttaatcctactcagtgaagctcttcacagtcattggattaattatgttgagttcttttggaccaaacctttttgtctttagagttgttcattgtttgtgattgcatgtttccttccttcaactgtgttctccctggcattcagagaggagggagaggaggaagaggaaggggagggaagcttcccaagagtagcctcaacctgtgcttctgtgcattattctgagaataaatttctgtttcaaactgtaaaaaaaaaaaaaaaaaaaaaacaaaaaaaaaaaaaaaaaaaaaaaaaaaaaaacaaacacacaaaaacacaaaaacacaaaaaaaaaaacnaaaacacanaaancaaacacacacanacaccacaccancaaaaancanaca

SEQ ID NO: 440263 - DNA, 767 bp, Homo sapiens
  misc_feature (605)..(605): n is a, c, g, or t
agcgggttgttcccttttcggctctgcaacaccgcctagaccgaccggatacacgggtagggcttccgctttacccgtctccctcctggcgcttgtcctcctctcccagtcggcaccacagcggtggctgccgggcgtggtgtcggtgggtcggttggtttttgtctcaccgttggtgtccgtgccgttcagttgcccgccatggctgagctggatccgttcggcgcccctgccggcgcccctggcggtcccgcgctggggaacggagtggccggcgccggcgaagaagacccggctgcggccttcttggcgcagcaagagagcgagattgcgggcatcgagaacgacgaggccttcgccatcctggacggcggcgcccccgggccccagccgcacggcgagccgccggggggtccggatgctgttgatggagtaatgaatggtgaatactaccaggaaagtaatggtccaacagacagttatgcagctatttcacaagtggatcgattgcagtcagagccttccaattctcttaaccaataacatactcgtacaattatacaatatatgatctacaataatggtattcaacacatgacgatcancttcttaatacatttacaaaccaacattcaccatataagcctttctaataacatttactattctcctcaacacttataggaacatgtaccccacttattactttaacccaatcttacaacatccacaaattctcaccatcactaatcctcatttgcttaact

SEQ ID NO: 440264 - DNA, 166 bp, Homo sapiens
atgctgttgatggagtaatgaatggtgaatactaccaggtacagagtactctgattctgttcattgatagtgattgagaatcttcctttcctgtgattttaattgactgacctagaaagaaaccccagtcctttgactttcctgaatgtattactggctggtgtgt

SEQ ID NO: 440265 - DNA, 387 bp, Homo sapiens
agaccaggcaggaatagaagcactgaaatcagagttggttgtgcaaacagagaaaacagaagtttatcttcccctctctactcttctcccccaacaggcacacagacatggacctgcacccaccacaagttcagcaagaccaaaataaactgatgaacttcagtttgcactttgcctcaattgtattgtctttctcttctctcccttcaaagatgccaattctcggaagcaagaagcagagtggaaagaaaaggcaataaaggagctagaagaatggtatgcaagacaggacgagcagctacagaaaacaaaagcaaacaacaggtcagtccgtggtggttgtagcacactttgttttccaaaattgaatcaaatccattctcagca

SEQ ID NO: 440266 - DNA, 1086 bp, Homo sapiens
cggtgcctctcgccccgtttgtccccccgccggctggtccggtccggccttcccgggctcgcagcggtggctgccgggcgtggtgtcggtgggtcggttggtttttgtctcaccgttggtgtccgtgccgttcagttgcccgccatggctgagctggatccgttcggcgcccctgccggcgcccctggcggtcccgcgctggggaacggagtggccggcgccggcgaagaagacccggctgcggccttcttggcgcagcaagagagcgagattgcgggcatcgagaacgacgaggccttcgccatcctggacggcggcgcccccgggccccagccgcacggcgagccgccggggggtccggatgctgttgatggagtaatgaatggtgaatactaccaggaaagtaatggtccaacagacagttatgcagctatttcacaagtggatcgattgcagtcagagcctgaaagtatccgtaaatggagagaagaacaaatggaacgcttggaagcccttgatgccaattctcggaagcaagaagcagagtggaaagaaaaggcaataaaggagctagaagaatggtatgcaagacaggacgagcagctacagaaaacaaaagcaaacaacagggcagcagaagaagcctttgtaaatgacattgacgagtcgtccccaggcactgagtgggaacgggtggcccggctgtgtgactttaaccccaagtctagcaagcaggccaaagatgtctcccgcatgcgctcagtcctcatctccctcaagcaggccccgctggtgcactgaagagccaccctgtggaaacactacatctgcaatatcttaatcctactcagtgaagctcttcacagtcattggattaattatgttgagttcttttggaccaaacctttttgtctttagagttgttcattgtttgtgattgcatgtttccttccttcaactgtgttctccctggcattcagagaggagggagaggaggaagaggaaggggagggaagcttcccaagagtagcctcaacctgtgcttctgtgcattattctgagaataaatttctgtttcaaactgta

SEQ ID NO: 440267 - DNA, 909 bp, Homo sapiens
  misc_feature (9)..(9): n is a, c, g, or t
gagggcaanaaaaacgaaataggctaggtacgaggctgggtgttggtctccctcctggcgcttgtcctcctctcccagtcggcaccacagcggtggctgccgggcgtggtgtcggtgggtcggttggtttttgtctcaccgttggtgtccgtgccgttcagttgcccgccatggctgagctggatccgttcggcgcccctgccggcgcccctggcggtcccgcgctggggaacggagtggccggcgccggcgaagaagacccggctgcggccttcttggcgcagcaagagagcgagattgcgggcatcgagaacgacgaggccttcgccatcctggacggcggcgcccccgggccccagccgcacggcgagccgccggggggtccggatgctgttgatggagtaatgaatggtgaatactaccaggaaagtaatggtccaacagacagttatgcagctatttcacaagtggatcgattgcagtcagagcctgaaagtatccgtaaatggagagaagaacaaatggaacgcttggaagcccttgatgccaattctcggaagcaagaagcagagtggaaagaaaaggcaataaaggagctagaagaatggtatgcaagacaggacgagcagctacagaaaacaaaagcaaacaacagggcagcagaagaagcctttgtaaatgacattgacgagtcgtccccaggcactgagtgggaacgggtggcccggctgtgtgactttaaccccaagtctagcaagcaggccaaagatgtctcccgcatgcgctcagtcctcatctccctcaagcaggccccgctggtgcactgaagagccacccttgaggccccgtggacctcctggttttaccccggggcctccgctgggttttgggttggcccttgttggcttt

SEQ ID NO: 440268 - DNA, 948 bp, Homo sapiens
  misc_feature (9)..(9): n is a, c, g, or t
gagggcaanaaaaacgaaataggctaggtacgaggctgggtgttggtctccctcctggcgcttgtcctcctctcccagtcggcaccacagcggtggctgccgggcgtggtgtcggtgggtcggttggtttttgtctcaccgttggtgtccgtgccgttcagttgcccgccatggctgagctggatccgttcggcgcccctgccggcgcccctggcggtcccgcgctggggaacggagtggccggcgccggcgaagaagacccggctgcggccttcttggcgcagcaagagagcgagattgcgggcatcgagaacgacgaggccttcgccatcctggacggcggcgcccccgggccccagccgcacggcgagccgccggggggtccggatgctgttgatggagtaatgaatggtgaatactaccaggaaagtaatggtccaacagacagttatgcagctatttcacaagtggatcgattgcagtcagagcctgaaagtatccgtaaatggagagaagaacaaatggaacgcttggaagcccttgatgccaattctcggaagcaagaagcagagtggaaagaaaaggcaataaaggagctagaagaatggtatgcaagacaggacgagcagctacagaaaacaaaagcaaacaacagggcagcagaagaagcctttgtaaatgacattgacgagtcgtccccaggcactgagtgggaacgggtggcccggctgtgtgactttaaccccaagtctagcaagcaggccaaagatgtctcccgcacggtgggccagctatttctcagaggccgggggctgagacccggtggactattgggttacttccggggcccagcttgttttgtggccttgccccttgttggtgccttgggggtcccggtccggaggggggggggggcccccctggtttgtgtcaaaagcgcctgggtgg

SEQ ID NO: 440269 - DNA, 1102 bp, Homo sapiens
  misc_feature (3)..(3): n is a, c, g, or t
  misc_feature (17)..(17): n is a, c, g, or t
atngctagtacgaggcntggtgttgaatcggccgagtctccctcctggcgcttgtcctcctctcccagtcggcaccacagcggtggctgccgggcgtggtgtcggtgggtcggttggtttttgtctcaccgttggtgtccgtgccgttcagttgcccgccatggctgagctggatccgttcggcgcccctgccggcgcccctggcggtcccgcgctggggaacggagtggccggcgccggcgaagaagacccggctgcggccttcttggcgcagcaagagagcgagattgcgggcatcgagaacgacgaggccttcgccatcctggacggcggcgcccccgggccccagccgcacggcgagccgccggggggtccggatgctgttgatggagtaatgaatggtgaatactaccaggaaagtaatggtccaacagacagttatgcagctatttcacaagtggatcgattgcagtcagagcctgaaagtatccgtaaatggagagaagaacaaatggaacgcttggaagcccttgatgccaattctcggaagcaagaagcagagtggaaagaaaaggcaataaaggagctagaagaatggtatgcaagacaggacgagcagctacagaaaacaaaagcaaacaacagggcagcagaagaagcctttgtaaatgacattgacgagtcgtccccaggcactgagtgggaacgggtggcccggctgtgtgactttaaccccaagtctagcaagcaggccaaagatgtctcccgcatgcgctcagtcctcatctccctcaagcaggccccgctggtgcactgaagagccaccctgtggaaacactacatctgcaatatcttaatcctactcagtgaagctcttcacagtcattggattaattatgttgagttcttttggaccaaacctttttgtctttagagttgttcattgtttgtgattgcatgtttccttccttcaactgtgttctccctggcattcagagaggagggagaggaggaagaggaaggggagggaagcttcccaagagtagcctcaacctgtgcttctgtgcattattctgagaataaatttctgtttcaaactgta

SEQ ID NO: 440270 - DNA, 1255 bp, Homo sapiens
  misc_feature (1204)..(1204): n is a, c, g, or t
  misc_feature (1213)..(1213): n is a, c, g, or t
  misc_feature (1217)..(1217): n is a, c, g, or t
  misc_feature (1230)..(1230): n is a, c, g, or t
  misc_feature (1242)..(1242): n is a, c, g, or t
  misc_feature (1249)..(1249): n is a, c, g, or t
  misc_feature (1252)..(1252): n is a, c, g, or t
agcgggttgttcccttttcggctctgcaacaccgcctagaccgaccggatacacgggtagggcttccgctttacccgtctccctcctggcgcttgtcctcctctcccagtcggcaccacagcggtggctgccgggcgtggtgtcggtgggtcggttggtttttgtctcaccgttggtgtccgtgccgttcagttgcccgccatggctgagctggatccgttcggcgcccctgccggcgcccctggcggtcccgcgctggggaacggagtggccggcgccggcgaagaagacccggctgcggccttcttggcgcagcaagagagcgagattgcgggcatcgagaacgacgaggccttcgccatcctggacggcggcgcccccgggccccagccgcacggcgagccgccggggggtccggatgctgttgatggagtaatgaatggtgaatactaccaggaaagtaatggtccaacagacagttatgcagctatttcacaagtggatcgattgcagtcagagcctgaaagtatccgtaaatggagagaagaacaaatggaacgcttggaagcccttgatgccaattctcggaagcaagaagcagagtggaaagaaaaggcaataaaggagctagaagaatggtatgcaagacaggacgagcagctacagaaaacaaaagcaaacaacagggcagcagaagaagcctttgtaaatgacattgacgagtcgtccccaggcactgagtgggaacgggtggcccggctgtgtgactttaaccccaagtctagcaagcaggccaaagatgtctcccgcatgcgctcagtcctcatctccctcaagcaggccccgctggtgcactgaagagccaccctgtggaaacactacatctgcaatatcttaatcctactcagtgaagctcttcacagtcattggattaattatgttgagttcttttggaccaaacctttttgtctttagagttgttcattgtttgtgattgcatgtttccttccttcaactgtgttctccctggcattcagagaggagggagaggaggaagaggaaggggagggaagcttcccaagagtagcctcaacctgtgcttctgtgcattattctgagaataaatttctgtttcaaactgtaaaaaaaaaaaaaaaaaaaaaaaacaaacacacaaaaacacaaaaacacaaaaaaaaaaacnaaaacacanaaancaaacacacacanacaccacaccancaaaaancanaca

SEQ ID NO: 440271 - DNA, 1056 bp, Homo sapiens
tggctgtgagcctggagtaatcggcgaggcacagcggtggctgccgggcgtggtgtcggtgggtcggttggtttttgtctcaccgttggtgtccgtgccgttcagttgcccgccatggctgagctggatccgttcggcgcccctgccggcgcccctggcggtcccgcgctggggaacggagtggccggcgccggcgaagaagacccggctgcggccttcttggcgcagcaagagagcgagattgcgggcatcgagaacgacgaggccttcgccatcctggacggcggcgcccccgggccccagccgcacggcgagccgccggggggtccggatgctgttgatggagtaatgaatggtgaatactaccaggaaagtaatggtccaacagacagttatgcagctatttcacaagtggatcgattgcagtcagagcctgaaagtatccgtaaatggagagaagaacaaatggaacgcttggaagcccttgatgccaattctcggaagcaagaagcagagtggaaagaaaaggcaataaaggagctagaagaatggtatgcaagacaggacgagcagctacagaaaacaaaagcaaacaacagggcagcagaagaagcctttgtaaatgacattgacgagtcgtccccaggcactgagtgggaacgggtggcccggctgtgtgactttaaccccaagtctagcaagcaggccaaagatgtctcccgcatgcgctcagtcctcatctccctcaagcaggccccgctggtgcactgaagagccaccctgtggaaacactacatctgcaatatcttaatcctactcagtgaagctcttcacagtcattggattaattatgttgagttcttttggaccaaacctttttgtctttagagttgttcattgtttgtgattgcatgtttccttccttcaactgtgttctccctggcattcagagaggagggagaggaggaagaggaaggggagggaagcttcccaagagtagcctcaacctgtgcttctgtgcattattctgagaataaatttctgtttcaaactgta

SEQ ID NO: 440272 - DNA, 1070 bp, Homo sapiens
  misc_feature (9)..(9): n is a, c, g, or t
gagggcaanaaaaacgaaataggctaggtacgaggctgggtgttgcagcggtggctgccgggcgtggtgtcggtgggtcggttggtttttgtctcaccgttggtgtccgtgccgttcagttgcccgccatggctgagctggatccgttcggcgcccctgccggcgcccctggcggtcccgcgctggggaacggagtggccggcgccggcgaagaagacccggctgcggccttcttggcgcagcaagagagcgagattgcgggcatcgagaacgacgaggccttcgccatcctggacggcggcgcccccgggccccagccgcacggcgagccgccggggggtccggatgctgttgatggagtaatgaatggtgaatactaccaggaaagtaatggtccaacagacagttatgcagctatttcacaagtggatcgattgcagtcagagcctgaaagtatccgtaaatggagagaagaacaaatggaacgcttggaagcccttgatgccaattctcggaagcaagaagcagagtggaaagaaaaggcaataaaggagctagaagaatggtatgcaagacaggacgagcagctacagaaaacaaaagcaaacaacagggcagcagaagaagcctttgtaaatgacattgacgagtcgtccccaggcactgagtgggaacgggtggcccggctgtgtgactttaaccccaagtctagcaagcaggccaaagatgtctcccgcatgcgctcagtcctcatctccctcaagcaggccccgctggtgcactgaagagccaccctgtggaaacactacatctgcaatatcttaatcctactcagtgaagctcttcacagtcattggattaattatgttgagttcttttggaccaaacctttttgtctttagagttgttcattgtttgtgattgcatgtttccttccttcaactgtgttctccctggcattcagagaggagggagaggaggaagaggaaggggagggaagcttcccaagagtagcctcaacctgtgcttctgtgcattattctgagaataaatttctgtttcaaactgta

SEQ ID NO: 440273 - DNA, 1084 bp, Homo sapiens
  misc_feature (963)..(965): n is a, c, g, or t
  misc_feature (968)..(968): n is a, c, g, or t
  misc_feature (975)..(975): n is a, c, g, or t
  misc_feature (991)..(991): n is a, c, g, or t
agcgggttgttcccttttcggctctgcaacaccgcctagaccgaccggatacacgggtagggcttccgctttacccgtctccctcctggcgcttgtcctcctctcccagtcggcaccacagcggtggctgccgggcgtggtgtcggtgggtcggttggtttttgtctcaccgttggtgtccgtgccgttcagttgcccgccatggctgagctggatccgttcggcgcccctgccggcgcccctggcggtcccgcgctggggaacggagtggccggcgccggcgaagaagacccggctgcggccttcttggcgcagcaagagagcgagattgcgggcatcgagaacgacgaggccttcgccatcctggacggcggcgcccccgggccccagccgcacggcgagccgccggggggtccggatgctgttgatggagtaatgaatggtgaatactaccaggaaagtaatggtccaacagacagttatgcagctatttcacaagtggatcgattgcagtcagagcctgaaagtatccgtaaatggagagaagaacaaatggaacgcttggaagcccttgatgccaattctcggaagcaagaagcagagtggaaagaaaaggcaataaaggagctagaagaatggtatgcaagacaggacgagcagctacagaaaacaaaagcaaacaacagggcagcagaagaagcctttgtaaatgacattgacgagtcgtccccaggcactgagtgggaacgggtggcccggctgtgtgactttaaccccaagtctagcaagcaggccaaagatgtctcccgcatgcgctcagtcctcatctccctcaagcaggccccgctggtgcactgaagagccaccctgtggaaacactacatctgcaatatcttaatcctactcagtgaagctcttcccagcctgggttataagtcgggctttgggccaccttgttaaatnnnacngggaagngtctcaaggtcccggntaaaggaagaaaaagagaacacaaacaagagtggtataaatttagaaaaaggtaacgagacacaaaacagaaaggaagaatacaaactagtta

SEQ ID NO: 440274 - DNA, 1233 bp, Homo sapiens
agcgggttgttcccttttcggctctgcaacaccgcctagaccgaccggatacacgggtagggcttccgctttacccgtctccctcctggcgcttgtcctcctctcccagtcggcaccacagcggtggctgccgggcgtggtgtcggtgggtcggttggtttttgtctcaccgttggtgtccgtgccgttcagttgcccgccatggctgagctggatccgttcggcgcccctgccggcgcccctggcggtcccgcgctggggaacggagtggccggcgccggcgaagaagacccggctgcggccttcttggcgcagcaagagagcgagattgcgggcatcgagaacgacgaggccttcgccatcctggacggcggcgcccccgggccccagccgcacggcgagccgccggggggtccggatgctgttgatggagtaatgaatggtgaatactaccaggaaagtaatggtccaacagacagttatgcagctatttcacaagtggatcgattgcagtcagagcctgaaagtatccgtaaatggagagaagaacaaatggaacgcttggaagcccttgatgccaattctcggaagcaagaagcagagtggaaagaaaaggcaataaaggagctagaagaatggtatgcaagacaggacgagcagctacagaaaacaaaagcaaacaacagggtggcagatgaagctttctacaaacaacccttcgctgacgtgattggttatgtcacaaacataaaccatccttgctacagcctagaacaggcagcagaagaagcctttgtaaatgacattgacgagtcgtccccaggcactgagtgggaacgggtggcccggctgtgtgactttaaccccaagtctagcaagcaggccaaagatgtctcccgcatgcgctcagtcctcatctccctcaagcaggccccgctggtgcactgaagagccaccctgtggaaacactacatctgcaatatcttaatcctactcagtgaagctcttcacagtcattggattaattatgttgagttcttttggaccaaacctttttgtctttagagttgttcattgtttgtgattgcatgtttccttccttcaactgtgttctccctggcattcagagaggagggagaggaggaagaggaaggggagggaagcttcccaagagtagcctcaacctgtgcttctgtgcattattctgagaataaatttctgtttcaaactgta

SEQ ID NO: 440275 - DNA, 1194 bp, Homo sapiens
agcgggttgttcccttttcggctctgcaacaccgcctagaccgaccggatacacgggtagggcttccgctttacccgtctccctcctggcgcttgtcctcctctcccagtcggcaccacagcggtggctgccgggcgtggtgtcggtgggtcggttggtttttgtctcaccgttggtgtccgtgccgttcagttgcccgccatggctgagctggatccgttcggcgcccctgccggcgcccctggcggtcccgcgctggggaacggagtggccggcgccggcgaagaagacccggctgcggccttcttggcgcagcaagagagcgagattgcgggcatcgagaacgacgaggccttcgccatccctgggaccgggccgggggccgggccacaccccctgggtggcacccgcccaagggccccggccaaaccgggggtccggaaaggcccgccccggggggggtccgggatgctgttgatggagtaatgaatgggtgaatactaccaggaaagtaatggtccaacagacagttatgcagctatttcacaagtggatcgattgcagtcagagcctgaaagtatccgtaaatggagagaagaacaaatggaacgcttggaagcccttgatgccaattctcggaagcaagaagcagagtggaaagaaaaggcaataaaggagctagaagaatggtatgcaagacaggacgagcagctacagaaaacaaaagcaaacaacagggcagcagaagaagcctttgtaaatgacattgacgagtcgtccccaggcactgagtgggaacgggtggcccggctgtgtgactttaaccccaagtctagcaagcaggccaaagatgtctcccgcatgcgctcagtcctcatctccctcaagcaggccccgctggtgcactgaagagccaccctgtggaaacactacatctgcaatatcttaatcctactcagtgaagctcttcacagtcattggattaattatgttgagttcttttggaccaaacctttttgtctttagagttgttcattgtttgtgattgcatgtttccttccttcaactgtgttctccctggcattcagagaggagggagaggaggaagaggaaggggagggaagcttcccaagagtagcctcaacctgtgcttctgtgcattattctgagaataaatttctgtttcaaactgta

SEQ ID NO: 440276 - DNA, 3319 bp, Homo sapiens
  misc_feature (993)..(993): n is a, c, g, or t
  misc_feature (1456)..(1456): n is a, c, g, or t
  misc_feature (2039)..(2039): n is a, c, g, or t
agcgggttgttcccttttcggctctgcaacaccgcctagaccgaccggatacacgggtagggcttccgctttacccgtctccctcctggcgcttgtcctcctctcccagtcggcaccacagcggtggctgccgggcgtggtgtcggtgggtcggttggtttttgtctcaccgttggtgtccgtgccgttcagttgcccgccatggctgagctggatccgttcggcgcccctgccggcgcccctggcggtcccgcgctggggaacggagtggccggcgccggcgaagaagacccggctgcggccttcttggcgcagcaagagagcgagattgcgggcatcgagaacgacgaggccttcgccatcctggacggcggcgcccccgggccccagccgcacggcgagccgccggggggtccggatgccaattctcggaagcaagaagcagagtggaaagaaaaggcaataaaggagctagaagaatggtatgcaagacaggacgagcagctacagaaaacaaaagcaaacaacagggtggcagatgaagctttctacaaacaacccttcgctgacgtgattggttatgtgtatgttgcaaaactaattcctttttctacatctgattctttctacttttgtttagagttaatgctccttttatgtcacaagttgctttgctttttaaattatttcaaattggcactttgggggctgcctaagaattgataagcggggtatgatctgttgatgaatcttccagatttgtgactccctgcatcctctgatggccatttttcatatttggggttttggagggaagaaagctaactcgctttcaaaatgtgtcatttgcgatcttatctgggaacggtttgaggctcgggggaactctgctctcttgctcttggctgccatcactgctgccatgccctgttgcctgcctgcctcaggtgggaaggaggtttccccacctgggagcaggtggcagtcccaggnggttaggagccagtgagcagcagcaccttgcattgccaaaatcagagctgtggggcagcattttccatacttggttcattcaaacaatgtggggtcgtttgcctctccctcaggcagaagagtccagagcagagggggttgtctccagtgggtgtctataattgttcctctgtggtcttgcatgtcagaaattgctatttagtggtcagcttctgatgtcctgtctcctagcacagggaagcccccagctttgagatcaggatagtcaaagtgtcttgatacgggccacttgggcttctccccctgacccccccaaaagaaacctgcatcttctctggagaaggtgtttttcttattcttttttttttctttttttcttttttcttttttttaaggatttcttttatcaaagcagtattgctgaagagttggaaacagttctcattgtctcctccttaaaaanagggctggctttacatgagaagtaagggtggaatggaagaggagaggaacctgtggaaggtgggcgatgagctcaggtctgtagagcctctcagggcctatgaccttgagatgttcatccccttagaagatagaactgggtttcctgggcccccagatgcatttgcagtgagacttgtgaaatgctggacttacaggtggtgtttgatttgatttctgcacattctctctggagtagaaatggagactggaaaggtcgagtctggttttgctgggcagctgggtggccagcaaagccagctgcacgtccccaagcacagatagagtggcaagggcatgtccagcttactgaccatctgcattgagctcattctcattttctatatctgacttaaagtttctctcgtttcttttcttctcttcacctttaagcacaaacataaaccatccttgctacagcctagaacagttaagtaaacctttctcactgcccctaactgtgtgtgccatgaagtcgcagtgttgtagtggctctgggcttcagcggtgtttgccacggccatccctgtgatagtgccacctcngtccccacagaccagtcatctccattgcttttctttgcccgtgatgcttgttggagtagatgaatatagtgtgtcttagcgctgtcctttccggctgtagctcccaccagttaattccgaactgggggtgggctgaccttgatgtgaaagaatgttggagcagcatcctgccaaaaagcaactcacgttggctctcctgccagtgtgccctgagtggccccaaggcacctggctggagggaaaatggcaaacttttggctgaactggagaatgtcctaacaaacccccttccagaatggctttagtctctagtgcttgctagcatgggagctttgtcttgaattccttttgatctgccccgtttctctccagccttaggaataaatctagaggctattgtgcaatgatctgtgggctttttagaagtctctaaatttccttgaaattcagtacagcccagcataaactactcaagttcttgatcagcctgctgctttgttcttattaataaaagcagtgtgtagctggctaaggacttgttttattaatgctccacaggagcagagacagacagagagacatagtgagccttgaaccaaacacctgtattccaacattttacacagcggtctgggcaccctgtgcctaggagagccagctacgtgtctacctgagtctgacctgggccaggggctgttatcttgggaaagccagaatgtcattaagaaagggacaaataggcagttgcttgtgtagcaaggcagccaccaggttgctcaaagggggttctgcataaaccaacatattttgttgttgcttccagggcagcagaagaagcctttgtaaatgacattgacgagtcgtccccaggcactgagtgggaacgggtggcccggctgtgtgactttaaccccaagtctagcaagcaggccaaagatgtctcccgcatgcgctcagtcctcatctccctcaagcaggccccgctggtgcactgaagagccaccctgtggaaacactacatctgcaatatcttaatcctactcagtgaagctcttcacagtcattggattaattatgttgagttcttttggaccaaacctttttgtctttagagttgttcattgtttgtgattgcatgtttccttccttcaactgtgttctccctggcattcagagaggagggagaggaggaagaggaaggggagggaagcttcccaagagtagcctcaacctgtgcttctgtgcattattctgagaataaatttctgtttcaaactgta

SEQ ID NO: 440277 - DNA, 987 bp, Homo sapiens
agcgggttgttcccttttcggctctgcaacaccgcctagaccgaccggatacacgggtagggcttccgctttacccgtctccctcctggcgcttgtcctcctctcccagtcggcaccacagcggtggctgccgggcgtggtgtcggtgggtcggttggtttttgtctcaccgttggtgtccgtgccgttcagttgcccgccatggctgagctggatccgttcggcgcccctgccggcgcccctggcggtcccgcgctggggaacggagtggccggcgccggcgaagaagacccggctgcggccttcttggcgcagcaagagagcgagattgcgggcatcgagaacgacgaggccttcgccatcctggacggcggcgcccccgggccccagccgcacggcgagccgccggggggtccggatgccaattctcggaagcaagaagcagagtggaaagaaaaggcaataaaggagctagaagaatggtatgcaagacaggacgagcagctacagaaaacaaaagcaaacaacagggcagcagaagaagcctttgtaaatgacattgacgagtcgtccccaggcactgagtgggaacgggtggcccggctgtgtgactttaaccccaagtctagcaagcaggccaaagatgtctcccgcatgcgctcagtcctcatctccctcaagcaggccccgctggtgcactgaagagccaccctgtggaaacactacatctgcaatatcttaatcctactcagtgaagctcttcacagtcattggattaattatgttgagttcttttggaccaaacctttttgtctttagagttgttcattgtttgtgattgcatgtttccttccttcaactgtgttctccctggcattcagagaggagggagaggaggaagaggaaggggagggaagcttcccaagagtagcctcaacctgtgcttctgtgcattattctgagaataaatttctgtttcaaactgta

SEQ ID NO: 440278 - DNA, 1177 bp, Homo sapiens
  misc_feature (1126)..(1126): n is a, c, g, or t
  misc_feature (1135)..(1135): n is a, c, g, or t
  misc_feature (1139)..(1139): n is a, c, g, or t
  misc_feature (1152)..(1152): n is a, c, g, or t
  misc_feature (1164)..(1164): n is a, c, g, or t
  misc_feature (1171)..(1171): n is a, c, g, or t
  misc_feature (1174)..(1174): n is a, c, g, or t
agcgggttgttcccttttcggctctgcaacaccgcctagaccgaccggatacacgggtagggcttccgctttacccgtctccctcctggcgcttgtcctcctctcccagtcggcaccacagcggtggctgccgggcgtggtgtcggtgggtcggttggtttttgtctcaccgttggtgtccgtgccgttcagttgcccgccatggctgagctggatccgttcggcgcccctgccggcgcccctggcggtcccgcgctggggaacggagtggccggcgccggcgaagaagacccggctgcggccttcttggcgcagcaagagagcgagattgcgggcatcgagaacgacgaggccttcgccatcctggacggcggcgcccccgggccccagccgcacggcgagccgccggggggtccggatgctgttgatggagtaatgaatggtgaatactaccaggaaagtaatggtccaacagacagttatgcagctatttcacaagtggatcgattgcagtcagagcctgaaagtatccgtaaatggagagaagaacaaatggaacgcttggaagcccttgatgccaattctcggaagcaagaagcagagtggaaagaaaaggcaataaaggagctagaagaatggtatgcaagacaggacgagcagctacagaaaacaaaagcaaacaacagggcagcagaagaagcctttgtaaatgacattgacgagtcgtccccaggcactgagtgggaacgggtggcccggctgtgtgactttaaccccaagtctagcaagcaggccaaagatgtctcccgcaacagtcattggattaattatgttgagttcttttggaccaaacctttttgtctttagagttgttcattgtttgtgattgcatgtttccttccttcaactgtgttctccctggcattcagagaggagggagaggaggaagaggaaggggagggaagcttcccaagagtagcctcaacctgtgcttctgtgcattattctgagaataaatttctgtttcaaactgtaaaaaaaaaaaaaaaaaaaaaacaaaaaaaaaaaaaaaaaaaaaaaaaaaaaaacaaacacacaaaaacacaaaaacacaaaaaaaaaaacnaaaacacanaaancaaacacacacanacaccacaccancaaaaancanaca

SEQ ID NO: 440279 - DNA, 1345 bp, Homo sapiens
  misc_feature (1294)..(1294): n is a, c, g, or t
  misc_feature (1303)..(1303): n is a, c, g, or t
  misc_feature (1307)..(1307): n is a, c, g, or t
  misc_feature (1320)..(1320): n is a, c, g, or t
  misc_feature (1332)..(1332): n is a, c, g, or t
  misc_feature (1339)..(1339): n is a, c, g, or t
  misc_feature (1342)..(1342): n is a, c, g, or t
agcgggttgttcccttttcggctctgcaacaccgcctagaccgaccggatacacgggtagggcttccgctttacccgtctccctcctggcgcttgtcctcctctcccagtcggcaccacagcggtggctgccgggcgtggtgtcggtgggtcggttggtttttgtctcaccgttggtgtccgtgccgttcagttgcccgccatggctgagctggatccgttcggcgcccctgccggcgcccctggcggtcccgcgctggggaacggagtggccggcgccggcgaagaagacccggctgcggccttcttggcgcagcaagagagcgagattgcgggcatcgagaacgacgaggccttcgccatcctggacggcggcgcccccgggccccagccgcacggcgagccgccggggggtccggatgctgttgatggagtaatgaatggtgaatactaccaggaaagtaatggtccaacagacagttatgcagctatttcacaagtggatcgattgcagtcagagcctgaaagtatccgtaaatggagagaagaacaaatggaacgcttggaagcccttgatgccaattctcggaagcaagaagcagagtggaaagaaaaggcaataaaggagctagaagaatggtatgcaagacaggacgagcagctacagaaaacaaaagcaaacaacagggtggcagatgaagctttctacaaacaacccttcgctgacgtgattggttatgtcacaaacataaaccatccttgctacagcctagaacaggcagcagaagaagcctttgtaaatgacattgacgagtcgtccccaggcactgagtgggaacgggtggcccggctgtgtgactttaaccccaagtctagcaagcaggccaaagatgtctcccgcatgcgctcagtcctcatctccctcaagcaggccccgctggtgcactgaagagccaccctgtggaaacactacatctgcaatatcttaatcctactcagtgaagctcttcacagtcattggattaattatgttgagttcttttggaccaaacctttttgtctttagagttgttcattgtttgtgattgcatgtttccttccttcaactgtgttctccctggcattcagagaggagggagaggaggaagaggaaggggagggaagcttcccaagagtagcctcaacctgtgcttctgtgcattattctgagaataaatttctgtttcaaactgtaaaaaaaaaaaaaaaaaaaaaaaacaaacacacaaaaacacaaaaacacaaaaaaaaaaacnaaaacacanaaancaaacacacacanacaccacaccancaaaaancanaca

SEQ ID NO: 440280 - DNA, 864 bp, Homo sapiens
  misc_feature (736)..(736): n is a, c, g, or t
  misc_feature (746)..(746): n is a, c, g, or t
  misc_feature (750)..(750): n is a, c, g, or t
  misc_feature (755)..(755): n is a, c, g, or t
  misc_feature (766)..(766): n is a, c, g, or t
  misc_feature (770)..(770): n is a, c, g, or t
  misc_feature (776)..(776): n is a, c, g, or t
  misc_feature (783)..(784): n is a, c, g, or t
  misc_feature (788)..(789): n is a, c, g, or t
  misc_feature (792)..(792): n is a, c, g, or t
agcgggttgttcccttttcggctctgcaacaccgcctagaccgaccggatacacgggtagggcttccgctttacccgtctccctcctggcgcttgtcctcctctcccagtcggcaccacagcggtggctgccgggcgtggtgtcggtgggtcggttggtttttgtctcaccgttggtgtccgtgccgttcagttgcccgccatggctgagctggatccgttcggcgcccctgccggcgcccctggcggtcccgcgctggggaacggagtggccggcgccggcgaagaagacccggctgcggccttcttggcgcagcaagagagcgagattgcgggcatcgagaacgacgaggccttcgccatcctggacggcggcgcccccgggccccagccgcacggcgagccgccggggggtccggatgctgttgatggagtaatgaatggtgaatactaccaggaaagtaatggtccaacagacagttatgcagctatttcacaagtggatcgattgcagtcagagcctgaaagtatccgtaaatggagagaagaacaaatggaacgcttggaagcccttgatgccaattctcggaagcaagaagcagagtggaaagaaaaggcaataaaggagctagaagaatggtatgcaagacaggacgagcagctacagaaaacaaaagcaaacaacagcagaagaagcctttgtaaatgacattgacggatagtttcaggctctgacngcaatcgatncacntgtgnaatagctgcanaacngtctgntgaccannactnnccnggtagtattcaccattcattactccatcaacagtatccgaccccccggcggctcgccgtgcgactgggtaca

SEQ ID NO: 440281 - DNA, 617 bp, Homo sapiens
agcgggttgttcccttttcggctctgcaacaccgcctagaccgaccggatacacgggtagggcttccgctttacccgtctccctcctggcgcttgtcctcctctcccagtcggcaccacagcggtggctgccgggcgtggtgtcggtgggtcggttggtttttgtctcaccgttggtgtccgtgccgttcagttgcccgccatggctgagctggatccgttcggcgcccctgccggcgcccctggcggtcccgcgctggggaacggagtggccggcgccggcgaagaagacccggctgcggccttcttggcgcagcaagagagcgagattgcgggcatcgagaacgacgaggccttcgccatcctggacggcggcgcccccgggccccagccgcacggcgagccgccggggggtccggatgctgttgatggagtaatgaatggtgaatactaccaggaaagtaatggtccaacagacagttatgcagctatttcacaagtggatcgattgcagtcagagcctgaaagtatccgtaaatggagggaagcttcccaagagtagcctcaacctgtgcttctgtgcattattctgagaataaatttctgtttcaaactgta

SEQ ID NO: 440282 - DNA, 818 bp, Homo sapiens
agcgggttgttcccttttcggctctgcaacaccgcctagaccgaccggatacacgggtagggcttccgctttacccgtctccctcctggcgcttgtcctcctctcccagtcggcaccacagcggtggctgccgggcgtggtgtcggtgggtcggttggtttttgtctcaccgttggtgtccgtgccgttcagttgcccgccatggctgagctggatccgttcggcgcccctgccggcgcccctgtgctgtgtccctgctgctgtgtgtgaactgtgagttgtgcctggctgcctgtgctgaatgaatgaccctgtgcttgcgtgccattcattgtgctgcaagcaatgatgatgctgatgcatttgctgtgtgcatcagaagaaactgactgatgtgaccattcagacccatacctagtgactgtgctgtgctgccaccctgtgtgcccacagacctgcaactggctgatgcctgcctgtgtgtgtgtgtcctaggatgactggttagattggatgtacattgacattgtgttgacaatactaccatgtgaaacatgttacattgtgtaccacacaagaaacacagttaattgccatgctcattttcagcaatgttgtgaatctcgattatgccatgtacaatggatgacgcttggacaaaggtaattccctgataaagatggggacagaggcaaaggacacacaaattgaggaacatgcttttgggacatgccccctatgaaatagaccaaattaatcttctgggaaatgccaacagagacgccaggaaccgttgtgaacacatggacacaaatggc

SEQ ID NO: 440283 - DNA, 2621 bp, Homo sapiens
  misc_feature (1)..(1): n is a, c, g, or t
  misc_feature (3)..(4): n is a, c, g, or t
nannggcacgagagtgacgtcgtgtggggcgggtccgaccgcgcacaatgggccatggagttcccgttcgatgtggacgcgctgttcccggagcggatcacggtgctggaccagcacctgaggcccccagcccgccgacccggaaccacaacgccggcccgtgttgatctacagcagcaaattatgaccattatagatgaactgggcaaggcttctgccaaggcccagaatctttccgctcctatcactagtgcatcaaggatgcagagtaaccgccatgttgtttatattctcaaagacagttcagcccgaccggctggaaaaggagccattattggtttcatcaaagttggatacaagaagctctttgtactggatgatcgtgaggctcataatgaggtagaaccactttgcatcctggacttttacatccatgagtctgtgcaacgccatggccatgggcgagaactcttccagtatatgttgcagaaggagcgagtggaaccgcaccaactggcaattgaccgaccctcacagaagctgctgaaattcctgaataagcactacaatctggagaccacagtcccacaggtgaacaactttgtgatctttgaaggcttctttgcccatcaacatcctccagcaaggaagctgccacccaagagagcagagggagacatcaagccatactcctctagtgaccgagaatttctgaaggtagctgtggagcctccttggcccctaaacagggcccctcgccgcgccacacctccagcccacccacccccccgctccagcagcctgggaaactcaccagaacgaggtcccctccgcccctttgtgccagagcaggagctgctgcgttccttgcgcctctgccccccacaccctaccgcccgccttctgttggctgctgaccctgggggcagcccagctcaacgtcgtcgcaccaggtaataggagttgaagggctaaggagcctcacagctataaaagaggatgttagaaatggcaaagggcaatttgaatccatcagagagatggatcaataagatgggtggcttggggggggtcctgaaacctttcaagaaaaatatttgtgcaagtgatctgggaaaaaaatgcagtgaaggagcagaataggaccttatatggagcctagggaccctggctttaatgtgagagttatgtggaatggtaggaagaacaccgagatccatcgagttgggggaacagagccttctaagattgggaaaatcttcgcttaatacttgctggggaaggggcagtgtctgacagagagtgggaagccactggcttgtgtgccaagagtccatcgcagcaggcagggagtgggcatttcctttatttctctccctttctcttcacctctgacttctctgtttttctctcccccgccccccgccatttcccatctcccttcctcccatccataacatccttccacagctcccttccccgctctgaggagagtcgatactaacagctaccctctccctgccctgggagacctggggtgggcagggaacccctccctgagaacctcagacccactcttccattgcatcctgtaggacccagtggaacctgacagagcccataggattccctcttctactttcttagacagcagggatgtcagggtctcaaactgcctaacactttgtagcttttcttaacacaaaagcaccccttctctcctaacttgggctctgaatactttcccaacaggaagtctgatctgttgccagacttcttggttagatggctcatacatttatctagagaagcacactcttgcttgctgtcaaactttagaacaccatggaaggtctaagggcatcctgtgccagggaaactttttaaggaattttatctatgggataaaccccatattccctctagtgtctactggtggctctaatactgctttgtgctgcctgccacacttgccctttgagcctgcgaatggccgctagtgagcaagctctgcttcagagcagtctagttaggtagaacagggacttaccagcttcccaaagggatctactcaccattgccaaactcttcatttccacattttgtgtaggtgtcagggaaccccaaactggtgttgctttggggtctctaaaggagattggctgacaccaccatttcccccagatccagattctctgagggaggttgtttcttgagagtagatccagagtgtcaaggatctgttagatcctggaatcccttcttgcatccatccctccctggtagctaggtcccgatatactcctgtcttgtgagattgtcgagatgagatgggggaccactcttcctctgtccttcctctctcctttcctccatagcaaggacgaccttccctgctccatgcccagagtatagctagatcccttcccctccctaccctctgaatgtgtgctagatcaggtgccccactgtgtttcctgaaatccttgggagccggatctccccatctcccctactcactcttcccttttcttctctcagtgttgtctgaataaagtgtgaaatcttttgtgttttctaaattgacattttcaatgaaaaaaagaatcccaaaaaaaaaa

SEQ ID NO: 440284 - DNA, 1480 bp, Homo sapiens
attcctgattaaccaagggctttgtccatctcatccagaggaacccagggtcctcgttggcccggctgggaccattccactgccccagaataccagggggccgtgacagcacccactgacagtaagagctcactccccttggctgcccttctcctgcatctcccaggcccccagagtctccccttcgatctttctccctagctctgtgtttggcctactccttctggctttcctcaacagtgttccacattcccctcaaattcccttttggtgtgctggcattgccatggtgctgctcctgcaagttctcaggaggaactgtggtgtcagggagcagaggtttggggttggggtatagtggctgggaggaggggtgcaaagtatgtctcctaacgcttaccctgcctatgtcccctccactgccagctccagcaaggaagctgccacccaagagagcagagggagacatcaagccatactcctctagtgaccgagaatttctgaaggtagctgtggagcctccttggcccctaaacagggcccctcgccgcgccacacctccagcccacccacccccccgctccagcagcctgggaaactcaccagaacgaggtcccctccgcccctttgtgccagagcaggagctgctgcgttccttgcgcctctgccccccacaccctaccgcccgccttctgttggctgctgaccctgggggcagcccagctcaacgtcgtcgcaccagggggactcccccaggtctggtagcccaaagctgctgctacagccgccatgggggggtgaattcctcatcccccaatacaggcaaccaagactccaagcagggagaacaggaaacaaagaataggtctgccagtgaggagcaggccttgtcacaggatgggtctggggagaagcccatgcacacagctcctccacaggccccggccccgccagcccagtcctggacagtgggtggggacatactcaacgccaggttcattcgaaacctgcaggaacgtcgcagcaccaggccttggtgaccgcagccccgtcaaacatcttcaaagtattatttctccctcactacaggaaagagccaaagcccaaccctcataatagatggatacattcattcattcattcattcagcaggcttatcagattcaagtcatttgtatcttttaaccagaccaataaaagtatttatttttatcacaagagctgttgaaaaatttgactcattatttcagccgcctcacccctcactgtcgttgcacccattcagccttcagccctgtttttgctcagctttttgctcaaaggcctcagctgtgaatacagcgcttgggggggcaggggaggctgtaacttgcgcaagcgcactcaggcagtctccgagcccgcgggcgcaggcgcgcttacagccgacagagcgcttcagccgcttccctcgagcctgcagtgcgcaagcgcgggacat

SEQ ID NO: 440285 - DNA, 2173 bp, Homo sapiens
  misc_feature (1)..(1): n is a, c, g, or t
  misc_feature (3)..(4): n is a, c, g, or t
nannggcacgagagtgacgtcgtgtggggcgggtccgaccgcgcacaatgggccatggagttcccgttcgatgtggacgcgctgttcccggagcggatcacggtgctggaccagcacctgaggcccccagcccgccgacccggaaccacaacgccggcccgtgttgatctacagcagcaaattatgaccattatagatgaactgggcaaggcttctgccaaggcccagaatctttccgctcctatcactagtgcatcaaggatgcagagtaaccgccatgttgtttatattctcaaagacagttcagcccgaccggctggaaaaggagccattattggtttcatcaaagttggatacaagaagctctttgtactggatgatcgtgaggctcataatgaggtagaaccactttgcatcctggacttttacatccatgagtctgtgcaacgccatggccatgggcgagaactcttccagtatatgttgcagaaggagcgagtggaaccgcaccaactggcaattgaccgaccctcacagaagctgctgaaattcctgaataagcactacaatctggagaccacagtcccacaggtgaacaactttgtgatctttgaaggcttctttgcccatcaacatcggccccctgctccctctctgagggcaactcgacactctcgtgctgctgcagtcgatcccacgcccgctgctccagcaaggaagctgccacccaagagagcagagggagacatcaagccatactcctctagtgaccgagaatttctgaaggtagctgtggagcctccttggcccctaaacagggcccctcgccgcgccacacctccagcccacccacccccccgctccagcagcctgggaaactcaccagaacgaggtcccctccgcccctttgtgccagagcaggagctgctgcgttccttgcgcctctgccccccacaccctaccgcccgccttctgttggctgctgaccctgggggcagcccagctcaacgtcgtcgcaccagctcccttccccgctctgaggagagtcgatactaacagctaccctctccctgccctgggagacctggggtgggcagggaacccctccctgagaacctcagacccactcttccattgcatcctgtaggacccagtggaacctgacagagcccataggattccctcttctactttcttagacagcagggatgtcagggtctcaaactgcctaacactttgtagcttttcttaacacaaaagcaccccttctctcctaacttgggctctgaatactttcccaacaggaagtctgatctgttgccagacttcttggttagatggctcatacatttatctagagaagcacactcttgcttgctgtcaaactttagaacaccatggaaggtctaagggcatcctgtgccagggaaactttttaaggaattttatctatgggataaaccccatattccctctagtgtctactggtggctctaatactgctttgtgctgcctgccacacttgccctttgagcctgcgaatggccgctagtgagcaagctctgcttcagagcagtctagttaggtagaacagggacttaccagcttcccaaagggatctactcaccattgccaaactcttcatttccacattttgtgtaggtgtcagggaaccccaaactggtgttgctttggggtctctaaaggagattggctgacaccaccatttcccccagatccagattctctgagggaggttgtttcttgagagtagatccagagtgtcaaggatctgttagatcctggaatcccttcttgcatccatccctccctggtagctaggtcccgatatactcctgtcttgtgagattgtcgagatgagatgggggaccactcttcctctgtccttcctctctcctttcctccatagcaaggacgaccttccctgctccatgcccagagtatagctagatcccttcccctccctaccctctgaatgtgtgctagatcaggtgccccactgtgtttcctgaaatccttgggagccggatctccccatctcccctactcactcttcccttttcttctctcagtgttgtctgaataaagtgtgaaatcttttgtgttttctaaattgacattttcaatgaaaaaaagaatcccaaaaaaaaaa

SEQ ID NO: 440286 - DNA, 2104 bp, Homo sapiens
  misc_feature (1)..(1): n is a, c, g, or t
  misc_feature (3)..(4): n is a, c, g, or t
nannggcacgagagtgacgtcgtgtggggcgggtccgaccgcgcacaatgggccatggagttcccgttcgatgtggacgcgctgttcccggagcggatcacggtgctggaccagcacctgaggcccccagcccgccgacccggaaccacaacgccggcccgtgttgatctacagcagcaaattatgaccattatagatgaactgggcaaggcttctgccaaggcccagaatctttccgctcctatcactagtgcatcaaggatgcagagtaaccgccatgttgtttatattctcaaagacagttcagcccgaccggctggaaaaggagccattattggtttcatcaaagttggatacaagaagctctttgtactggatgatcgtgaggctcataatgaggtagaaccactttgcatcctggacttttacatccatgagtctgtgcaacgccatggccatgggcgagaactcttccagtatatgttgcagaaggagcgagtggaaccgcaccaactggcaattgaccgaccctcacagaagctgctgaaattcctgaataagcactacaatctggagaccacagtcccacaggtgaacaactttgtgatctttgaaggcttctttgcccatcaacatcctccagcaaggaagctgccacccaagagagcagagggagacatcaagccatactcctctagtgaccgagaatttctgaaggtagctgtggagcctccttggcccctaaacagggcccctcgccgcgccacacctccagcccacccacccccccgctccagcagcctgggaaactcaccagaacgaggtcccctccgcccctttgtgccagagcaggagctgctgcgttccttgcgcctctgccccccacaccctaccgcccgccttctgttggctgctgaccctgggggcagcccagctcaacgtcgtcgcaccagctcccttccccgctctgaggagagtcgatactaacagctaccctctccctgccctgggagacctggggtgggcagggaacccctccctgagaacctcagacccactcttccattgcatcctgtaggacccagtggaacctgacagagcccataggattccctcttctactttcttagacagcagggatgtcagggtctcaaactgcctaacactttgtagcttttcttaacacaaaagcaccccttctctcctaacttgggctctgaatactttcccaacaggaagtctgatctgttgccagacttcttggttagatggctcatacatttatctagagaagcacactcttgcttgctgtcaaactttagaacaccatggaaggtctaagggcatcctgtgccagggaaactttttaaggaattttatctatgggataaaccccatattccctctagtgtctactggtggctctaatactgctttgtgctgcctgccacacttgccctttgagcctgcgaatggccgctagtgagcaagctctgcttcagagcagtctagttaggtagaacagggacttaccagcttcccaaagggatctactcaccattgccaaactcttcatttccacattttgtgtaggtgtcagggaaccccaaactggtgttgctttggggtctctaaaggagattggctgacaccaccatttcccccagatccagattctctgagggaggttgtttcttgagagtagatccagagtgtcaaggatctgttagatcctggaatcccttcttgcatccatccctccctggtagctaggtcccgatatactcctgtcttgtgagattgtcgagatgagatgggggaccactcttcctctgtccttcctctctcctttcctccatagcaaggacgaccttccctgctccatgcccagagtatagctagatcccttcccctccctaccctctgaatgtgtgctagatcaggtgccccactgtgtttcctgaaatccttgggagccggatctccccatctcccctactcactcttcccttttcttctctcagtgttgtctgaataaagtgtgaaatcttttgtgttttctaaattgacattttcaatgaaaaaaagaatcccaaaaaaaaaa

SEQ ID NO: 440287 - DNA, 1893 bp, Homo sapiens
attcctgattaaccaagggctttgtccatctcatccagaggaacccagggtcctcgttggcccggctgggaccattccactgccccagaataccagggggccgtgacagcacccactgacagtaagagctcactccccttggctgcccttctcctgcatctcccaggcccccagagtctccccttcgatctttctccctagctctgtgtttggcctactccttctggctttcctcaacagtgttccacattcccctcaaattcccttttggtgtgctggcattgccatggtgctgctcctgcaagttctcaggaggaactgtggtgtcagggagcagaggtttggggttggggtatagtggctgggaggaggggtgcaaagtatgtctcctaacgcttaccctgcctatgtcccctccactgccagctccagcaaggaagctgccacccaagagagcagagggagacatcaagccatactcctctagtgaccgagaatttctgaaggtagctgtggagcctccttggcccctaaacagggcccctcgccgcgccacacctccagcccacccacccccccgctccagcagcctgggaaactcaccagaacgaggtcccctccgcccctttgtgccagagcaggagctgctgcgttccttgcgcctctgccccccacaccctaccgcccgccttctgttggctgctgaccctgggggcagcccagctcaacgtcgtcgcaccagctcccttccccgctctgaggagagtcgatactaacagctaccctctccctgccctgggagacctggggtgggcagggaacccctccctgagaacctcagacccactcttccattgcatcctgtaggacccagtggaacctgacagagcccataggattccctcttctactttcttagacagcagggatgtcagggtctcaaactgcctaacactttgtagcttttcttaacacaaaagcaccccttctctcctaacttgggctctgaatactttcccaacaggaagtctgatctgttgccagacttcttggttagatggctcatacatttatctagagaagcacactcttgcttgctgtcaaactttagaacaccatggaaggtctaagggcatcctgtgccagggaaactttttaaggaattttatctatgggataaaccccatattccctctagtgtctactggtggctctaatactgctttgtgctgcctgccacacttgccctttgagcctgcgaatggccgctagtgagcaagctctgcttcagagcagtctagttaggtagaacagggacttaccagcttcccaaagggatctactcaccattgccaaactcttcatttccacattttgtgtaggtgtcagggaaccccaaactggtgttgctttggggtctctaaaggagattggctgacaccaccatttcccccagatccagattctctgagggaggttgtttcttgagagtagatccagagtgtcaaggatctgttagatcctggaatcccttcttgcatccatccctccctggtagctaggtcccgatatactcctgtcttgtgagattgtcgagatgagatgggggaccactcttcctctgtccttcctctctcctttcctccatagcaaggacgaccttccctgctccatgcccagagtatagctagatcccttcccctccctaccctctgaatgtgtgctagatcaggtgccccactgtgtttcctgaaatccttgggagccggatctccccatctcccctactcactcttcccttttcttctctcagtgttgtctgaataaagtgtgaaatcttttgtgttttctaaattgacattttcaatgaaaaaaagaatcccaaaaaaaaaa

SEQ ID NO: 440288 - DNA, 1760 bp, Homo sapiens
  misc_feature (1)..(1): n is a, c, g, or t
  misc_feature (3)..(4): n is a, c, g, or t
nannggcacgagagtgacgtcgtgtggggcgggtccgaccgcgcacaatgggccatggagttcccgttcgatgtggacgcgctgttcccggagcggatcacggtgctggaccagcacctgaggcccccagcccgccgacccggaaccacaacgccggcccgtgttgatctacagcagcaaattatgaccattatagatgaactgggcaaggcttctgccaaggcccagaatctttccgctcctatcactagtgcatcaaggatgcagagtaaccgccatgttgtttatattctcaaagacagttcagcccgaccggctggaaaaggagccattattggtttcatcaaagttggatacaagaagctctttgtactggatgatcgtgaggctcataatgaggtagaaccactttgcatcctggacttttacatccatgagtctgtgcaacgccatggccatgggcgagaactcttccagtatatgttgcagaaggagcgagtggaaccgcaccaactggcaattgaccgaccctcacagaagctgctgaaattcctgaataagcactacaatctggagaccacagtcccacaggtgaacaactttgtgatctttgaaggcttctttgcccatcaacatcggccccctgctccctctctgagggcaactcgacactctcgtgctgctgcagtcgatcccacgcccgctgctccagcaaggaagctgccacccaagagagcagagggagacatcaagccatactcctctagtgaccgagaatttctgaaggtagctgtggagcctccttggcccctaaacagggcccctcgccgcgccacacctccagcccacccacccccccgctccagcagcctgggaaactcaccagaacgaggtcccctccgcccctttgtgccagagcaggagctgctgcgttccttgcgcctctgccccccacaccctaccgcccgccttctgttggctgctgaccctgggggcagcccagctcaacgtcgtcgcaccagggggactcccccaggtctggtagcccaaagctgctgctacagccgccatgggggggtgaattcctcatcccccaatacaggcaaccaagactccaagcagggagaacaggaaacaaagaataggtctgccagtgaggagcaggccttgtcacaggatgggtctggggagaagcccatgcacacagctcctccacaggccccggccccgccagcccagtcctggacagtgggtggggacatactcaacgccaggttcattcgaaacctgcaggaacgtcgcagcaccaggccttggtgaccgcagccccgtcaaacatcttcaaagtattatttctccctcactacaggaaagagccaaagcccaaccctcataatagatggatacattcattcattcattcattcagcaggcttatcagattcaagtcatttgtatcttttaaccagaccaataaaagtatttatttttatcacaagagctgttgaaaaatttgactcattatttcagccgcctcacccctcactgtcgttgcacccattcagccttcagccctgtttttgctcagctttttgctcaaaggcctcagctgtgaatacagcgcttgggggggcaggggaggctgtaacttgcgcaagcgcactcaggcagtctccgagcccgcgggcgcaggcgcgcttacagccgacagagcgcttcagccgcttccctcgagcctgcagtgcgcaagcgcgggacat

SEQ ID NO: 440289 - DNA, 1180 bp, Homo sapiens
  misc_feature (1)..(1): n is a, c, g, or t
  misc_feature (3)..(4): n is a, c, g, or t
nannggcacgagagtgacgtcgtgtggggcgggtccgaccgcgcacaatgggccatggagttcccgttcgatgtggacgcgctgttcccggagcggatcacggtgctggaccagcacctgaggcccccagcccgccgacccggaaccacaacgccggcccgtgttgatctacagcagcaaattatgaccattatagatgaactgggcaaggcttctgccaaggcccagaatctttccgctcctatcactagtgcatcaaggatgcagagtaaccgccatgttgtttatattctcaaagacagttcagcccgaccggctggaaaaggagccattattggtttcatcaaagttggatacaagaagctctttgtactggatgatcgtgaggctcataatgaggtagaaccactttgcatcctggacttttacatccatgagtctgtgcaacgccatggccatgggcgagaactcttccagtatatgttgcagaaggagcgagtggaaccgcaccaactggcaattgaccgaccctcacagaagctgctgaaattcctgaataagcactacaatctggagaccacagtcccacaggtgaacaactttgtgatctttgaaggcttctttgcccatcaacatcggccccctgctccctctctgagggcaactcgacactctcgtgctgctgcagtcgatcccacgcccgctgctccagcaaggaagctgccacccaagagagcagagggagacatcaagccatactcctctagtgaccgagaatgtaagaggggcaagggtcgggtgtctgggcctggggtaccttaacacaagggaagagaatgctcaggggacccagggaaaggattcgttctctctaaagactcagatttcttgggctgggcatggtggctcatgcctgtaatcccagcactttgagaggctaaggcaggcagatcgcctgagtccaggggttcaagaccagcctggccaacatggtgaaaccccgtctctactaaaaatacaaaaattagctgggcacggtggcacgtgcctgtaatcccagctacttgggaggctgaggcaggagaatggcttgaacccaggaggcggaagttgcagtgagccaagatcgtgccactgcactccagcttgggtgacagagtgagactccgtctcaaaaaag

SEQ ID NO: 440290 - DNA, 2690 bp, Homo sapiens
  misc_feature (1)..(1): n is a, c, g, or t
  misc_feature (3)..(4): n is a, c, g, or t
nannggcacgagagtgacgtcgtgtggggcgggtccgaccgcgcacaatgggccatggagttcccgttcgatgtggacgcgctgttcccggagcggatcacggtgctggaccagcacctgaggcccccagcccgccgacccggaaccacaacgccggcccgtgttgatctacagcagcaaattatgaccattatagatgaactgggcaaggcttctgccaaggcccagaatctttccgctcctatcactagtgcatcaaggatgcagagtaaccgccatgttgtttatattctcaaagacagttcagcccgaccggctggaaaaggagccattattggtttcatcaaagttggatacaagaagctctttgtactggatgatcgtgaggctcataatgaggtagaaccactttgcatcctggacttttacatccatgagtctgtgcaacgccatggccatgggcgagaactcttccagtatatgttgcagaaggagcgagtggaaccgcaccaactggcaattgaccgaccctcacagaagctgctgaaattcctgaataagcactacaatctggagaccacagtcccacaggtgaacaactttgtgatctttgaaggcttctttgcccatcaacatcggccccctgctccctctctgagggcaactcgacactctcgtgctgctgcagtcgatcccacgcccgctgctccagcaaggaagctgccacccaagagagcagagggagacatcaagccatactcctctagtgaccgagaatttctgaaggtagctgtggagcctccttggcccctaaacagggcccctcgccgcgccacacctccagcccacccacccccccgctccagcagcctgggaaactcaccagaacgaggtcccctccgcccctttgtgccagagcaggagctgctgcgttccttgcgcctctgccccccacaccctaccgcccgccttctgttggctgctgaccctgggggcagcccagctcaacgtcgtcgcaccaggtaataggagttgaagggctaaggagcctcacagctataaaagaggatgttagaaatggcaaagggcaatttgaatccatcagagagatggatcaataagatgggtggcttggggggggtcctgaaacctttcaagaaaaatatttgtgcaagtgatctgggaaaaaaatgcagtgaaggagcagaataggaccttatatggagcctagggaccctggctttaatgtgagagttatgtggaatggtaggaagaacaccgagatccatcgagttgggggaacagagccttctaagattgggaaaatcttcgcttaatacttgctggggaaggggcagtgtctgacagagagtgggaagccactggcttgtgtgccaagagtccatcgcagcaggcagggagtgggcatttcctttatttctctccctttctcttcacctctgacttctctgtttttctctcccccgccccccgccatttcccatctcccttcctcccatccataacatccttccacagctcccttccccgctctgaggagagtcgatactaacagctaccctctccctgccctgggagacctggggtgggcagggaacccctccctgagaacctcagacccactcttccattgcatcctgtaggacccagtggaacctgacagagcccataggattccctcttctactttcttagacagcagggatgtcagggtctcaaactgcctaacactttgtagcttttcttaacacaaaagcaccccttctctcctaacttgggctctgaatactttcccaacaggaagtctgatctgttgccagacttcttggttagatggctcatacatttatctagagaagcacactcttgcttgctgtcaaactttagaacaccatggaaggtctaagggcatcctgtgccagggaaactttttaaggaattttatctatgggataaaccccatattccctctagtgtctactggtggctctaatactgctttgtgctgcctgccacacttgccctttgagcctgcgaatggccgctagtgagcaagctctgcttcagagcagtctagttaggtagaacagggacttaccagcttcccaaagggatctactcaccattgccaaactcttcatttccacattttgtgtaggtgtcagggaaccccaaactggtgttgctttggggtctctaaaggagattggctgacaccaccatttcccccagatccagattctctgagggaggttgtttcttgagagtagatccagagtgtcaaggatctgttagatcctggaatcccttcttgcatccatccctccctggtagctaggtcccgatatactcctgtcttgtgagattgtcgagatgagatgggggaccactcttcctctgtccttcctctctcctttcctccatagcaaggacgaccttccctgctccatgcccagagtatagctagatcccttcccctccctaccctctgaatgtgtgctagatcaggtgccccactgtgtttcctgaaatccttgggagccggatctccccatctcccctactcactcttcccttttcttctctcagtgttgtctgaataaagtgtgaaatcttttgtgttttctaaattgacattttcaatgaaaaaaagaatcccaaaaaaaaaa

SEQ ID NO: 440291 - DNA, 1629 bp, Homo sapiens
  misc_feature (1)..(1): n is a, c, g, or t
  misc_feature (3)..(4): n is a, c, g, or t
nannggcacgagagtgacgtcgtgtggggcgggtccgaccgcgcacaatgggccatggagttcccgttcgatgtggacgcgctgttcccggagcggatcacggtgctggaccagcacctgaggcccccagcccgccgacccggaaccacaacgccggcccgtgttgatctacagcagcaaattatgaccattatagatgaactgggcaaggcttctgccaaggcccagaatctttccgctcctatcactagtgcatcaaggatgcagagtaaccgccatgttgtttatattctcaaagacagttcagcccgaccggctggaaaaggagccattattggtttcatcaaagttggatacaagaagctctttgtactggatgatcgtgaggctcataatgaggtagaaccactttgcatcctggacttttacatccatgagtctgtgcaacgccatggccatgggcgagaactcttccagtatatgttgcagaaggagcgagtggaaccgcaccaactggcaattgaccgaccctcacagaagctgctgaaattcctgaataagcactacaatctggagaccacagtcccacaggtgaacaactttgtgatctttgaaggcttctttgcccatcaacatcggccccctgctccctctctgagggcaactcgacactctcgtgctgctgcagtcgatcccacgcccgctggtcaagcctgtattgaaggggtggaactgtagtgcagtgatggctacttactctagatgccacggggtacagtgccatctgtgggcaattttggaaaattctaaagcaacccaagtctccagcagtcatgactgtttgcctttgccctcatgggagctcagtgcattttatatttggcaagacttttaactaagcaagctcattgggagcctgtttgacagctgatatcaatggaccctcttgccagttcaggtccgtcaacataggccagagtcaggctcctttgtaaaccccaggcttctgttagccagtgagggacaggctggtgcaaacagcccttccatttgcagtcacagaatagtgacacaaatggcccaaaatttaaatgttacttttagaagataacactcagagtttataacatttccaaccagataatgaaattgatatggagaaaccaaacctcagaggcactaaaatgctgtccagattccccatcccatatacacacacacacacacacacacacacacaaacacacttactgacagtctgagccccactccttcctcttcctcaccacctccaccttaccaacttctgacagctgtacagtgcttgcttgcacagaagagcccccttcctgagctggctctgtggccaggaaaggatgtaaccaccatccaaacagcagtctgtaaccagctatgagcatcacagtgtcaggcactgagaggcacctcaactcgctttggtttccaaggcttctcccatttagcttgttcagaaccacaggctgtgagagggactgagggccaacaaggatggtgaggtctcaggcctgcaggggagggtgctgtggataaagcttaagtgaatttgctgagaagtctttcatttgccacacatacatgatggagaat

SEQ ID NO: 440292 - DNA, 718 bp, Homo sapiens
aaatcaagtaggccacattcactgtctactcctgccttcccatgcctgatatttccacaggcaaccaagactccaagcagggagaacaggaaacaaagaataggtctgccagtgaggagcaggccttgtcacaggatgggtctggggagaagcccatgcacacagctcctccacaggccccggccccgccagcccagtcctggacagtgggtggggacatactcaacgccaggttcattcgaaacctgcaggaacgtcgcagcaccaggccttggtgaccgcagccccgtcaaacatcttcaaagtattatttctccctcactacaggaaagagccaaagcccaaccctcataatagatggatacattcattcattcattcattcagcaggcttatcagattcaagtcatttgtatcttttaaccagaccaataaaagtatttatttttatcacaagagctgttgaaaaatttgactcattatttcagccgcctcacccctcactgtcgttgcacccattcagccttcagccctgtttttgctcagctttttgctcaaaggcctcagctgtgaatacagcgcttgggggggcaggggaggctgtaacttgcgcaagcgcactcaggcagtctccgagcccgcgggcgcaggcgcgcttacagccgacagagcgcttcagccgcttccctcgagcctgcagtgcgcaagcgcgggacat

SEQ ID NO: 440293 - DNA, 2386 bp, Homo sapiens
  misc_feature (1)..(1): n is a, c, g, or t
  misc_feature (3)..(4): n is a, c, g, or t
nannggcacgagagtgacgtcgtgtggggcgggtccgaccgcgcacaatgggccatggagttcccgttcgatgtggacgcgctgttcccggagcggatcacggtgctggaccagcacctgaggcccccagcccgccgacccggaaccacaacgccggcccggtgacagctcaaacccaccctctggcccttttctcccggttcctctccaaacctggtccaggcaccacgcccccttctcactgactagtgatcgccccttttgatgtccaggcctgcctttttggtgacctctgaccctgggcctagtgggattgatcagcgcttggatctgtgacctttcaccccgggcccaaaatgtcccaatcaaaggatgtggttgacctggcctttctgcttcctcacaataaccttaagggaggagggagtgtgccaccttgaaagtgttgatctacagcagcaaattatgaccattatagatgaactgggcaaggcttctgccaaggcccagaatctttccgctcctatcactagtgcatcaaggatgcagagtaaccgccatgttgtttatattctcaaagacagttcagcccgaccggctggaaaaggagccattattggtttcatcaaagttggatacaagaagctctttgtactggatgatcgtgaggctcataatgaggtagaaccactttgcatcctggacttttacatccatgagtctgtgcaacgccatggccatgggcgagaactcttccagtatatgttgcagaaggagcgagtggaaccgcaccaactggcaattgaccgaccctcacagaagctgctgaaattcctgaataagcactacaatctggagaccacagtcccacaggtgaacaactttgtgatctttgaaggcttctttgcccatcaacatcctccagcaaggaagctgccacccaagagagcagagggagacatcaagccatactcctctagtgaccgagaatttctgaaggtagctgtggagcctccttggcccctaaacagggcccctcgccgcgccacacctccagcccacccacccccccgctccagcagcctgggaaactcaccagaacgaggtcccctccgcccctttgtgccagagcaggagctgctgcgttccttgcgcctctgccccccacaccctaccgcccgccttctgttggctgctgaccctgggggcagcccagctcaacgtcgtcgcaccagctcccttccccgctctgaggagagtcgatactaacagctaccctctccctgccctgggagacctggggtgggcagggaacccctccctgagaacctcagacccactcttccattgcatcctgtaggacccagtggaacctgacagagcccataggattccctcttctactttcttagacagcagggatgtcagggtctcaaactgcctaacactttgtagcttttcttaacacaaaagcaccccttctctcctaacttgggctctgaatactttcccaacaggaagtctgatctgttgccagacttcttggttagatggctcatacatttatctagagaagcacactcttgcttgctgtcaaactttagaacaccatggaaggtctaagggcatcctgtgccagggaaactttttaaggaattttatctatgggataaaccccatattccctctagtgtctactggtggctctaatactgctttgtgctgcctgccacacttgccctttgagcctgcgaatggccgctagtgagcaagctctgcttcagagcagtctagttaggtagaacagggacttaccagcttcccaaagggatctactcaccattgccaaactcttcatttccacattttgtgtaggtgtcagggaaccccaaactggtgttgctttggggtctctaaaggagattggctgacaccaccatttcccccagatccagattctctgagggaggttgtttcttgagagtagatccagagtgtcaaggatctgttagatcctggaatcccttcttgcatccatccctccctggtagctaggtcccgatatactcctgtcttgtgagattgtcgagatgagatgggggaccactcttcctctgtccttcctctctcctttcctccatagcaaggacgaccttccctgctccatgcccagagtatagctagatcccttcccctccctaccctctgaatgtgtgctagatcaggtgccccactgtgtttcctgaaatccttgggagccggatctccccatctcccctactcactcttcccttttcttctctcagtgttgtctgaataaagtgtgaaatcttttgtgttttctaaattgacattttcaatgaaaaaaagaatcccaaaaaaaaaa

SEQ ID NO: 440294 - DNA, 2119 bp, Homo sapiens
  misc_feature (1)..(1): n is a, c, g, or t
  misc_feature (3)..(4): n is a, c, g, or t
nannggcacgagagtgacgtcgtgtggggcgggtccgaccgcgcacaatgggccatggagttcccgttcgatgtggacgcgctgttcccggagcggatcacggtgctggaccagcacctgaggcccccagcccgccgacccggaaccacaacgccggcccgtgttgatctacagcagcaaattatgaccattatagatgaactgggcaaggcttctgccaaggcccagaatctttccgctcctatcactagtgcatcaaggatgcagagtaaccgccatgttgtttatattctcaaagacagttcagcccgaccggctggaaaaggagccattattggtttcatcaaagttggatacaagaagctctttgtactggatgatcgtgaggctcataatgaggtagaaccactttgcatcctggacttttacatccatgagtctgtgcaacgccatggccatgggcgagaactcttccagtatatgttgcagaaggagcgagtggaaccgcaccaactggcaattgaccgaccctcacagaagctgctgaaattcctgaataagcactacaatctggagaccacagtcccacaggtgaacaactttgtgatctttgaaggcttctttgcccatcaacatcggccccctgctccctctctgagggcaactcgacactctcgtgctgctgcagtcgatcccacgcccgctgctccagcaaggaagctgccacccaagagagcagagggagacatcaagccatactcctctagtgaccgagaatttctgaaggtagctgtggagcctccttggcccctaaacagggcccctcgccgcgccacacctccagcccacccacccccccgctccagcagcctgggaaactcaccagaacgaggtcccctccgcccctttgtgccagagcaggagctgctgcgttccttgcgcctctgccccccacaccctaccgcccgccttctgttggctgctgaccctgggggcagcccagctcaacgtcgtcgcaccagggggactcccccaggtctggtagcccaaagctgctgctacagccgccatgggggggtgaattcctcatcccccaatacaggcaaccaagactccaagcagggagaacaggaaacaaagaataggtgaggtctaaacccctcccctaacagcctcccaccaccatctgactcccttcctaacatcattctcagtcacttcctactcttaaatcttattgtatgaactggacaccagctcctcccacaattccttctaccttacatcctgcaagcccctttcccccacaggttcaactctggtacttccctttggaatacggattctctgagaggttttaaatttggacatagcactaatggttccagcttcatacccatcatgtgtcctacattaaaacctggcccgagaccttgaagagtctgtaatcttaatttcctctttagtattcctataacccactctccatctccccacctaccaggtctgccagtgaggagcaggccttgtcacaggatgggtctggggagaagcccatgcacacagctcctccacaggccccggccccgccagcccagtcctggacagtgggtggggacatactcaacgccaggttcattcgaaacctgcaggaacgtcgcagcaccaggccttggtgaccgcagccccgtcaaacatcttcaaagtattatttctccctcactacaggaaagagccaaagcccaaccctcataatagatggatacattcattcattcattcattcagcaggcttatcagattcaagtcatttgtatcttttaaccagaccaataaaagtatttatttttatcacaagagctgttgaaaaatttgactcattatttcagccgcctcacccctcactgtcgttgcacccattcagccttcagccctgtttttgctcagctttttgctcaaaggcctcagctgtgaatacagcgcttgggggggcaggggaggctgtaacttgcgcaagcgcactcaggcagtctccgagcccgcgggcgcaggcgcgcttacagccgacagagcgcttcagccgcttccctcgagcctgcagtgcgcaagcgcgggacat

SEQ ID NO: 440295 - DNA, 1641 bp, Homo sapiens
  misc_feature (1)..(1): n is a, c, g, or t
  misc_feature (3)..(4): n is a, c, g, or t
nannggcacgagagtgacgtcgtgtggggcgggtccgaccgcgcacaatgggccatggagttcccgttcgatgtggacgcgctgttcccggagcggatcacggtgctggaccagcacctgaggcccccagcccgccgacccggaaccacaacgccggcccgtgttgatctacagcagcaaattatgaccattatagatgaactgggcaaggcttctgccaaggcccagaatctttccgctcctatcactagtgcatcaaggatgcagagtaaccgccatgttgtttatattctcaaagacagttcagcccgaccggctggaaaaggagccattattggtttcatcaaagttggatacaagaagctctttgtactggatgatcgtgaggctcataatgaggtagaaccactttgcatcctggacttttacatccatgagtctgtgcaacgccatggccatgggcgagaactcttccagtatatgttgcagaaggagcgagtggaaccgcaccaactggcaattgaccgaccctcacagaagctgctgaaattcctgaataagcactacaatctggagaccacagtcccacaggtgaacaactttgtgatctttgaaggcttctttgcccatcaacatcctccagcaaggaagctgccacccaagagagcagagggagacatcaagccatactcctctagtgaccgagaatggggactcccccaggtctggtagcccaaagctgctgctacagccgccatgggggggtgaattcctcatcccccaatacaggcaaccaagactccaagcagggagaacaggaaacaaagaataggttcaactctggtacttccctttggaatacggattctctgagaggttttaaatttggacatagcactaatggttccagcttcatacccatcatgtgtcctacattaaaacctggcccgagaccttgaagagtctgtaatcttaatttcctctttagtattcctataacccactctccatctccccacctaccaggtctgccagtgaggagcaggccttgtcacaggatgggtctggggagaagcccatgcacacagctcctccacaggccccggccccgccagcccagtcctggacagtgggtggggacatactcaacgccaggttcattcgaaacctgcaggaacgtcgcagcaccaggccttggtgaccgcagccccgtcaaacatcttcaaagtattatttctccctcactacaggaaagagccaaagcccaaccctcataatagatggatacattcattcattcattcattcagcaggcttatcagattcaagtcatttgtatcttttaaccagaccaataaaagtatttatttttatcacaagagctgttgaaaaatttgactcattatttcagccgcctcacccctcactgtcgttgcacccattcagccttcagccctgtttttgctcagctttttgctcaaaggcctcagctgtgaatacagcgcttgggggggcaggggaggctgtaacttgcgcaagcgcactcaggcagtctccgagcccgcgggcgcaggcgcgcttacagccgacagagcgcttcagccgcttccctcgagcctgcagtgcgcaagcgcgggacat

SEQ ID NO: 440296 - DNA, 3001 bp, Homo sapiens
tgatgtgcagccaggattgacaagagcctttagtctagagctcgcagcagacctctagactatttggaatctgattttaaagaatggcccagcagatgaaggtgtttttttaaattgttagtcatgtgaaacgaactgagtattgatcagtaatacagacagggcagctgtgagagagtttgatgctaatctttgcagaactcaagaacatactccataaagtacagctgaaaagatcacgaaaaccttgagccttcgaggaaagagaagggtgacttggggtatgtatggggagaactaaaaacctgtcatcttggttcccacttgtggggaataaagggaaggtattgtcttaactgagctgctaactaatcaagcatgaaggtttctgggaagctgttttgttttttttttttaatttcacctggaattaaattaatagtcccctctggagtcagattttcttttccttcacctatcctcatgcctgagtccacactggattcctcagaataagggtgggcccatttactgctggagcaaagtagaaggttgtggtcctttgctatcacatggtgatggtggtggtttccgtagcaggtaattaaggagatgcacacttttgtatagccctgacagagagaagatgaaagctgctattccttttagtacactttttgagaactaccagaaacctgaactttctctcctagggaagaaaatttggaatttaaataaggccacatttcttcctaggacacaatcacaggaagggcatatggatccgagcatccagggtggttactggggtgatcagacaaataagcattgatgcctggaaggcagaaatcacactgcgacatcaaatgtttcatcaagcaaacagcaaggatctcttcaggctgtgttctctagacccgaaaatgtcctctgtggtttggctgacaaatggaatctctttagaaaacatgcaaaagggtatctcagctatccatgaacgatttggtctaggacaaagaactaacagttccttccaaaatagaggtctgttggtctgtttgacgtcatcccatcatcctatctctccctgtccttgtctgcagtagaagttaatgtaatcataccagatgtttaatgtgaacaagtaatttccaaatgtagaaacaccactgatgcacttagggggaaaaacagtggcagggtgttagagcatctcatcagaggtgaaaatcacccacttggaaacctactgtgcacccgttgtgagttctaagagtgtatcagaaagctgattttaccatctgttgtgaaagattatctgcaatgagggctgctagaaagtcagcctgctgatctcacaagtatatgacttcttattccacttcaaaagtggggaacttgacaagtttcttgtctgccttttgatgttgattctatagattaattagttcaggaacaagtctttcatatacattagactggtatcattgagttctgagctattctgttgttctttaactgacactctggattgccagtgtcggctgctacattctgatacagtaagtcaaaggaatctagtggccaagagttgtagtttagaaacaacccatctgaatactgcttttaccactttgatacctgaaaagatcatccccctttctaaaacctgaaaacaacatatagagaaatactgtagaaaccattgctagtgtcttaactaggaaaagcaagtagactcatcaacaatcctttcaaaacaagacctagagataaacagttttttccagtgtcaattttcatagacatttttaaaaaattaaacacatcttgtcacccagtgctagcaaaaattgtaaagagcaaaaccaaagtttttgatgttagtcttatttttgtaagcagggtatactatagtcgtggcccatatggaacacacaggcagccggttttctgctacctgagccttggagaagatgagaaggaagggctgcctgctgtgctgccctttgaaaaggtccaaagcagacaggagcgcacacagcagaagtcaccttctccttctgatgaccacctttcaaaaggcttaacagaatcaccaagtgtcacagtcagctcttggccagtggaaaattgtctgggcctgtatatgttggaggaactcagatagaaaaggacttgtaaacagcatggaaacctcaacatctgctgtctcaagcacttaaaaaaggctacaattcaggtgttactggatgacttaactgcatggacatttaggggctgacttgtgttgtgattattccaattgtgggctttggagaagcagagggatgattttcagttgtgtgggtgttaagtctatggattgggaatttaccactgaaattgatcgttcaaagtgtgacttcatagtagggccagctcctcctaagttgtccttttgtttttcacataaaatacatctggtactttttacttggaaagttgtactatgtccatgaaaatggttaaatgagaaggccataaagattcatttaatagctgaaaagcaacttttaaaatagaataggacgaatttaacatggaatgatgtgaccttctagggaactttttatagagagcttacatagtgtaattggggagaattttgtcttctatttccattcaacagtagcaaactggtggttttataaaattaacattatagtatgttatataaataaacgttatataaaatgacattaaagtataactgtgaaaaattaaagacttggagttatccacaacctttatgtgcaataaggaaaactgcagtaggcccccaaagtgccgtctttccctagcattttactcaatgtttgcctttgtgtatgtttagattgctattgtaaagctagccatgtgtgttcctgccctttactgatatttaacacattttctcaaagcttttctttttttaaaaaaacaaaactcaaaataaaacaactaactggctgagcta

SEQ ID NO: 440297 - DNA, 3226 bp, Homo sapiens
tgatgtgcagccaggattgacaagagcctttagtctagagctcgcagcagacctctagactatttggaatctgattttaaagaatggcccagcagatgaaggtgtttttttaaattgttagtcatgtgaaacgaactgagtattgatcagtaatacagacagggcagctgtgagagagtttgatgctaatctttgcagaactcaagaacatactccataaagtacagctgaaaagatcacgaaaaccttgagccttcgaggaaagagaagggtgacttggggtatgtatggggagaactaaaaacctgtcatcttggttcccacttgtggggaataaagggaaggtattgtcttaactgagctgctaactaatcaagcatgaaggtttctgggaagctgttttgttttttttttttaatttcacctggaattaaattaatagtcccctctggagtcagattttcttttccttcacctatcctcatgcctgagtccacactggattcctcagaataagggtgggcccatttactgctggagcaaagtagaaggttgtggtcctttgctatcacatggtgatggtggtggtttccgtagcaggtaattaaggagatgcacacttttgtatagccctgacagagagaagatgaaagctgctattccttttagtacactttttgagaactaccagaaacctgaactttctctcctagggaagaaaatttggaatttaaataaggccacatttcttcctaggacacaatcacaggaagggcatatggatccgagcatccagggtggttactggggtgatcagacaaataagcattgatgcctggaaggcagaaatcacactgcgacatcaaatgtttcatcaagcaaacagcaaggatctcttcaggctgtgttctctagacccgaaaatgtcctctgtggtttggctgacaaatggaatctctttagaaaacatgcaaaagggtatctcagctatccatgaacgatttggtctaggacaaagaactaacagttccttccaaaatagaggtctgttggtctgtttgacgtcatcccatcatcctatctctccctgtccttgtctgcagtagaagttaatgtaatcataccagatgtttaatgtgaacaagtaatttccaaatgtagaaacaccactgatgcacttagggggaaaaacagtggcagggtgttagagcatctcatcagaggtgaaaatcacccacttggaaacctactgtgcacccgttgtgagttctaagagtgtatcagaaagctgattttaccatctgttgtgaaagattatctgcaatgagggctgctagaaagtcagcctgctgatctcacaagtatatgacttcttattccacttcaaaagtggggaacttgacaagtttcttgtctgccttttgatgttgattctatagattaattagttcaggaacaagtctttcatatacattagactggtatcattgagttctgagctattctgttgttctttaactgacactctggattgccagtgtcggctgctacattctgatacagtaagtcaaaggaatctagtggccaagagttgtagtttagaaacaacccatctgaatactgcttttaccactttgatacctgaaaagatcatccccctttctaaaacctgaaaacaacatatagagaaatactgtagaaaccattgctagtgtcttaactaggaaaagcaagtagactcatcaacaatcctttcaaaacaagacctagagataaacagttttttccagtgtcaattttcatagacatttttaaaaaattaaacacatcttgtcacccagtgctagcaaaaattgtaaagagcaaaaccaaagtttttgatgttagtcttatttttgtaagcagggtatactatagtcgtggcccatatggaacacacaggcagccggttttctgctacctgagccttggagaagatgagaaggaagggctgcctgctgtgctgccctttgaaaaggtccaaagcagacaggagcgcacacagcagaagtcaccttctccttctgatgaccacctttcaaaaggcttaacagaatcaccaagtgtcacagtcagctcttggccagtggaaaattgtctgggcctgtatatgttggaggaactcagatagaaaaggacttgtaaacagcatggaaacctcaacatctgctgtctcaagcacttaaaaaaggctacaattcaggtgttactggatgacttaactgcatggacatttaggggctgacttgtgttgtgattattccaattgtgggctttggagaagcagagggatgattttcagttgtgtgggtgttaagtctatggattgggaatttaccactgaaattgatcgttcaaagtgtgacttcatagtagggccagctcctcctaagttgtccttttgtttttcacataaaatacatctggtactttttacttggaaagttgtactatgtccatgaaaatggttaaatgagaaggccataaagattcatttaatagctgaaaagcaacttttaaaatagaataggacgaatttaacatggaatgatgtgaccttctagggaactttttatagagagcttacatagtgtaattggggagaattttgtcttctatttccattcaacagtagcaaactggtggttttataaaattaacattatagtatgttatataaataaacgttatataaaatgacattaaagtataactgtgaaaaattaaagacttggagttatccacaacctttatgtgcaataaggaaaactgcagtaggcccccaaagtgccgtctttccctagcattttactcaatgtttgcctttgtgtatgtttagattgctattgtaaagctagccatgtgtgttcctgccctttactgatatttaacacattttctcaaagcttttctttttttaaaaaaacaaaactcaaaataaaacaactaactggctgagctaattttgttttgtattttaaagtaaagtatcatctgttggtagaaggctgtagtgtgatactattcttagtctgtttccctcactgagaggttcttttctgggtgtaagctattcctctccagctttctttaggcctggggttggcaaactacagctggctcctgaaccaagtccagcccactgcctttttttgtaaataaagttttattggcatgactaggaaaa

SEQ ID NO: 440298 - DNA, 2740 bp, Homo sapiens
tgatgtgcagccaggattgacaagagcctttagtctagagctcgcagcagacctctagactatttggaatctgattttaaagaatggcccagcagatgaaggtgtttttttaaattgttagtcatgtgaaacgaactgagtattgatcagtaatacagacagggcagctgtgagagagtttgatgctaatctttgcagaactcaagaacatactccataaagtacagctgaaaagatcacgaaaaccttgagccttcgaggaaagagaagggtgacttggggtatgtatggggagaactaaaaacctgtcatcttggttcccacttgtggggaataaagggaaggtattgtcttaactgagctgctaactaatcaagcatgaaggtttctgggaagctgttttgttttttttttttaatttcacctggaattaaattaatagtcccctctggagtcagattttcttttccttcacctatcctcatgcctgagtccacactggattcctcagaataagggtgggcccatttactgctggagcaaagtagaaggttgtggtcctttgctatcacatggtgatggtggtggtttccgtagcaggtaattaaggagatgcacacttttgtatagccctgacagagagaagatgaaagctgctattccttttagtacactttttgagaactaccagaaacctgaactttctctcctagggaagaaaatttggaatttaaataaggccacatttcttcctaggacacaatcacaggaagggcatatggatccgagcatccagggtggttactggggtgatcagacaaataagcattgatgcctggaaggcagaaatcacactgcgacatcaaatgtttcatcaagcaaacagcaaggatctcttcaggctgtgttctctagacccgaaaatgtcctctgtggtttggctgacaaatggaatctctttagaaaacatgcaaaagggtatctcagctatccatgaacgatttggtctaggacaaagaactaacagttccttccaaaatagaggtctgttggtctgtttgacgtcatcccatcatcctatctctccctgtccttgtctgcagtagaagttaatgtaatcataccagatgtttaatgtgaacaagtaatttccaaatgtagaaacaccactgatgcacttagggggaaaaacagtggcagggtgttagagcatctcatcagaggtgaaaatcacccacttggaaacctactgtgcacccgttgtgagttctaagagtgtatcagaaagctgattttaccatctgttgtgaaagattatctgcaatgagggctgctagaaagtcagcctgctgatctcacaagtatatgacttcttattccacttcaaaagtggggaacttgacaagtttcttgtctgccttttgatgttgattctatagattaattagttcaggaacaagtctttcatatacattagactggtatcattgagttctgagctattctgttgttctttaactgacactctggattgccagtgtcggctgctacattctgatacagtaagtcaaaggaatctagtggccaagagttgtagtttagaaacaacccatctgaatactgcttttaccactttgatacctgaaaagatcatccccctttctaaaacctgaaaacaacatatagagaaatactgtagaaaccattgctagtgtcttaactaggaaaagcaagtagactcatcaacaatcctttcaaaacaagacctagagataaacagttttttccagtgtcaattttcatagacatttttaaaaaattaaacacatcttgtcacccagtgctagcaaaaattgtaaagagcaaaaccaaagtttttgatgttagtcttatttttgtaagcagggtatactatagtcgtggcccatatggaacacacaggcagccggttttctgctacctgagccttggagaagatgagaaggaagggctgcctgctgtgctgccctttgaaaaggtccaaagcagacaggagcgcacacagcagaagtcaccttctccttctgatgaccacctttcaaaaggcttaacagaatcaccaagtgtcacagtcagctcttggccagtggaaaattgtctgggcctgtatatgttggaggaactcagatagaaaaggacttgtaaacagcatggaaacctcaacatctgctgtctcaagcacttaaaaaaggctacaattcaggtgttactggatgacttaactgcatggacatttaggggctgacttgtgttgtgattattccaattgtgggctttggagaagcagagggatgattttcagttgtgtgggtgttaagtctatggattgggaatttaccactgaaattgatcgttcaaagtgtgacttcatagtagggccagctcctcctaagttgtccttttgtttttcacataaaatacatctggtactttttacttggaaagttgtactatgtccatgaaaatggttaaatgagaaggccataaagattcatttaatagctgaaaagcaacttttaaaatagaataggacgaatttaacatggaatgatgtgaccttctagggaactttttatagagagcttacatagtgtaattggggagaattttgtcttctatttccattcaacagtagcaaactggtggttttataaaattaacattatagtatgttatataaataaacgttatataaaatgac

SEQ ID NO: 440299 - DNA, 2081 bp, Homo sapiens
tgatgtgcagccaggattgacaagagcctttagtctagagctcgcagcagacctctagactatttggaatctgattttaaagaatggcccagcagatgaaggtgtttttttaaattgttagtcatgtgaaacgaactgagtattgatcagtaatacagacagggcagctgtgagagagtttgatgctaatctttgcagaactcaagaacatactccataaagtacagctgaaaagatcacgaaaaccttgagccttcgaggaaagagaagggtgacttggggtatgtatggggagaactaaaaacctgtcatcttggttcccacttgtggggaataaagggaaggtattgtcttaactgagctgctaactaatcaagcatgaaggtttctgggaagctgttttgttttttttttttaatttcacctggaattaaattaatagtcccctctggagtcagattttcttttccttcacctatcctcatgcctgagtccacactggattcctcagaataagggtgggcccatttactgctggagcaaagtagaaggttgtggtcctttgctatcacatggtgatggtggtggtttccgtagcaggtaattaaggagatgcacacttttgtatagccctgacagagagaagatgaaagctgctattccttttagtacactttttgagaactaccagaaacctgaactttctctcctagggaagaaaatttggaatttaaataaggccacatttcttcctaggacacaatcacaggaagggcatatggatccgagcatccagggtggttactggggtgatcagacaaataagcattgatgcctggaaggcagaaatcacactgcgacatcaaatgtttcatcaagcaaacagcaaggatctcttcaggctgtgttctctagacccgaaaatgtcctctgtggtttggctgacaaatggaatctctttagaaaacatgcaaaagggtatctcagctatccatgaacgatttggtctaggacaaagaactaacagttccttccaaaatagaggtctgttggtctgtttgacgtcatcccatcatcctatctctccctgtccttgtctgcagtagaagttaatgtaatcataccagatgtttaatgtgaacaagtaatttccaaatgtagaaacaccactgatgcacttagggggaaaaacagtggcagggtgttagagcatctcatcagaggtgaaaatcacccacttggaaacctactgtgcacccgttgtgagttctaagagtgtatcagaaagctgattttaccatctgttgtgaaagattatctgcaatgagggctgctagaaagtcagcctgctgatctcacaagtatatgacttcttattccacttcaaaagtggggaacttgacaagtttcttgtctgccttttgatgttgattctatagattaattagttcaggaacaagtctttcatatacattagactggtatcattgagttctgagctattctgttgttctttaactgacactctggattgccagtgtcggctgctacattctgatacagtaagtcaaaggaatctagtggccaagagttgtagtttagaaacaacccatctgaatactgcttttaccactttgatacctgaaaagatcatccccctttctaaaacctgaaaacaacatatagagaaatactgtagaaaccattgctagtgtcttaactaggaaaagcaagtagactcatcaacaatcctttcaaaacaagacctagagataaacagttttttccagtgtcaattttcatagacatttttaaaaaaacaaaactcaaaataaaacaactaactggctgagctaattttgttttgtattttaaagtaaagtatcatctgttggtagaaggctgtagtgtgatactattcttagtctgtttccctcactgagaggttcttttctgggtgtaagctattcctctccagctttctttaggcctggggttggcaaactacagctggctcctgaaccaagtccagcccactgcctttttttgtaaataaagttttattggcatgactaggaaaa

SEQ ID NO: 440300 - DNA, 1411 bp, Homo sapiens
gctattttctttggccaggttcccactggggcaaagggtccatttctgagcctggctctatgtaaggcaaccggaaatcgactgcccttagtaaagatggcggaaagaacggcgtcattgcctgtcaggttgcggcatcggtgccctcgctcaacatggcggccttctgtgcccgccccctccgctaacgggcacgttactccgtccgaacgcagtagacgaaggcggcggcgatggcggcggggatagtggcttctcgcagactccgcgacctactgacccggcgactgacaggctccaactacccgggactcagtattagccttcgcctcactggctcctctgcacaagaggcggcttccggagtagccctcggtgaagccccagaccacagctatgagtcccttcgtgtgacgtctgcgcagaaacatgttctgcatgtccagctcaaccggcccaacaagaggaatgccatgaacaaggtcttctggagagagatggtagagtgcttcaacaagatttcgagagacgctgactgtcgggcggtggtgatctctggtgcaggaaaaatgttcactgcaggtattgacctgatggacatggcttcggacatcctgcagcccaaaggagatgatgtggcccggatcagctggtacctccgtgacatcatcactcgataccaggagaccttcaacgtcatcgagaggtgccccaagcccgtgattgctgccgtccatgggggctgcattggcggaggtgtggaccttgtcaccgcctgtgacatccggtactgtgcccaggatgctttcttccaggtgaaggaggtggacgtgggtttggctgccgatgtaggaacactgcagcgcctgcccaaggtcatcgggaaccagagcctggtcaacgagctggccttcaccgcccgcaagatgatggctgacgaggccctgggcagtgggctggtcagccgggtgttcccagacaaagaggtcatgctggatgctgccttagcgctggcggccgagatttccagcaagagccccgtggcggtgcagagcaccaaggtcaacctgctgtattcccgcgaccattcggtggccgagagcctcaactacgtggcgtcctggaacatgagcatgctgcagacccaagacctcgtgaagtcggtccaggccacgactgagaacaaggaactgaaaaccgtcaccttctccaagctctgagagccctcgcgtcccaggccccagccagggggccggccttgtcccgcctcatccacagaaagggaggatgggcgatgacagttgtttctatgccttctgacccagtttcccagtttataactttatgacaatgagtttctcaagcccaaggccttatcttcaccccacaaacaataaagcaaagtaaagaa

SEQ ID NO: 440301 - DNA, 652 bp, Homo sapiens
aattaaggctaggtacgaggcttggtggtttgaatcggccgagggctttcttccaggtgaaggaggtggacgtgggtttggctgccgatgtaggaacactgcagcgcctgcccaaggtcatcgggaaccagagcctggtcaacgagctggccttcaccgcccgcaagatgatggctgacgaggccctgggcagtgggctggtcagccgggtgttcccagacaaagaggtcatgctggatgctgccttagcgctggcggccgagatttccagcaagagccccgtggcggtgcagagcaccaaggtcaacctgctgtattcccgcgaccattcggtggccgagagcctcaactacgtggcgtcctggaacatgagcatgctgcagacccaagacctcgtgaagtcggtccaggccacgactgagaacaaggaactgaaaaccgtcaccttctccaagctctgagagccctcgcgtcccaggccccagccagggggccggccttgtcccgcctcatccacagaaagggaggatgggcgatgacagttgtttctatgccttctgacccagtttcccagtttataactttatgacaatgagtttctcaagcccaaggccttatcttcaccccacaaacaataaagcaaagtaaagaa

SEQ ID NO: 440302 - DNA, 493 bp, Homo sapiens
gacaatcgagctcggttccccttttggggactttgctcttttggggtctttgctcttttggggtctttgctttattgtttgtggggtgaagataaggccttgggcttgagaaactcattgtcataaagttataaactgggaaactgggtcagaaggcataggaacactgcagcgcctgcccaaggtcatcgggaaccagagcctggtcaacgagctggccttcaccgcccgcaagatgatggctgacgaggccctgggcagtgggctggtcagccgggtgttcccagacaaagaggtcatgctggatgctgccttagcgctggcggccgagatttccagcaagagccccgtggcggtgcagagcaccaaggtcaacctgctgtattcccgcgaccattcggtggccgagagcctcaactacgtgcgtcctggaacatgagcatgctgcagacccaaaagagcaaagaccccaaaagggggttcttctaaatct

SEQ ID NO: 440303 - DNA, 352 bp, Homo sapiens
cggccgcctactactactactactgctcgaattaagcttctaacgatgtacggggagcgtcctggaacatgagcatgctgcagacccaagacctcgtgaagtcggtccaggccacgactgagaacaaggaactgaaaaccgtcaccttctccaagctctgagagccctcgcgtcccaggccccagccagggggccggccttgtcccgcctcatccacagaaagggaggatgggcgatgacagttgtttctatgccttctgacccagtttcccagtttataactttatgacaatgagtttctcaagcccaaggccttatcttcaccccacaaacaataaagcaaagtaaagaa

SEQ ID NO: 440304 - DNA, 541 bp, Homo sapiens
ttatagcagatgtaggacggggagggctatccggggtcacgaagggcccgagtcccctaaattcaggggactgacaggctccaactacccgggactcagtattagccttcgcctcactggctcctctgcacaagaggcggcttccggagtagccctcggtgaagccccagaccacagctatgagtcccttcgtgtgacgtctgcgcagaaacatgttctgcatgtccagctcaaccggcccaacaagaggaatgccatgaacaaggtcttctggagagagatggtagagtgcttcaacaagatttcgagagacgctgactgtcgggcggtggtgatctctggtgcaggaaaaatgttcactgcagaggtaccagacgctcttcacacaccctgccagccttcctagctcctggcaatagacagtggagcagtgcttctgaattagggttttaagcagcttctgacttacacactttttttttttttttttgagacggggtcttgctctgttgccacgctggagtgcagtagcgcaatctca

SEQ ID NO: 440305 - DNA, 1720 bp, Homo sapiens
gctattttctttggccaggttcccactggggcaaagggtccatttctgagcctggctctatgtaaggcaaccggaaatcgactgcccttagtaaagatggcggaaagaacggcgtcattgcctgtcaggttgcggcatcggtgccctcgctcaacatggcggccttctgtgcccgccccctccgctaacgggcacgttactccgtccgaacgcagtagacgaaggcggcggcgatggcggcggggatagtggcttctcgcagactccgcgacctactgacccggcgactgacaggctccaactacccgggactcagtattagccttcgcctcactggctcctctgcacaagaggcggcttccggagtagccctcggtgaagccccagaccacagctatgagtcccttcgtgtgacgtctgcgcagaaacatgttctgcatgtccagctcaaccggcccaacaagaggaatgccatgaacaaggtcttctggagagagatggtagagtgcttcaacaagatttcgagagacgctgactgtcgggcggtggtgatctctggtgcaggaaaaatgttcactgcaggtattgacctgatggacatggcttcggacatcctgcagcccaaaggagatgatgtggcccggatcagctggtacctccgtgacatcatcactcgataccaggagaccttcaacgtcatcgagaggtgccccaagcccgtgattgctgccgtccatgggggctgcattggcggaggtgtggaccttgtcaccgcctgtgacatccggtactgtgcccaggatgctttcttccaggtgaaggaggtggacgtgggtttggctgccgatgtaggaacactgcagcgcctgcccaaggtcatcgggaaccagagcctggtcaacgagctggccttcaccgcccgcaagatgatggctgacgaggccctgggcagtgggctggtcagccgggtgttcccagacaaagaggtcatgctggatgctgccttagcgctggcggccgagatttccagcaagagccccgtggcggtgcagagcaccaaggtcaacctgctgtattcccgcgaccattcggtggccgagagcctcaactacgtggcgtcctggaacatgagcatgctgcagacccaagacctcgtgaagtcggtccaggccacgactgagaacaaggaactgaaaaccgtcaccttctccaagctctgagagccctcgcgtcccaggccccagccagggggccggccttgtcccgcctcatccacagaaagggaggatgggcgatgacagttgtttctatgccttctgacccagtttcccagtttataactttatgacaatgagtttctcaagcccaaggccttatcttcaccccacaaacaataaagcaaagtaaagaaaaaaaaaaaaacaaaaaaaaacaaaaaaaaaacatttggtgggcccgcctgcgggccctctagaaaaagttttctaaaacacctctcgttggggcgcgccggggcccaatatgggttataccggaaacacctgcggcccatagactgtggtccaaaagggacaccccgtggcactagcacaactggggggtggcgttccctcacaataaaaaagcgccgcgtcggaacaccgggcgtgtctgtgacaactccaaaggggcgttcggacgggccaggggagctaccagcgagcgcaagcggagccatata

SEQ ID NO: 440306 - DNA, 1436 bp, Homo sapiens
gctattttctttggccaggttcccactggggcaaagggtccatttctgagcctggctctatgtaaggcaaccggaaatcgactgcccttagtaaagatggcggaaagaacggcgtcattgcctgtcaggttgcggcatcggtgccctcgctcaacatggcggccttctgtgcccgccccctccgctaacgggcacgttactccgtccgaacgcagtagacgaaggcggcggcgatggcggcggggatagtggcttctcgcagactccgcgacctactgacccggcgtgagtcacctcttgccttatgggggactgacaggctccaactacccgggactcagtattagccttcgcctcactggctcctctgcacaagaggcggcttccggagtagccctcggtgaagccccagaccacagctatgagtcccttcgtgtgacgtctgcgcagaaacatgttctgcatgtccagctcaaccggcccaacaagaggaatgccatgaacaaggtcttctggagagagatggtagagtgcttcaacaagatttcgagagacgctgactgtcgggcggtggtgatctctggtgcaggaaaaatgttcactgcaggtattgacctgatggacatggcttcggacatcctgcagcccaaaggagatgatgtggcccggatcagctggtacctccgtgacatcatcactcgataccaggagaccttcaacgtcatcgagaggtgccccaagcccgtgattgctgccgtccatgggggctgcattggcggaggtgtggaccttgtcaccgcctgtgacatccggtactgtgcccaggatgctttcttccaggtgaaggaggtggacgtgggtttggctgccgatgtaggaacactgcagcgcctgcccaaggtcatcgggaaccagagcctggtcaacgagctggccttcaccgcccgcaagatgatggctgacgaggccctgggcagtgggctggtcagccgggtgttcccagacaaagaggtcatgctggatgctgccttagcgctggcggccgagatttccagcaagagccccgtggcggtgcagagcaccaaggtcaacctgctgtattcccgcgaccattcggtggccgagagcctcaactacgtggcgtcctggaacatgagcatgctgcagacccaagacctcgtgaagtcggtccaggccacgactgagaacaaggaactgaaaaccgtcaccttctccaagctctgagagccctcgcgtcccaggccccagccagggggccggccttgtcccgcctcatccacagaaagggaggatgggcgatgacagttgtttctatgccttctgacccagtttcccagtttataactttatgacaatgagtttctcaagcccaaggccttatcttcaccccacaaacaataaagcaaagtaaagaa

SEQ ID NO: 440307 - DNA, 1552 bp, Homo sapiens
gctattttctttggccaggttcccactggggcaaagggtccatttctgagcctggctctatgtaaggcaaccggaaatcgactgcccttagtaaagatggcggaaagaacggcgtcattgcctgtcaggttgcggcatcggtgccctcgctcaacatggcggccttctgtgcccgccccctccgctaacgggcacgttactccgtccgaacgcagtagacgaaggcggcggcgatggcggcggggatagtggcttctcgcagactccgcgacctactgacccggcgactgacaggctccaactacccgggactcagtattagccttcgcctcactggctcctctgcacaagaggcggcttccggagtagccctcggtgaagccccagaccacagctatgagtcccttcgtgtgacgtctgcgcagaaacatgttctgcatgtccagctcaaccggcccaacaagaggaatgccatgaacaaggtcttctggagagagatggtagagtgcttcaacaagatttcgagagacgctgactgtcgggcggtggtgatctctggtgcaggaaaaatgttcactgcaggtattgacctgatggacatggcttcggacatcctgcagcccaaaggagatgatgtggcccggatcagctggtacctccgtgacatcatcactcgataccaggagaccttcaacgtcatcgagaggtgccccaagcccgtgattgctgccgtccatgggggctgcattggcggaggtgtggaccttgtcaccgcctgtgacatccggtactgtgcccaggatgctttcttccaggtgaaggaggtggacgtgggtttggctgccgatgtaggaacactgcagcgcctgcccaaggtcatcgggaaccagagcctggtcaacgagctggccttcaccgcccgcaagatgatggctgacgaggccctgggcagtgggctggtcagccgggtgttcccagacaaagaggtcatgctggatgctgccttagcgctggcggccgagatttccagcaagagccccgtggcggtgcagagcaccaaggtcaacctgctgtattcccgcgaccattcggtggccgagagcctcaactacgtggtaaggtgcacgctccgaccaatcacagccctcctctaaccccaggcgaccaaccagggtgcagggtgctctcatgctttatcctgattggcccctgctaatctctctcctcgttctctctcaacaccctcggtaccaggcgcgtcctggaacatgagcatgctgcagacccaagacctcgtgaagtcggtccaggccacgactgagaacaaggaactgaaaaccgtcaccttctccaagctctgagagccctcgcgtcccaggccccagccagggggccggccttgtcccgcctcatccacagaaagggaggatgggcgatgacagttgtttctatgccttctgacccagtttcccagtttataactttatgacaatgagtttctcaagcccaaggccttatcttcaccccacaaacaataaagcaaagtaaagaa

SEQ ID NO: 440308 - DNA, 1103 bp, Homo sapiens
attggagtgtagcctgagaagtatctggggcagatgaggtcagagatggcaacaggaatgagatcaccagtggccctgtagccacctcaaagaattttagactttaacctacgtgttcatcagatctctttaagagtcttaaacagggaaaaaacatgattttctttcttggcagcgttccacagagagatggtagagtgcttcaacaagatttcgagagacgctgactgtcgggcggtggtgatctctggtgcaggaaaaatgttcactgcaggtattgacctgatggacatggcttcggacatcctgcagcccaaaggagatgatgtggcccggatcagctggtacctccgtgacatcatcactcgataccaggagaccttcaacgtcatcgagaggtgccccaagcccgtgattgctgccgtccatgggggctgcattggcggaggtgtggaccttgtcaccgcctgtgacatccggtactgtgcccaggatgctttcttccaggtgaaggaggtggacgtgggtttggctgccgatgtaggaacactgcagcgcctgcccaaggtcatcgggaaccagagcctggtcaacgagctggccttcaccgcccgcaagatgatggctgacgaggccctgggcagtgggctggtcagccgggtgttcccagacaaagaggtcatgctggatgctgccttagcgctggcggccgagatttccagcaagagccccgtggcggtgcagagcaccaaggtcaacctgctgtattcccgcgaccattcggtggccgagagcctcaactacgtggcgtcctggaacatgagcatgctgcagacccaagacctcgtgaagtcggtccaggccacgactgagaacaaggaactgaaaaccgtcaccttctccaagctctgagagccctcgcgtcccaggccccagccagggggccggccttgtcccgcctcatccacagaaagggaggatgggcgatgacagttgtttctatgccttctgacccagtttcccagtttataactttatgacaatgagtttctcaagcccaaggccttatcttcaccccacaaacaataaagcaaagtaaagaa

SEQ ID NO: 440309 - DNA, 1373 bp, Homo sapiens
gctattttctttggccaggttcccactggggcaaagggtccatttctgagcctggctctatgtaaggcaaccggaaatcgactgcccttagtaaagatggcggaaagaacggcgtcattgcctgtcaggttgcggcatcggtgccctcgctcaacatggcggccttctgtgcccgccccctccgctaacgggcacgttactccgtccgaacgcagtagacgaaggcggcggcgatggcggcggggatagtggcttctcgcagactccgcgacctactgacccggcgactgacaggctccaactacccgggactcagtattagccttcgcctcactggctcctctgcacaagaggcggcttccggagtagccctcggtgaagccccagaccacagctatgagtcccttcgtgtgacgtctgcgcagaaacatgttctgcatgtccagctcaaccggcccaacaagaggaatgccatgaacaaggtcttctggagagagatggtagagtgcttcaacaagatttcgagagacgctgactgtcgggcggtggtgatctctggtgcaggaaaaatgttcactgcagcccaaaggagatgatgtggcccggatcagctggtacctccgtgacatcatcactcgataccaggagaccttcaacgtcatcgagaggtgccccaagcccgtgattgctgccgtccatgggggctgcattggcggaggtgtggaccttgtcaccgcctgtgacatccggtactgtgcccaggatgctttcttccaggtgaaggaggtggacgtgggtttggctgccgatgtaggaacactgcagcgcctgcccaaggtcatcgggaaccagagcctggtcaacgagctggccttcaccgcccgcaagatgatggctgacgaggccctgggcagtgggctggtcagccgggtgttcccagacaaagaggtcatgctggatgctgccttagcgctggcggccgagatttccagcaagagccccgtggcggtgcagagcaccaaggtcaacctgctgtattcccgcgaccattcggtggccgagagcctcaactacgtggcgtcctggaacatgagcatgctgcagacccaagacctcgtgaagtcggtccaggccacgactgagaacaaggaactgaaaaccgtcaccttctccaagctctgagagccctcgcgtcccaggccccagccagggggccggccttgtcccgcctcatccacagaaagggaggatgggcgatgacagttgtttctatgccttctgacccagtttcccagtttataactttatgacaatgagtttctcaagcccaaggccttatcttcaccccacaaacaataaagcaaagtaaagaa

SEQ ID NO: 440310 - DNA, 1683 bp, Homo sapiens
gctattttctttggccaggttcccactggggcaaagggtccatttctgagcctggctctatgtaaggcaaccggaaatcgactgcccttagtaaagatggcggaaagaacggcgtcattgcctgtcaggttgcggcatcggtgccctcgctcaacatggcggccttctgtgcccgccccctccgctaacgggcacgttactccgtccgaacgcagtagacgaaggcggcggcgatggcggcggggatagtggcttctcgcagactccgcgacctactgacccggcgactgacaggctccaactacccgggactcagtattagccttcgcctcactggctcctctgcacaagaggcggcttccggagtagccctcggtgaagccccagaccacagctatgagtcccttcgtgtgacgtctgcgcagaaacatgttctgcatgtccagctcaaccggcccaacaagaggaatgccatgaacaaggtcttctggagagagatggtagagtgcttcaacaagatttcgagagacgctgactgtcgggcggtggtgatctctggtgcaggaaaaatgttcactgcaggtattgacctgatggacatggcttcggacatcctgcagcccaaaggagatgatgtggcccggatcagctggtacctccgtgacatcatcactcgataccaggagaccttcaacgtcatcgagagggtgactctaggggtctggaggggatctttctccatacgcgcctcccctgggccagccctgaccccactcttcctgttccctctcagtgccccaagcccgtgattgctgccgtccatgggggctgcattggcggaggtgagtctgcggctatcctcctgctcgggtgctccccaggtggggctgctgctccgatgccgcggccactggcatccagcctcagctctgtcatgggccagactgtgtcccaagaggcagccccacctcccgggagccagggttggttctggtggtcattcagcatccctggcctctacctcctaggtgtggaccttgtcaccgcctgtgacatccggtactgtgcccaggatgctttcttccaggtgaaggaggtggacgtgggtttggctgccgatgtaggaacactgcagcgcctgcccaaggtcatcgggaaccagagcctggtcaacgagctggccttcaccgcccgcaagatgatggctgacgaggccctgggcagtgggctggtcagccgggtgttcccagacaaagaggtcatgctggatgctgccttagcgctggcggccgagatttccagcaagagccccgtggcggtgcagagcaccaaggtcaacctgctgtattcccgcgaccattcggtggccgagagcctcaactacgtggcgtcctggaacatgagcatgctgcagacccaagacctcgtgaagtcggtccaggccacgactgagaacaaggaactgaaaaccgtcaccttctccaagctctgagagccctcgcgtcccaggccccagccagggggccggccttgtcccgcctcatccacagaaagggaggatgggcgatgacagttgtttctatgccttctgacccagtttcccagtttataactttatgacaatgagtttctcaagcccaaggccttatcttcaccccacaaacaataaagcaaagtaaagaa

SEQ ID NO: 440311 - DNA, 1330 bp, Homo sapiens
gctattttctttggccaggttcccactggggcaaagggtccatttctgagcctggctctatgtaaggcaaccggaaatcgactgcccttagtaaagatggcggaaagaacggcgtcattgcctgtcaggttgcggcatcggtgccctcgctcaacatggcggccttctgtgcccgccccctccgctaacgggcacgttactccgtccgaacgcagtagacgaaggcggcggcgatggcggcggggatagtggcttctcgcagactccgcgacctactgacccggcgactgacaggctccaactacccgggactcagtattagccttcgcctcactggctcctctgcacaagaggcggcttccggagtagccctcggtgaagccccagaccacagctatgagtcccttcgtgtgacgtctgcgcagaaacatgttctgcatgtccagctcaaccggcccaacaagaggaatgccatgaacaaggtcttctggagagagatggtagagtgcttcaacaagatttcgagagacgctgactgtcgggcggtggtgatctctggtgcaggaaaaatgttcactgcaggtattgacctgatggacatggcttcggacatcctgcagcccaaaggagatgatgtggcccggatcagctggtacctccgtgacatcatcactcgataccaggagaccttcaacgtcatcgagaggtgccccaagcccgtgattgctgccgtccatgggggctgcattggcggaggtgtggaccttgtcaccgcctgtgacatccggtactgtgcccaggatgctttcttccaggtgaaggaggtggacgtgggtttggctgccgatgtaggaacactgcagcgcctgcccaaggtcatcgggaaccagagcctggtcaacgagctggccttcaccgcccgcaagatgatggctgacgagatttccagcaagagccccgtggcggtgcagagcaccaaggtcaacctgctgtattcccgcgaccattcggtggccgagagcctcaactacgtggcgtcctggaacatgagcatgctgcagacccaagacctcgtgaagtcggtccaggccacgactgagaacaaggaactgaaaaccgtcaccttctccaagctctgagagccctcgcgtcccaggccccagccagggggccggccttgtcccgcctcatccacagaaagggaggatgggcgatgacagttgtttctatgccttctgacccagtttcccagtttataactttatgacaatgagtttctcaagcccaaggccttatcttcaccccacaaacaataaagcaaagtaaagaa

SEQ ID NO: 440312 - DNA, 720 bp, Homo sapiens
gacaatcgagctcggttccccttttggggactttgctcttttggggtctttgctcttttggggtctttgctttattgtttgtggggtgaagataaggccttgggcttgagaaactcattgtcataaagttataaactgggaaactgggtcagaaggcataggaacactgcagcgcctgcccaaggtcatcgggaaccagagcctggtcaacgagctggccttcaccgcccgcaagatgatggctgacgaggccctgggcagtgggctggtcagccgggtgttcccagacaaagaggtcatgctggatgctgccttagcgctggcggccgagatttccagcaagagccccgtggcggtgcagagcaccaaggtcaacctgctgtattcccgcgaccattcggtggccgagagcctcaactacgtggcgtcctggaacatgagcatgctgcagacccaagacctcgtgaagtcggtccaggccacgactgagaacaaggaactgaaaaccgtcaccttctccaagctctgagagccctcgcgtcccaggccccagccagggggccggccttgtcccgcctcatccacagaaagggaggatgggcgatgacagttgtttctatgccttctgacccagtttcccagtttataactttatgacaatgagtttctcaagcccaaggccttatcttcaccccacaaacaataaagcaaagtaaagaa

SEQ ID NO: 440313 - DNA, 961 bp, Homo sapiens
gctattttctttggccaggttcccactggggcaaagggtccatttctgagcctggctctatgtaaggcaaccggaaatcgactgcccttagtaaagatggcggaaagaacggcgtcattgcctgtcaggttgcggcatcggtgccctcgctcaacatggcggccttctgtgcccgccccctccgctaacgggcacgttactccgtccgaacgcagtagacgaaggcggcggcgatggcggcggggatagtggcttctcgcagactccgcgacctactgacccggcgactgacaggctccaactacccgggactcagtattagccttcgcctcactggctcctctgcacaagaggcggcttccggagtagccctcggtgaagccccagaccacagctatgagtcccttcgtgtgacgtctgcgcagaaacatgttctgcatgtccagctcaaccggcccaacaagaggaatgccatgaacaaggtcttctggagagagatggtagagtgcttcaacaagatttcgagagacgctgactgtcgggcggtggtgatctctggtgcaggaaaaatgttcactgcaggtattgacctgatggacatggcttcggacatcctgcagcccaaaggagatgatgtggcccggatcagctggtacctccgtgacatcatcactcgataccaggagaccttcaacgtcatcgagaggtgccccaagcccgtgattgctgccgtccatgggggctgcattggcggaggtgtggaccttgtcaccgcctgtgacatccggtactgtgcccaggatgctttcttccaggtgaaggaggtggacgtgggtttggctgccgatgtaggaacactgcagcgcctgcccaaggtcatcgggaaccagagcctgctcaactagctggcctttaccgcccgtatacctataggtcactagctttctgccacctttacccg

SEQ ID NO: 440314 - DNA, 913 bp, Homo sapiens
gctattttctttggccaggttcccactggggcaaagggtccatttctgagcctggctctatgtaaggcaaccggaaatcgactgcccttagtaaagatggcggaaagaacggcgtcattgcctgtcaggttgcggcatcggtgccctcgctcaacatggcggccttctgtgcccgccccctccgctaacgggcacgttactccgtccgaacgcagtagacgaaggcggcggcgatggcggcggggatagtggcttctcgcagactccgcgacctactgacccggcgactgacaggctccaactacccgggactcagtattagccttcgcctcactggctcctctgcacaagaggcggcttccggagtagccctcggtgaagccccagaccacagctatgagtcccttcgtgtgacgtctgcgcagaaacatgttctgcatgtccagctcaaccggcccaacaagaggaatgccatgaacaaggtcttctggagagagatggtagagtgcttcaacaagatttcgagagacgctgactgtcgggcggtggtgatctctggtgcaggaaaaatgttcactgcaggtattgacctgatggacatggcttcggacatcctgcagcccaaaggagatgatgtggcccggatcagctggtacctccgtgacatcatcactcgataccaggagaccttcaacgtcatcgagaggtgccccaagcccgtgattgctgccgtccatgggggctgcattggcggagggccttgtcccgcctcatccacagaaagggaggatgggcgatgacagttgtttctatgccttctgacccagtttcccagtttataactttatgacaatgagtttctcaagcccaaggccttatcttcaccccacaaacaataaagcaaagtaaagaa

SEQ ID NO: 440315 - DNA, 786 bp, Homo sapiens
ttatagcagatgtaggacggggagggctatccggggtcacgaagggcccgagtcccctaaattcaggggtgcgtgtgctcccttttgaaggactccctaattcgataggcctgtgtcttgcagtctggggtcatcaaaggctgttcctttctccccaggactgacaggctccaactacccgggactcagtattagccttcgcctcactggctcctctgcacaagaggcggcttccggagtagccctcggtgaagccccagaccacagctatgagtcccttcgtgtgacgtctgcgcagaaacatgttctgcatgtccagctcaaccggcccaacaagaggaatgccatgaacaaggtcttctggagagagatggtagagtgcttcaacaagatttcgagagacgctgactgtcgggcggtggtgatctctggtgcaggaaaaatgttcactgcaggtattgacctgatggacatggcttcggacatcctgcagcccaaaggagatgatgtggcccggatcagctggtacctccgtgacatcatcactcgataccaggagaccttcaacgtcatcgagaggtgccccaagcccgtgattgctgccgtccatgggggctgcattggcggagggccttgtcccgcctcatccacagaaagggaggatgggcgatgacagttgtttctatgccttctgacccagtttcccagtttataactttatgacaatgagtttctcaagcccaaggccttatcttcaccccacaaacaataaagcaaagtaaagaa

SEQ ID NO: 440316 - DNA, 749 bp, Homo sapiens
aaggctagtagaggctgggttaatcggacgagggtcatcgagaggtgccccaagcccgtgattgctgccgtccatgggggctgcattggcggaggtgtggaccttgtcaccgcctgtgacatccggtactgtgcccaggatgctttcttccaggtgaaggaggtggacgtgggtttggctgccgatgtaggaacactgcagcgcctgcccaaggtcatcgggaaccagagcctggtcaacgagctggccttcaccgcccgcaagatgatggctgacgaggccctgggcagtgggctggtcagccgggtgttcccagacaaagaggtcatgctggatgctgccttagcgctggcggccgagatttccagcaagagccccgtggcggtgcagagcaccaaggtcaacctgctgtattcccgcgaccattcggtggccgagagcctcaactacgtggcgtcctggaacatgagcatgctgcagacccaagacctcgtgaagtcggtccaggccacgactgagaacaaggaactgaaaaccgtcaccttctccaagctctgagagccctcgcgtcccaggccccagccagggggccggccttgtcccgcctcatccacagaaagggaggatgggcgatgacagttgtttctatgccttctgacccagtttcccagtttataactttatgacaatgagtttctcaagcccaaggccttatcttcaccccacaaacaataaagcaaagtaaagaa

SEQ ID NO: 440317 - DNA, 916 bp, Homo sapiens
gctattttctttggccaggttcccactggggcaaagggtccatttctgagcctggctctatgtaaggcaaccggaaatcgactgcccttagtaaagatggcggaaagaacggcgtcattgcctgtcaggttgcggcatcggtgccctcgctcaacatggcggccttctgtgcccgccccctccgctaacgggcacgttactccgtccgaacgcagtagacgaaggcggcggcgatggcggcggggatagtggcttctcgcagactccgcgacctactgacccggcgactgacaggctccaactacccgggactcagtattagccttcgcctcactggctcctctgcacaagaggcggcttccggagtagccctcggtgaagccccagaccacagctatgagtcccttcgtgtgacgtctgcgcagaaacatgttctgcatgtccagctcaaccggcccaacaagaggaatgccatgaacaaggtcttctggagagagatggtagagtgcttcaacaagatttcgagagacgctgactgtcgggcggtggtgatctctggtgcaggaaaaatgttcactgcaggtattgacctgatggacatggcttcggacatcctgcaggcgtcctggaacatgagcatgctgcagacccaagacctcgtgaagtcggtccaggccacgactgagaacaaggaactgaaaaccgtcaccttctccaagctctgagagccctcgcgtcccaggccccagccagggggccggccttgtcccgcctcatccacagaaagggaggatgggcgatgacagttgtttctatgccttctgacccagtttcccagtttataactttatgacaatgagtttctcaagcccaaggccttatcttcaccccacaaacaataaagcaaagtaaagaa

SEQ ID NO: 440318 - DNA, 1381 bp, Homo sapiens
gctattttctttggccaggttcccactggggcaaagggtccatttctgagcctggctctatgtaaggcaaccggaaatcgactgcccttagtaaagatggcggaaagaacggcgtcattgcctgtcaggttgcggcatcggtgccctcgctcaacatggcggccttctgtgcccgccccctccgctaacgggcacgttactccgtccgaacgcagtagacgaaggcggcggcgatggcggcggggatagtggcttctcgcagactccgcgacctactgacccggcgactgacaggctccaactacccgggactcagtattagccttcgcctcactggctcctctgcacaagaggcggcttccggagtagccctcggtgaagccccagaccacagctatgagtcccttcgtgtgacgtctgcgcagaaacatgttctgcatgtccagctcaaccggcccaacaagaggaatgccatgaacaaggtcttctggagagagatggtagagtgcttcaacaagatttcgagagacgctgactgtcgggcggtggtgatctctggtgcaggaaaaatgttcactgcaggtattgacctgatggacatggcttcggacatcctgcagcccaaaggagatgatgtggcccggatcagctggtacctccgtgacatcatcactcgataccaggagaccttcaacgtcatcgagaggtgccccaagcccgtgattgctgccgtccatgggggctgcattggcggaggtgtggaccttgtcaccgcctgtgacatccggtactgtgcccaggatgctttcttccaggtgaaggaggtggacgtgggtttggctgccgatgtaggaacactgcagcgcctgcccaaggtcatcgggaaccagagcctggtcaacgagctggccttcaccgcccgcaagatgatggctgacgaggccctgggcagtgggctggtcagccgggtgttcccagacaaagaggtcatgctggatgctgccttagcgctggcggccgagatttccagcaagagccccgtggcggtgcagagcaccaaggtcaacctgctgtattcccgcgaccattcggtggccgagagcctcaactacgtggcgtcctggaacatgagcatgctgcagacccaagacctcgtgaagtcggtccaggccacgactgagaacaaggaactgaaaaccgtcaccttctccaagctctgagagccctcgcgtcccaggccccagccagggggccggccttgtcccgcctcatccacagaaagggaggatgggcgatgacagttgtttctatgccttctgacccagtttcccagtttataactttatgacatcttaatctgggcccagcctgctggtccgct

SEQ ID NO: 440319 - DNA, 1284 bp, Homo sapiens
ttatagcagatgtaggacggggagggctatccggggtcacgaagggcccgagtcccctaaattcaggggtgcgtgtgctcccttttgaaggactccctaattcgataggcctgtgtcttgcagtctggggtcatcaaaggctgttcctttctccccaggactgacaggctccaactacccgggactcagtattagccttcgcctcactggctcctctgcacaagaggcggcttccggagtagccctcggtgaagccccagaccacagctatgagtcccttcgtgtgacgtctgcgcagaaacatgttctgcatgtccagctcaaccggcccaacaagaggaatgccatgaacaaggtcttctggagagagatggtagagtgcttcaacaagatttcgagagacgctgactgtcgggcggtggtgatctctggtgcaggaaaaatgttcactgcaggtattgacctgatggacatggcttcggacatcctgcagcccaaaggagatgatgtggcccggatcagctggtacctccgtgacatcatcactcgataccaggagaccttcaacgtcatcgagaggtgccccaagcccgtgattgctgccgtccatgggggctgcattggcggaggtgtggaccttgtcaccgcctgtgacatccggtactgtgcccaggatgctttcttccaggtgaaggaggtggacgtgggtttggctgccgatgtaggaacactgcagcgcctgcccaaggtcatcgggaaccagagcctggtcaacgagctggccttcaccgcccgcaagatgatggctgacgaggccctgggcagtgggctggtcagccgggtgttcccagacaaagaggtcatgctggatgctgccttagcgctggcggccgagatttccagcaagagccccgtggcggtgcagagcaccaaggtcaacctgctgtattcccgcgaccattcggtggccgagagcctcaactacgtggcgtcctggaacatgagcatgctgcagacccaagacctcgtgaagtcggtccaggccacgactgagaacaaggaactgaaaaccgtcaccttctccaagctctgagagccctcgcgtcccaggccccagccagggggccggccttgtcccgcctcatccacagaaagggaggatgggcgatgacagttgtttctatgccttctgacccagtttcccagtttataactttatgacaatgagtttctcaagcccaaggccttatcttcaccccacaaacaataaagcaaagtaaagaa

SEQ ID NO: 440320 - DNA, 1203 bp, Homo sapiens
gctattttctttggccaggttcccactggggcaaagggtccatttctgagcctggctctatgtaaggcaaccggaaatcgactgcccttagtaaagatggcggaaagaacggcgtcattgcctgtcaggttgcggcatcggtgccctcgctcaacatggcggccttctgtgcccgccccctccgctaacgggcacgttactccgtccgaacgcagtagacgaaggcggcggcgatggcggcggggatagtggcttctcgcagactccgcgacctactgacccggcagagatggtagagtgcttcaacaagatttcgagagacgctgactgtcgggcggtggtgatctctggtgcaggaaaaatgttcactgcaggtattgacctgatggacatggcttcggacatcctgcagcccaaaggagatgatgtggcccggatcagctggtacctccgtgacatcatcactcgataccaggagaccttcaacgtcatcgagaggtgccccaagcccgtgattgctgccgtccatgggggctgcattggcggaggtgtggaccttgtcaccgcctgtgacatccggtactgtgcccaggatgctttcttccaggtgaaggaggtggacgtgggtttggctgccgatgtaggaacactgcagcgcctgcccaaggtcatcgggaaccagagcctggtcaacgagctggccttcaccgcccgcaagatgatggctgacgaggccctgggcagtgggctggtcagccgggtgttcccagacaaagaggtcatgctggatgctgccttagcgctggcggccgagatttccagcaagagccccgtggcggtgcagagcaccaaggtcaacctgctgtattcccgcgaccattcggtggccgagagcctcaactacgtggcgtcctggaacatgagcatgctgcagacccaagacctcgtgaagtcggtccaggccacgactgagaacaaggaactgaaaaccgtcaccttctccaagctctgagagccctcgcgtcccaggccccagccagggggccggccttgtcccgcctcatccacagaaagggaggatgggcgatgacagttgtttctatgccttctgacccagtttcccagtttataactttatgacaatgagtttctcaagcccaaggccttatcttcaccccacaaacaataaagcaaagtaaagaa

SEQ ID NO: 440321 - DNA, 1687 bp, Homo sapiens
gctattttctttggccaggttcccactggggcaaagggtccatttctgagcctggctctatgtaaggcaaccggaaatcgactgcccttagtaaagatggcggaaagaacggcgtcattgcctgtcaggttgcggcatcggtgccctcgctcaacatggcggccttctgtgcccgccccctccgctaacgggcacgttactccgtccgaacgcagtagacgaaggcggcggcgatggcggcggggatagtggcttctcgcagactccgcgacctactgacccggcgactgacaggctccaactacccgggactcagtattagccttcgcctcactggctcctctgcacaagaggcggcttccggagtagccctcggtgaagccccagaccacagctatgagtcccttcgtgtgacgtctgcgcagaaacatgttctgcatgtccagctcaaccggcccaacaagaggaatgccatgaacaaggtcttctggagagagatggtagagtgcttcaacaagatttcgagagacgctgactgtcgggcggtggtgatctctggtgcaggaaaaatgttcactgcaggtattgacctgatggacatggcttcggacatcctgcagcccaaaggagatgatgtggcccggatcagctggtacctccgtgacatcatcactcgataccaggagaccttcaacgtcatcgagaggtgccccaagcccgtgattgctgccgtccatgggggctgcattggcggaggtgtggaccttgtcaccgcctgtgacatccggtactgtgcccaggatgctttcttccaggtgaaggaggtggacgtgggtttggctgccgatgtaggaacactgcagcgcctgcccaaggtcatcgggaaccagagcctggtcaacgagctggccttcaccgcccgcaagatgatggctgacgaggccctgggcagtgggctggtcaggtagggccatggccgtggtagctcagtgctgggggcagccaggcctggagggttggaggcctctccgggtccccttgtctcctcgctctagaattcctagtggcatcctttcttggtgagctcatttctttattgtggggtcagccccctgctctgattgggctgtttctctggggtcttgggccttcctctgtgagtggccacttcttcatctgcgggaggctggaggagagagcccttcccagcccacccggtccctgatctctttcactgcagccgggtgttcccagacaaagaggtcatgctggatgctgccttagcgctggcggccgagatttccagcaagagccccgtggcggtgcagagcaccaaggtcaacctgctgtattcccgcgaccattcggtggccgagagcctcaactacgtggcgtcctggaacatgagcatgctgcagacccaagacctcgtgaagtcggtccaggccacgactgagaacaaggaactgaaaaccgtcaccttctccaagctctgagagccctcgcgtcccaggccccagccagggggccggccttgtcccgcctcatccacagaaagggaggatgggcgatgacagttgtttctatgccttctgacccagtttcccagtttataactttatgacaatgagtttctcaagcccaaggccttatcttcaccccacaaacaataaagcaaagtaaagaa

SEQ ID NO: 440322 - DNA, 1171 bp, Homo sapiens
gctattttctttggccaggttcccactggggcaaagggtccatttctgagcctggctctatgtaaggcaaccggaaatcgactgcccttagtaaagatggcggaaagaacggcgtcattgcctgtcaggttgcggcatcggtgccctcgctcaacatggcggccttctgtgcccgccccctccgctaacgggcacgttactccgtccgaacgcagtagacgaaggcggcggcgatggcggcggggatagtggcttctcgcagactccgcgacctactgacccggcgactgacaggctccaactacccgggactcagtattagccttcgcctcactggctcctctgcacaagaggcggcttccggagtagccctcggtgaagccccagaccacagctatgagtcccttcgtgtgacgtctgcgcagaaacatgttctgcatgtccagctcaaccggcccaacaagaggtgccccaagcccgtgattgctgccgtccatgggggctgcattggcggaggtgtggaccttgtcaccgcctgtgacatccggtactgtgcccaggatgctttcttccaggtgaaggaggtggacgtgggtttggctgccgatgtaggaacactgcagcgcctgcccaaggtcatcgggaaccagagcctggtcaacgagctggccttcaccgcccgcaagatgatggctgacgaggccctgggcagtgggctggtcagccgggtgttcccagacaaagaggtcatgctggatgctgccttagcgctggcggccgagatttccagcaagagccccgtggcggtgcagagcaccaaggtcaacctgctgtattcccgcgaccattcggtggccgagagcctcaactacgtggcgtcctggaacatgagcatgctgcagacccaagacctcgtgaagtcggtccaggccacgactgagaacaaggaactgaaaaccgtcaccttctccaagctctgagagccctcgcgtcccaggccccagccagggggccggccttgtcccgcctcatccacagaaagggaggatgggcgatgacagttgtttctatgccttctgacccagtttcccagtttataactttatgacaatgagtttctcaagcccaaggccttatcttcaccccacaaacaataaagcaaagtaaagaa

SEQ ID NO: 440323 - DNA, 467 bp, Homo sapiens
taaactcagccggtaccagcaggcttgggcccagattaagatgtcatgctggatgctgccttagcgctggcggccgagatttccagcaagagccccgtggcggtgcagagcaccaaggtcaacctgctgtattcccgcgaccattcggtggccgagagcctcaactacgtggcgtcctggaacatgagcatgctgcagacccaagacctcgtgaagtcggtccaggccacgactgagaacaaggaactgaaaaccgtcaccttctccaagctctgagagccctcgcgtcccaggccccagccagggggccggccttgtcccgcctcatccacagaaagggaggatgggcgatgacagttgtttctatgccttctgacccagtttcccagtttataactttatgacaatgagtttctcaagcccaaggccttatcttcaccccacaaacaataaagcaaagtaaagaa

SEQ ID NO: 440324 - DNA, 758 bp, Homo sapiens
gctattttctttggccaggttcccactggggcaaagggtccatttctgagcctggctctatgtaaggcaaccggaaatcgactgcccttagtaaagatggcggaaagaacggcgtcattgcctgtcaggttgcggcatcggtgccctcgctcaacatggcggccttctgtgcccgccccctccgctaacgggcacgttactccgtccgaacgcagtagacgaaggcggcggcgatggcggcggggatagtggcttctcgcagactccgcgacctactgacccggcgactgacaggctccaactacccgggactcagtattagccttcgcctcactggctcctctgcacaagaggcggcttccggagtagccctcggtgaagccccagaccacagctatgagtcccttcgtgtgacgtctgcgcagaaacatgttctgcatgtccagctcaaccggcccaacaagaggaatgccatgaacaaggtcttctggagagagatggtagagtgcttcaacaagatttcgagagacgctgactgtcgggcggtggtgatctctggtgcaggaaaaatgttcactgcagaggtaccagacgctcttcacacaccctgccagccttcctagctcctggcaatagacagtggagcagtgcttctgaattagggttttaagcagcttctgacttacacactttttttttttttttttgagacggggtcttgctctgttgccacgctggagtgcagtagcgcaatctca

SEQ ID NO: 440325 - DNA, 2561 bp, Homo sapiens
ggcgcgcgcgtcgggaagatggcgctacgtctgctgcggagggcggcgcgcggagctgcggcggcggcgctgctgaggctgaaagcgtctctagcagctgatatccccagacttggatatagttcctcatcccatcacaagtacatcccccggagggcagtgctttatgtacctggaaatgatgaaaagaaaataaagaagattccatccctgaatgtagattgtgcagtgctcgactgtgaggatggagtggctgcaaacaaaaagaatgaagctcgactgagaattgtaaaaactcttgaagacattgatctgggccctactgaaaaatgtgtgagagtcaactcagtttccagtggtctggcggaagaagacctagagacccttttgcaatcccgggtccttccttccagcctgatgctaccaaaggtggaaagtcctgaagaaatccagtggtttgcagacaaattttcattccacttaaaaggccgaaaacttgaacaaccaatgaatttaatcccttttgtggaaactgcaatgggtttgctcaattttaaggcagtgtgtgaagaaaccctgaaggtcgggcctcaagtaggtctctttctagatgcagtcgtttttggaggagaagactttcgagccagcataggtgcaacaagtagtaaagaaaccctggatattctctacgcccggcaaaagattgttgtcatagcgaaagcctttggtctccaagccgtagatctggtgtacattgactttcgagatggagctgggctgcttagacagtcacgagaaggagccgccatgggcttcactggtaagcaggtgattcaccctaaccaaattgccgtggtccaggagcagttttctccttcccctgaaaaaattaagtgggctgaagaactgattgctgcctttaaagaacatcaacaattaggaaagggggcctttactttccaagggagtatgatcgacatgccattactgaagcaggcccagaacactgttacgcttgccacctccatcaaggaaaaatgatctgttaaatgaagctgtcatcaggtgggctgaacatatacagtggggttcttaaagacaaaccacaatactcaaagcaacttgttaggatgccagattgggacctgactccatttacagttcatgttaatcacaattttgttgttgttgtctcactggccagttattcccctaaaaaaatgaacgcttttccctttggatccaagcttatgattttatcatttttagtgtattacgaatatgggcttatgatttcacagggaggtaagatcctggggaaagatgggctgtgaggcgaaggtaggtctttaatgaaatggatctttcccaaatagacatattccctccacccttctcatgttagtaaatgtttcctgcttgttcatttatacagctgacaccacaaataattttaagaaaagccaggcctttaaaacatagtagcaacattaaggggtcatctctatttcactagtaatctgataaaacaacagagatggcatcaaaaaagaatactaagtattatattggcttaaaaagacactttctgaaaataaactttcgaaactggttactattaacctccacccctaaaacgaaacatccatctccttgaaccgctagacgatgaacacgaaagctgtcatcctgggtgaatgctgtgagtcaaccattaccggcaattaaaaaataaatgtgcagaaacacaagaccaaaaaaaaaaaaaaaaaaaaaaaaaaaaaaaaaaaaaaaaaaaaaaaaaaaaaaaaaaaaaaaaaaaaaaaaaaaaaaagcaaagaagagagcgagcgaggcgggaacgatatagcattctttgccagggtgagcgtaatcatagacagacccaaagcaatacgaaaagagagagacgagaacaaatgaaaaacaaagattacaagagagaagaagaacaggaacgaacataagaaaaggagacgagagaagagcaaaagaagagagaagagagaataagaaaaaaagaacacacacaggtcgaagaaagaggaaagagaaggacaaataaagaaaaagaggtaataagaacacagagaaaaaaaaaataaacaaaggaaaaatgaaaaaataaaaggaaaaaagaagagaacgaaaaataaggaggagcatgaagcaaaaaatacaacacggaaagaaagaaacatagaaaaaggccagacacgtgaaaagtaaacagacagaaaagagaaaaaggaagaataacaaaaaaaacaagacaaacagaaaaaaaaagaaagaagaaaacaaaacaaagagagagacaaaaaaacaagaagaaaaaaagaaaagaagagaacagagacagagagagaaaaaaagaaaagactagataaagagacacaagaaaaaatagagagaaaaaaaaaaagagaaagagaagagagcaaacagaaaaagaagacaagcagaaaaaagagaaaaactaagaaaaggaataaaaaaaaaaagacaaaatgaaaaaaaagataagagatataagacaa

SEQ ID NO: 440326 - DNA, 1193 bp, Homo sapiens
ggcgcgcgcgtcgggaagatggcgctacgtctgctgcggagggcggcgcgcggagctgcggcggcggcgctgctgaggctgaaagcgtctctagcagctgatatccccagacttggatatagttcctcatcccatcacaagtacatcccccggagggcagtgctttatgtacctggaaatgatgaaaagaaaataaagaagattccatccctgaatgtagattgtgcagtgctcgactgtgaggatggagtggctgcaaacaaaaagaatgaagctcgactgagaattgtaaaaactcttgaagacattgatctgggccctactgaaaaatgtgtgagagtcaactcagtttccagtggtctggcggaagaagacctagagacccttttgcaatcccgggtccttccttccagcctgatgctaccaaaggtggaaagtcctgaagaaatccagtggtttgcagacaaattttcattccacttaaaaggccgaaaacttgaacaaccaatgaatttaatcccttttgtggaaactgcaatgggtttgctcaattttaaggcagtgtgtgaagaaaccctgaaggtcgggcctcaagtaggtctctttctagatgcagtcgtttttggaggagaagactttcgagccagcataggtgcaacaagtagtaaagaaaccctggatattctctacgcccggcaaaagattgttgtcatagcgaaagcctttggtctccaagccgtagatctggtgtacattgactttcgagatggagctgggctgcttagacagtcacgagaaggagccgccatgggcttcactggtaagcaggtgattcaccctaaccaaattgccgtggtccaggagcagttttctccttcccctgaaaaaattaagtgggctgaagaactgattgctgcctttaaagaacatcaacaattaggaaagggggcctttactttccaagggagtatgatcgacatgccattactgaagcaggcccagaacactgttacgcttgccacctccatcaaggaaaaatgatctgttaaatgaagctgtcatcaggctaaagggtattgaagctgcagagggatcaacttgtgcttgccagaggacgccaatgaagtttgaaacaccaacaatcagagattttgtttctgttcctcattaaatcatgagcttttgtgccgaga

SEQ ID NO: 440327 - DNA, 2231 bp, Homo sapiens
ggcgcgcgcgtcgggaagatggcgctacgtctgctgcggagggcggcgcgcggagctgcggcggcggcgctgctgaggctgaaagcgtctctagcagctgatatccccagacttggatatagttcctcatcccatcacaagtacatcccccggagggcagtgctttatgtacctggaaatgatgaaaagaaaataaagaagattccatccctgaatgtagattgtgcagtgctcgactgtgaggatggagtggctgcaaacaaaaagaatgaagctcgactgagaattgtaaaaactcttgaagacattgatctgggccctactgaaaaatgtgtgagagtcaactcagtttccagtggtctggcggaagaagacctagagacccttttgcaatcccgggtccttccttccagcctgatgctaccaaaggtggaaagtcctgaagaaatccagtggtttgcagacaaattttcattccacttaaaaggccgaaaacttgaacaaccaatgaatttaatcccttttgtggaaactgcaatgggtttgctcaattttaaggcagtgtgtgaagaaaccctgaaggtcgggcctcaagtaggtctctttctagatgcagtcgtttttggaggagaagactttcgagccagcataggtgtcaaagacatctctctctctctttttctgtgtgcaacaagtagtaaagaaaccctggatattctctacgcccggcaaaagattgttgtcatagcgaaagcctttggtctccaagccgtagatctggtgtacattgactttcgagatggagctgggctgcttagacagtcacgagaaggagccgccatgggcttcactggtaagcaggtgattcaccctaaccaaattgccgtggtccaggagcagttttctccttcccctgaaaaaattaagtgggctgaagaactgattgctgcctttaaagaacatcaacaattaggaaagggggcctttactttccaagggagtatgatcgacatgccattactgaagcaggcccagaacactgttacgcttgccacctccatcaaggaaaaatgatctgttaaatgaagctgtcatcaggtgggctgaacatatacagtggggttcttaaagacaaaccacaatactcaaagcaacttgttaggatgccagattgggacctgactccatttacagttcatgttaatcacaattttgttgttgttgtctcactggccagttattcccctaaaaaaatgaacgcttttccctttggatccaagcttatgattttatcatttttagtgtattacgaatatgggcttatgatttcacagggaggtaagatcctggggaaagatgggctgtgaggcgaaggtaggtctttaatgaaatggatctttcccaaatagacatattccctccacccttctcatgttagtaaatgtttcctgcttgttcatttatacagctgacaccacaaataattttaagaaaagccaggcctttaaaacatagtagcaacattaaggggtcatctctatttcactagtaatctgataaaacaacagagatggcatcaaaaaagaatactaagtattatattggcttaaaaagacactttctgaaaataaactttcgaaactggttactattaacctccacccctaaaacgaaacatccatctccttgaaccgctagacgatgaacacgaaagctgtcatcctgggtgaatgctgtgagtcaaccattaccggcaattaaaaaataaatgtgcagaaacacaagaccatccattctccccctttattttcccgtttaactgtttgccattgaggctatttccccctggaaatgtatggctgggacaggactccctcagtcataaacttgtagcgtctcagaagacacaatgcacccgagctggtgcatgtggcccctgcgagatttgcatcacattagagatgcggctgcaggtcagatgggtggtgtggttaacgggcttagtaaagctgttttgaagaggttaacccagcttgtagtaagggtaaataaacataacaaccagccattgttccctattcagcatgtactcttatattgaaggctaaagggtattgaagctgcagagggatcaacttgtgcttgccagaggacgccaatgaagtttgaaacaccaacaatcagagattttgtttctgttcctcattaaatcatgagcttttgtgccgaga

SEQ ID NO: 440328 - DNA, 1115 bp, Homo sapiens
ggcgcgcgcgtcgggaagatggcgctacgtctgctgcggagggcggcgcgcggagctgcggcggcggcgctgctgaggctgaaagcgtctctagcagctgatatccccagacttggatatagttcctcatcccatcacaagtacatcccccggagggcagtgctttatgtacctggaaatgatgaaaagaaaataaagaagattccatccctgaatgtagattgtgcagtgctcgactgtgaggatggagtggctgcaaacaaaaagaatgaagctcgactgagaattgtaaaaactcttgaagacattgatctgggccctactgaaaaatgtgtgagagtcaactcagtttccagtggtctggcggaagaagacctagagacccttttgcaatcccgggtccttccttccagcctgatgctaccaaaggtggaaagtcctgaagaaatccagtggtttgcagacaaattttcattccacttaaaaggccgaaaacttgaacaaccaatgaatttaatcccttttgtggaaactgcaatgggtttgctcaattttaaggcagtgtgtgaagaaaccctgaaggtcgggcctcaagtaggtctctttctagatgcagtcgtttttggaggagaagactttcgagccagcataggtgcaacaagtagtaaagaaaccctggatattctctacgcccggcaaaagattgttgtcatagcgaaagcctttggtctccaagccgtagatctggtgtacattgactttcgagatggagctgggctgcttagacagtcacgagaaggagccgccatgggcttcactggtaagcaggtgattcaccctaaccaaattgccgtggtccaggagcagttttctccttcccctgaaaaaattaagtgggctgaagaactgattgctgcctttaaagaacatcaacaattaggaaagggggcctttactttccaagggagtatgatcgacatgccattactgaagcaggcccagaacactgttacgcttgccacctccatcaaggaaaaatgatctgttaaatgaagctgtcatcaggaagcccgagaggtgaggagctgaggttagacaccaggagaggcaccatc

SEQ ID NO: 440329 - DNA, 1492 bp, Homo sapiens
tgtgtccgatgtgtttctcctctccattaaaatgctgaagatttttatttttttcccctctttagggggaaaaaagaagtgtttcctctgtaatttactttggctttctcaaaagttgggcgggaaagtcagtataattcaggtggaatctaaaatgttcttgttgcacaagtgtgcacagaaaggaaacctataacttcgagtattctttcaggaagtttgtattctctgttttccagggggcctttactttccaagggagtatgatcgacatgccattactgaagcaggcccagaacactgttacgcttgccacctccatcaaggaaaaatgatctgttaaatgaagctgtcatcaggtgggctgaacatatacagtggggttcttaaagacaaaccacaatactcaaagcaacttgttaggatgccagattgggacctgactccatttacagttcatgttaatcacaattttgttgttgttgtctcactggccagttattcccctaaaaaaatgaacgcttttccctttggatccaagcttatgattttatcatttttagtgtattacgaatatgggcttatgatttcacagggaggtaagatcctggggaaagatgggctgtgaggcgaaggtaggtctttaatgaaatggatctttcccaaatagacatattccctccacccttctcatgttagtaaatgtttcctgcttgttcatttatacagctgacaccacaaataattttaagaaaagccaggcctttaaaacatagtagcaacattaaggggtcatctctatttcactagtaatctgataaaacaacagagatggcatcaaaaaagaatactaagtattatattggcttaaaaagacactttctgaaaataaactttcgaaactggttactattaacctccacccctaaaacgaaacatccatctccttgaaccgctagacgatgaacacgaaagctgtcatcctgggtgaatgctgtgagtcaaccattaccggcaattaaaaaataaatgtgcagaaacacaagaccatccattctccccctttattttcccgtttaactgtttgccattgaggctatttccccctggaaatgtatggctgggacaggactccctcagtcataaacttgtagcgtctcagaagacacaatgcacccgagctggtgcatgtggcccctgcgagatttgcatcacattagagatgcggctgcaggtcagatgggtggtgtggttaacgggcttagtaaagctgttttgaagaggttaacccagcttgtagtaagggtaaataaacataacaaccagccattgttccctattcagcatgtactcttatattgaaggctaaagggtattgaagctgcagagggatcaacttgtgcttgccagaggacgccaatgaagtttgaaacaccaacaatcagagattttgtttctgttcctcattaaatcatgagcttttgtgccgaga

SEQ ID NO: 440330 - DNA, 986 bp, Homo sapiens
ggcgcgcgcgtcgggaagatggcgctacgtctgctgcggagggcggcgcgcggagctgcggcggcggcgctgctgaggctgaaagcgtctctagcagctgatatccccagacttggatatagttcctcatcccatcacaagtacatcccccggagggcagtgctttatgtacctggaaatgatgaaaagaaaataaagaagattccatccctgaatgtagattgtgcagtgctcgactgtgaggatggagtggctgcaaacaaaaagaatgaagctcgactgagaattgtaaaaactcttgaagacattgatctgggccctactgaaaaatgtgtgagagtcaactcagtttccagtggtctggcggaagaagacctagagacccttttgcaatcccgggtccttccttccagcctgatgctaccaaaggtggaaagtcctgaagaaatccagtggtttgcagacaaattttcattccacttaaaaggccgaaaacttgaacaaccaatgaatttaatcccttttgtggaaactgcaatgggtttgctcaattttaaggcagtgtgtgaagaaaccctgaaggtcgggcctcaagtaggtctctttctagatgcagtcgtttttggaggagaagactttcgagccagcataggtgtcaaagacatctctctctctctttttctgtgtgtgtgtgtgtatatgtgtgtatatattttttctttgcccctcaaggatggacatttacataacaatgtatatttgccaaccatgacaatggtttttcatgacaatggaatggacactacttcctgataatttagggctcctcatagctgccctgcttctagagcactgcattattacttctgttcatttataaaagacacgagcaatagaaagcctgttgcagccccaggcatgctcaggaatatatggcatctcctttgctcctaataaatatattatgtgaacagcctcaccgttgc

SEQ ID NO: 440331 - DNA, 2198 bp, Homo sapiens
ggcgcgcgcgtcgggaagatggcgctacgtctgctgcggagggcggcgcgcggagctgcggcggcggcgctgctgaggctgaaagcgtctctagcagctgatatccccagacttggatatagttcctcatcccatcacaagtacatcccccggagggcagtgctttatgtacctggaaatgatgaaaagaaaataaagaagattccatccctgaatgtagattgtgcagtgctcgactgtgaggatggagtggctgcaaacaaaaagaatgaagctcgactgagaattgtaaaaactcttgaagacattgatctgggccctactgaaaaatgtgtgagagtcaactcagtttccagtggtctggcggaagaagacctagagacccttttgcaatcccgggtccttccttccagcctgatgctaccaaaggtggaaagtcctgaagaaatccagtggtttgcagacaaattttcattccacttaaaaggccgaaaacttgaacaaccaatgaatttaatcccttttgtggaaactgcaatgggtttgctcaattttaaggcagtgtgtgaagaaaccctgaaggtcgggcctcaagtaggtctctttctagatgcagtcgtttttggaggagaagactttcgagccagcataggtgcaacaagtagtaaagaaaccctggatattctctacgcccggcaaaagattgttgtcatagcgaaagcctttggtctccaagccgtagatctggtgtacattgactttcgagatggagctgggctgcttagacagtcacgagaaggagccgccatgggcttcactggtaagcaggtgattcaccctaaccaaattgccgtggtccaggagcagttttctccttcccctgaaaaaattaagtgggctgaagaactgattgctgcctttaaagaacatcaacaattaggaaagggggcctttactttccaagggagtatgatcgacatgccattactgaagcaggcccagaacactgttacgcttgccacctccatcaaggaaaaatgatctgttaaatgaagctgtcatcaggtgggctgaacatatacagtggggttcttaaagacaaaccacaatactcaaagcaacttgttaggatgccagattgggacctgactccatttacagttcatgttaatcacaattttgttgttgttgtctcactggccagttattcccctaaaaaaatgaacgcttttccctttggatccaagcttatgattttatcatttttagtgtattacgaatatgggcttatgatttcacagggaggtaagatcctggggaaagatgggctgtgaggcgaaggtaggtctttaatgaaatggatctttcccaaatagacatattccctccacccttctcatgttagtaaatgtttcctgcttgttcatttatacagctgacaccacaaataattttaagaaaagccaggcctttaaaacatagtagcaacattaaggggtcatctctatttcactagtaatctgataaaacaacagagatggcatcaaaaaagaatactaagtattatattggcttaaaaagacactttctgaaaataaactttcgaaactggttactattaacctccacccctaaaacgaaacatccatctccttgaaccgctagacgatgaacacgaaagctgtcatcctgggtgaatgctgtgagtcaaccattaccggcaattaaaaaataaatgtgcagaaacacaagaccatccattctccccctttattttcccgtttaactgtttgccattgaggctatttccccctggaaatgtatggctgggacaggactccctcagtcataaacttgtagcgtctcagaagacacaatgcacccgagctggtgcatgtggcccctgcgagatttgcatcacattagagatgcggctgcaggtcagatgggtggtgtggttaacgggcttagtaaagctgttttgaagaggttaacccagcttgtagtaagggtaaataaacataacaaccagccattgttccctattcagcatgtactcttatattgaaggctaaagggtattgaagctgcagagggatcaacttgtgcttgccagaggacgccaatgaagtttgaaacaccaacaatcagagattttgtttctgttcctcattaaatcatgagcttttgtgccgaga

SEQ ID NO: 440332 - DNA, 2327 bp, Homo sapiens
ggcgcgcgcgtcgggaagatggcgctacgtctgctgcggagggcggcgcgcggagctgcggcggcggcgctgctgaggctgaaagcgtctctagcagctgatatccccagacttggatatagttcctcatcccatcacaagtacatcccccggagggcagtgctttatgtacctggaaatgatgaaaagaaaataaagaagattccatccctgaatgtagattgtgcagtgctcgactgtgaggatggagtggctgcaaacaaaaagaatgaagctcgactgagaattgtaaaaactcttgaagacattgatctgggccctactgaaaaatgtgtgagagtcaactcagtttccagtggtctggcggaagaagacctagagacccttttgcaatcccgggtccttccttccagcctgatgctaccaaaggtggaaagtcctgaagaaatccagtggtttgcagacaaattttcattccacttaaaaggccgaaaacttgaacaaccaatgaatttaatcccttttgtggaaactgcaatgggtttgctcaattttaaggcagtgtgtgaagaaaccctgaaggtcgggcctcaagtaggtctctttctagatgcagtcgtttttggaggagaagactttcgagccagcataggtgcaacaagtagtaaagaaaccctggatattctctacgcccggcaaaagattgttgtcatagcgaaagcctttggtctccaagccgtagatctggtgtacattgactttcgagatggagctgggctgcttagacagtcacgagaaggagccgccatgggcttcactggtaagcaggtgattcaccctaaccaaattgccgtggtccaggagcagttttctccttcccctgaaaaaattaagtgggctgaagaactgattgctgcctttaaagaacatcaacaattaggaaaggtaggtcggtattgctgctcttggctttgcattcagccttttccatcatcaccaggtcagcggtcacagagcatctcccgtgtacctggcaggtactgggtgctgggtgccaggtcctgggagtcaaagggggcctttactttccaagggagtatgatcgacatgccattactgaagcaggcccagaacactgttacgcttgccacctccatcaaggaaaaatgatctgttaaatgaagctgtcatcaggtgggctgaacatatacagtggggttcttaaagacaaaccacaatactcaaagcaacttgttaggatgccagattgggacctgactccatttacagttcatgttaatcacaattttgttgttgttgtctcactggccagttattcccctaaaaaaatgaacgcttttccctttggatccaagcttatgattttatcatttttagtgtattacgaatatgggcttatgatttcacagggaggtaagatcctggggaaagatgggctgtgaggcgaaggtaggtctttaatgaaatggatctttcccaaatagacatattccctccacccttctcatgttagtaaatgtttcctgcttgttcatttatacagctgacaccacaaataattttaagaaaagccaggcctttaaaacatagtagcaacattaaggggtcatctctatttcactagtaatctgataaaacaacagagatggcatcaaaaaagaatactaagtattatattggcttaaaaagacactttctgaaaataaactttcgaaactggttactattaacctccacccctaaaacgaaacatccatctccttgaaccgctagacgatgaacacgaaagctgtcatcctgggtgaatgctgtgagtcaaccattaccggcaattaaaaaataaatgtgcagaaacacaagaccatccattctccccctttattttcccgtttaactgtttgccattgaggctatttccccctggaaatgtatggctgggacaggactccctcagtcataaacttgtagcgtctcagaagacacaatgcacccgagctggtgcatgtggcccctgcgagatttgcatcacattagagatgcggctgcaggtcagatgggtggtgtggttaacgggcttagtaaagctgttttgaagaggttaacccagcttgtagtaagggtaaataaacataacaaccagccattgttccctattcagcatgtactcttatattgaaggctaaagggtattgaagctgcagagggatcaacttgtgcttgccagaggacgccaatgaagtttgaaacaccaacaatcagagattttgtttctgttcctcattaaatcatgagcttttgtgccgaga

SEQ ID NO: 440333 - DNA, 2096 bp, Homo sapiens
ggcgcgcgcgtcgggaagatggcgctacgtctgctgcggagggcggcgcgcggagctgcggcggcggcgctgctgaggctgaaagcgtctctagcagctgatatccccagacttggatatagttcctcatcccatcacaagtacatcccccggagggcagtgctttatgtacctggaaatgatgaaaagaaaataaagaagattccatccctgaatgtagattgtgcagtgctcgactgtgaggatggagtggctgcaaacaaaaagaatgaagctcgactgagaattgtaaaaactcttgaagacattgatctgggccctactgaaaaatgtgtgagagtcaactcagtttccagtggtctggcggaagaagacctagagacccttttgcaatcccgggtccttccttccagcctgatgctaccaaaggtggaaagtcctgaagaaatccagtgggcagtgtgtgaagaaaccctgaaggtcgggcctcaagtaggtctctttctagatgcagtcgtttttggaggagaagactttcgagccagcataggtgcaacaagtagtaaagaaaccctggatattctctacgcccggcaaaagattgttgtcatagcgaaagcctttggtctccaagccgtagatctggtgtacattgactttcgagatggagctgggctgcttagacagtcacgagaaggagccgccatgggcttcactggtaagcaggtgattcaccctaaccaaattgccgtggtccaggagcagttttctccttcccctgaaaaaattaagtgggctgaagaactgattgctgcctttaaagaacatcaacaattaggaaagggggcctttactttccaagggagtatgatcgacatgccattactgaagcaggcccagaacactgttacgcttgccacctccatcaaggaaaaatgatctgttaaatgaagctgtcatcaggtgggctgaacatatacagtggggttcttaaagacaaaccacaatactcaaagcaacttgttaggatgccagattgggacctgactccatttacagttcatgttaatcacaattttgttgttgttgtctcactggccagttattcccctaaaaaaatgaacgcttttccctttggatccaagcttatgattttatcatttttagtgtattacgaatatgggcttatgatttcacagggaggtaagatcctggggaaagatgggctgtgaggcgaaggtaggtctttaatgaaatggatctttcccaaatagacatattccctccacccttctcatgttagtaaatgtttcctgcttgttcatttatacagctgacaccacaaataattttaagaaaagccaggcctttaaaacatagtagcaacattaaggggtcatctctatttcactagtaatctgataaaacaacagagatggcatcaaaaaagaatactaagtattatattggcttaaaaagacactttctgaaaataaactttcgaaactggttactattaacctccacccctaaaacgaaacatccatctccttgaaccgctagacgatgaacacgaaagctgtcatcctgggtgaatgctgtgagtcaaccattaccggcaattaaaaaataaatgtgcagaaacacaagaccatccattctccccctttattttcccgtttaactgtttgccattgaggctatttccccctggaaatgtatggctgggacaggactccctcagtcataaacttgtagcgtctcagaagacacaatgcacccgagctggtgcatgtggcccctgcgagatttgcatcacattagagatgcggctgcaggtcagatgggtggtgtggttaacgggcttagtaaagctgttttgaagaggttaacccagcttgtagtaagggtaaataaacataacaaccagccattgttccctattcagcatgtactcttatattgaaggctaaagggtattgaagctgcagagggatcaacttgtgcttgccagaggacgccaatgaagtttgaaacaccaacaatcagagattttgtttctgttcctcattaaatcatgagcttttgtgccgaga

SEQ ID NO: 440334 - DNA, 1218 bp, Homo sapiens
ggcgcgcgcgtcgggaagatggcgctacgtctgctgcggagggcggcgcgcggagctgcggcggcggcgctgctgaggctgaaagcgtctctagcagctgatatccccagacttggatatagttcctcatcccatcacaagtacatcccccggagggcagtgctttatgtacctggaaatgatgaaaagaaaataaagaagattccatccctgaatgtagattgtgcagtgctcgactgtgaggatggagtggctgcaaacaaaaagaatgaagctcgactgagaattgtaaaaactcttgaagacattgatctgggccctactgaaaaatgtgtgagagtcaactcagtttccagtggtctggcggaagaagacctagagacccttttgcaatcccgggtccttccttccagcctgatgctaccaaaggtggaaagtcctgaagaaatccagtggtttgcagacaaattttcattccacttaaaaggccgaaaacttgaacaaccaatgaatttaatcccttttgtggaaactgcaatgggtttgctcaattttaaggcagtgtgtgaagaaaccctgaaggtcgggcctcaagtaggtctctttctagatgcagtcgtttttggaggagaagactttcgagccagcataggtgcaacaagtagtaaagaaaccctggatattctctacgcccggcaaaagattgttgtcatagcgaaagcctttggtctccaagccgtagatctggtgtacattgactttcgagatggagctgggctgcttagacagtcacgagaaggagccgccatgggcttcactggtaagcaggtgattcaccctaaccaaattgccgtggtccaggagcagttttctccttcccctgaaaaaattaagtgggctgaagaactgattgctgcctttaaagaacatcaacaattaggaaaggaagtttgtattctctgttttccagggggcctttactttccaagggagtatgatcgacatgccattactgaagcaggcccagaacactgttacgcttgccacctccatcaaggaaaaatgatctgttaaatgaagctgtcatcaggctaaagggtattgaagctgcagagggatcaacttgtgcttgccagaggacgccaatgaagtttgaaacaccaacaatcagagattttgtttctgttcctcattaaatcatgagcttttgtgccgaga

SEQ ID NO: 440335 - DNA, 1926 bp, Homo sapiens
ttttgggcgggggggaggtttatgaagttttgctctttgaaccacagctttattatggtcctttacactggagacagacacagagacactgttcagaagatgaactaaactcagcagtggtctggtatcaagagctttctgatgttttacagcctgaatttggagggataacgatctgctgtgcctttgcagtcactgcttagcccaaagtaatagtacttttgataataactcactctgtgcgatattcctgaataagtccatctcaaaagtttgggattttcctcctcttaactttcttaatatttggacatgcagttgtcgccaaacttgggtattcatggaatttctagtaaatgaaatacctatactttgatactgaagactgccaaatacataggaattttctttcttaaaaaacagtaatgaagactatatctcctttcccagcactgaatgttttactagcactgggtgctcaccatgcaactgaagaaaatgtggaaactcaaaaggtcaggacagacttccaagcacttgcaactgatgttactgtcttcaattttaataattacacatatttgtatatttcagagaagtttttaatatttctctgtccactttttataagctttaaaatgattttctctgccttgagatttgcatcaagaaaaagcacctctcttcacctgaaagctttgaagactagagacacgctttacacgttttaacaagtatattgagtccacgtttggtagcatcagttgttgagttaaaaagaaaattattgcatttgatctggatggattttaaaagaatataatgttcaatattaaaaggataattcacatttgccaccataatgttcttttttatgtaaaaagaagaacttggagacattaacatgaaaaagtcttttatcattagctcatgtatttgaggaagagcagctgtctttttatatgttttttgacaaatcatattgtattcttttgtacaaaaaagaactacttgtattctagaagaaatatgaaatgcttaatttataagcgggctggagattttttccaatattgttttctttgaaaatgaaaggggatcatctattttagttttggggtctgggaactttttgaaaatttaatttgtggaccaatgttttgtgaaagctaaagagggcaggggttaaaatagggcttgaatttctcattctgtatagaccagcaaacttccctgtgcaaggcaagtttacatcacaaatccaagaatgtttgcatcctaaatgctagtttgcttcagcccctagttaacctcaggacttggtttgcatataaaaggtagacagctgatatgttttcatgaataaatattgtcagccagaaaaggttggtgtcaggtaatgcatatttttttaagctttgttttatatttatttttcatttagtttttattgggaatggttttcaaagaactctcagttctgcctaggtgtttttgggggagccctgttttccatagtgtaattccatttaagaggttgtctaaaagtctttttaattaatagaaagattttaatatccaagagtagtcaaattaaggatataaactttccacaccttcctgtcgtgacagataaaagcacagaaaggacaacccttgaaatcatgtaacgttggtcatttcaatattttgtacctgttttaaattctgttagtgtatttacttcattgtaaatatttttgagggtacctttgtattttgcttttgaccttggttctgtgatttggatgtcaacaacttccctaaaaagcaccagtgtgttaggttctaatgtcatgacccaatttgtgttattcatctttaatcctgttttcagtctctatgtgtacagcagtatttttaataaagaattacagagataaattt

SEQ ID NO: 440336 - DNA, 1481 bp, Homo sapiens
ctgcctgcggtcgctctagaggatccccccaatcaacatccaaccccaatcaacatccatccagatcaaatgcaataattttctttttaactcaacaactgatgttactgtcttcaattttaataattacacatatttgtatatttcagagaagtttttaatatttctctgtccactttttataagctttaaaatgattttctctgccttgagatttgcatcaagaaaaagcacctctcttcacctgaaagctttgaagactagagacacgctttacacgttttaacaagtatattgagtccacgtttggtagcatcagttgttgagttaaaaagaaaattattgcatttgatctggatggattttaaaagaatataatgttcaatattaaaaggataattcacatttgccaccataatgttcttttttatgtaaaaagaagaacttggagacattaacatgaaaaagtcttttatcattagctcatgtatttgaggaagagcagctgtctttttatatgttttttgacaaatcatattgtattcttttgtacaaaaaagaactacttgtattctagaagaaatatgaaatgcttaatttataagcgggctggagattttttccaatattgttttctttgaaaatgaaaggggatcatctattttagttttggggtctgggaactttttgaaaatttaatttgtggaccaatgttttgtgaaagctaaagagggcaggggttaaaatagggcttgaatttctcattctgtatagaccagcaaacttccctgtgcaaggcaagtttacatcacaaatccaagaatgtttgcatcctaaatgctagtttgcttcagcccctagttaacctcaggacttggtttgcatataaaaggtagacagctgatatgttttcatgaataaatattgtcagccagaaaaggttggtgtcaggtaatgcatatttttttaagctttgttttatatttatttttcatttagtttttattgggaatggttttcaaagaactctcagttctgcctaggtgtttttgggggagccctgttttccatagtgtaattccatttaagaggttgtctaaaagtctttttaattaatagaaagattttaatatccaagagtagtcaaattaaggatataaactttccacaccttcctgtcgtgacagataaaagcacagaaaggacaacccttgaaatcatgtaacgttggtcatttcaatattttgtacctgttttaaattctgttagtgtatttacttcattgtaaatatttttgagggtacctttgtattttgcttttgaccttggttctgtgatttggatgtcaacaacttccctaaaaagcaccagtgtgttaggttctaatgtcatgacccaatttgtgttattcatctttaatcctgttttcagtctctatgtgtacagcagtatttttaataaagaattacagagataaattt

SEQ ID NO: 440337 - DNA, 1149 bp, Homo sapiens
ctgcctgcggtcgctctagaggatccccccaatcaacatccaaccatgttcaatattaaaaggataattcacatttgccaccataatgttcttttttatgtaaaaagaagaacttggagacattaacatgaaaaagtcttttatcattagctcatgtatttgaggaagagcagctgtctttttatatgttttttgacaaatcatattgtattcttttgtacaaaaaagaactacttgtattctagaagaaatatgaaatgcttaatttataagcgggctggagattttttccaatattgttttctttgaaaatgaaaggggatcatctattttagttttggggtctgggaactttttgaaaatttaatttgtggaccaatgttttgtgaaagctaaagagggcaggggttaaaatagggcttgaatttctcattctgtatagaccagcaaacttccctgtgcaaggcaagtttacatcacaaatccaagaatgtttgcatcctaaatgctagtttgcttcagcccctagttaacctcaggacttggtttgcatataaaaggtagacagctgatatgttttcatgaataaatattgtcagccagaaaaggttggtgtcaggtaatgcatatttttttaagctttgttttatatttatttttcatttagtttttattgggaatggttttcaaagaactctcagttctgcctaggtgtttttgggggagccctgttttccatagtgtaattccatttaagaggttgtctaaaagtctttttaattaatagaaagattttaatatccaagagtagtcaaattaaggatataaactttccacaccttcctgtcgtgacagataaaagcacagaaaggacaacccttgaaatcatgtaacgttggtcatttcaatattttgtacctgttttaaattctgttagtgtatttacttcattgtaaatatttttgagggtacctttgtattttgcttttgaccttggttctgtgatttggatgtcaacaacttccctaaaaagcaccagtgtgttaggttctaatgtcatgacccaatttgtgttattcatctttaatcctgttttcagtctctatgtgtacagcagtatttttaataaagaattacagagataaattt

SEQ ID NO: 440338 - DNA, 5374 bp, Homo sapiens
ccagccccttccgtccgccgcgctccgccgctgtcctccgccggcccgcgtgggaggacgatgggtcagcgcggaaaaagtgaatgagggcggcagcggtggcggcggtagccagcgcctgactcggcgggcccggagcaccgcccgcgtcccggcccccggcaccatggacgcgccgcgcgcctcggcggccaagcccccgaccgggaggaagatgaaggctcgtgctcccccacctcctggaaaggctgccactctgcatgtgcacagtgaccagaagcccccccacgatggggccctcgggtcgcagcagaacttggttcgcatgaaggaggcgctgagggccagcaccatggacgtcaccgtggtcctgcctagcgggctggagaagaggagcgtgctcaatgggagccatgcgatgatggacctactggttgaactttgccttcagaaccacctgaatccatcccaccatgcccttgaaattcggtcttcagaaacccaacaacctttgagttttaagccaaatactttgattgggaccctgaatgtgcatactgtgtttctgaaagaaaaagttcctgaagagaaggttaagcctggtccccctaaggtgcctgagaaatctgtgcgtttggtcgtgaattacctgcggacacaaaaagctgttgtgcgtgtgagccctgaggttcctctccagaatattctcccagtcatttgtgcaaagtgtgaggtcagcccagagcacgtggttctcctcagggacaacattgccggagaggagctggagctgtccaagtccctgaacgagctcgggataaaggagctctacgcgtgggacaacagaagagaaacctttaggaaatcatcacttggcaatgatgagacagataaagagaagaaaaaatttctgggatttttcaaagttaataaaagaagcaatagtaaggctgagcagctcgtgctgtcgggtgcagacagcgatgaggacacctccagggctgccccaggaaggggtttgaacgggctgtttaacgacccccaactccccatccatgcactcacgttctcttacgctgggtccatccctctcgctgggcagcatctcaggggtgtccgtgaagtcggagatgaagaagcgccgagcccctcctcctccaggttcagggccacctgtgcaagacaaggcatcggaaaaggtatctcttgggtcacagattgatttacagaagaagaagcggcgagcgccagctccccctccaccacagccaccaccaccgagtcccctgatccccaaccgcactgaggataaggaggagaacaggaagagcacgatggtaagcctgcccctggggtctggcagccactgcagcccggatggagccccgcaggtgctgtcagaggcggaggagaccgtgtcagttggcagctgttttgcgtcggaggacacgaccgaggactcaggagtgatgagttccccctcagacatcgtctctctggactcgcagcaggacagcatgaaatacaaagacaagtgggccacagaccaggaagactgcagtgaccaggacctcgctggaaccccagacctgggtccccagaagagccccttgtgggagaagaatggctctgagaactcacatctgagaactgaaaaagctgtcacagcctcaaatgatgaagaagacctattaattgctggagagttccgtaaaacccttgcagaacttgatgaagacctggaagaaatggaagacagctatgaaacagacaccagctccctcaccagctccatccatggtgcatccaaccactgcccacaggatgccatgatccctcacggcgacacagatgcaatcccagtaacattcataggggaagtttcagatgatcctgtggattcggggttgttttccaatagaaacaacaatgctgggtctttcgactcggagggtgttgccagcaggagagactccctggcgccacttcaagctgagcacagccagccccatgaaaaggcaagggaggaagtacctgccctgcaccccgcttcccatgacgtcggaaaaggaatccgtgtggccttatctaacatctctaaagatgggaatctaatggaaacggcgcccagggtgacttcttttgcttcgaatcttcacacagacaacctaaatgcaaaagtgaaagacaaagtgtatggctgtgctgacggggagaggactcaagccacagagagagtgaattcccaaccggtgaatgaaaaggacagcaacgataaaaacgctgccttggcaccaacatcatggcaccaacgaggccaaaacccagggaaaagctacagacttaagcacggcctcacaacgtataaaatcattcctccaaagtcagagatgcgatgttacgacagagatgtgtccctctccaccggagccattaagattgacgagctggggaacttggtgagtcctcacgccaccggcatcaggatcatttccctgtcttcgtctgtgcctgaagcagaatctcagcccattgggaaagtcagagagttctggaggtgcaactctgtggaaaaacacctgggccgaccctcagagagctctgccaggggacccccctccacccctgtgcccacgcagacgcagaatccagagagcagactccaagcagaccccaagccaatatcgccccagcagaagtctgcccaccatgagggccggaaccccctaggggaggggagaaaccagccccccaccatgggcatgggtcacgtgagggtgccagcagctcacaccacagaagtcacatttctcaagcctcagagaagaacgtccagccagtatgtggcctctgccattgccaagcgcataggagccccaaaagtccatgctgatgtggtgaggccacacggttatgccgagaagggttatgcaggcaaggcgccagtgctggctgcaccacctgtcactgtgaaagatgacaggacatccagcccacactcagagacacaaggatggaaggatggtgcccagtggccctgtgtcactcctcccaacaaccacggggaagatttggcagtgggagcccctcctaggggggaggtcattggcccacacaggaagttgtctactcaggacagacctgctgctatccacagaagctcctgtttctcactggttcagtcttcccagagggatcgtgtttctgtgggacagagctgtggtttcagtggaaagcaaagcacaagtagccaggaggccagctcagcatctgagcccagacgcgcacctgatggtacagacccaccccctccacacacatctgacactcaggcctgcagcagggagctggtcaatggctctgtgcgcgccccaggccacggcgagccttcccaccctccaggagggtctggcacagaaagccacattctcctagaaagagaggaaaagcccagtgtgttctctacagatggaaatgaaacagacagtatttggccacccagcatttttgggccgaagaaaaaattcaaacctgttgtccagagaccagtcccaaaagacacatccctgcactctgccctgatggaagccatccactctgcgggagggaaggacagactacgcaagacggcagaacacaccggggagggcaggccagcgaaactgtcctacacggaggcagagggcgaacgatctgcactgctggcagctatccgcgggcacagcggcacctgcagcctgaggaaggtggcatcctctgcttctgaggagctccagagcttccgagatgccgcactctctgcacagggctcggaaagtcctctgctagaagaccttggtcttctgtccccaccagccattcccccaccaccccctccaccctcccaggctctctctgcaccaaggacggcctccaggttcagcacgggcaccctcagcaacaccgcagacgcaaggcaagccttgatggacgccatccgctccggcacaggggctgcgagactgagaaaggtgcccttgctcgtgtgaatgaacagaggccagagaattgcagaaacccacctgtaatatgcccacaggcgtcactcaaggagtctgcatagccaggaacatcaagttttggtgttactttcttgtctacaggccaaaatgcgcacagttgattttcggtgtgttcctgtataacggcttgaaaggaaaggagaagatgctgtgtcgctgcgcagctcgtgtgccaaggaaatgtgttttgcctctgaatatcttaagttgctaataaacgattcttgttggcaggttaatgggactataaatgctggagcccagcactcacacttaattatatttatgggcaaagtaaaaagaatcatgccttagactgattttggacctttgagacttttaccacatacagatggatgaaactacttactgatttaagatcttttgaattttagaaaaaacatatgaatcagatggaacaatctgaatgtgatatgctccatgatgctgtgtgttttggtagtaagaaaaaaaaattgggaggcttttcaaaggtggctttgttaggtagtaaaactgctggattcttcttcctcaaatatttggggctaacacttcacagagggtcacagtccatgatctgaccaactaagcttttaaaaatcaactattaccacccagaaaacagtcctacgtgatcatgtggccagggcatgcccgagtcctgcaagggtggcgggtggctgaggtcacaccaccactggagtggatgggcagtgccccacatggacagccattccccaggctatgaagtgacataggcctcccccacggtgcctgtgtacggagcctgatgacttcactgggagccttctggaatcctgcagagggtcaaggagcagggatgttggatgcccacctgtcaagagttcagatcaaagttgcgctgagagcgtcacaattttggttcagccttgacgcgtttgtccaacagctcattggctccctttgtatgatatcgtggtcttctcacatggtgcccagtcaccaatatttataatgaggtctaactacagcagtagtttttcatatatatctctaaaacattttgttatattgaaaaaagtaatagaaatcaagatgtgttgatgaaataaaatgtgtatctgagtgagaaaacaagtatggtgaggtcactttaatgtttcacagcgatctcagatctaggcctcaggtagaatggaagctgttctgcattcactgattaacgttgctaaactcttggtgaggcacgagctaccagccaattgctcttcatcacagctatctgtcttttagtgccacaaataaaagaaaatcaaatcttaaaaaat

SEQ ID NO: 440339 - DNA, 5320 bp, Homo sapiens
ccagccccttccgtccgccgcgctccgccgctgtcctccgccggcccgcgtgggaggacgatgggtcagcgcggaaaaagtgaatgagggcggcagcggtggcggcggtagccagcgcctgactcggcgggcccggagcaccgcccgcgtcccggcccccggcaccatggacgcgccgcgcgcctcggcggccaagcccccgaccgggaggaagatgaaggctcgtgctcccccacctcctggaaaggctgccactctgcatgtgcacagtgaccagaagcccccccacgatggggccctcgggtcgcagcagaacttggttcgcatgaaggaggcgctgagggccagcaccatggacgtcaccgtggtcctgcctagcgggctggagaagaggagcgtgctcaatgggagccatgcgatgatggacctactggttgaactttgccttcagaaccacctgaatccatcccaccatgcccttgaaattcggtcttcagaaacccaacaacctttgagttttaagccaaatactttgattgggaccctgaatgtgcatactgtgtttctgaaagaaaaagttcctgaagagaaggttaagcctggtccccctaaggtgcctgagaaatctgtgcgtttggtcgtgaattacctgcggacacaaaaagctgttgtgcgtgtgagccctgaggttcctctccagaatattctcccagtcatttgtgcaaagtgtgaggtcagcccagagcacgtggttctcctcagggacaacattgccggagaggagctggagctgtccaagtccctgaacgagctcgggataaaggagctctacgcgtgggacaacagaagagaaacctttaggaaatcatcacttggcaatgatgagacagataaagagaagaaaaaatttctgggatttttcaaagttaataaaagaagcaatagtaaggctgagcagctcgtgctgtcgggtgcagacagcgatgaggacacctccagggctgccccaggaaggggtttgaacgggctgtttaacgacccccaactccccatccatgcactcacgttctcttacgctgggtccatccctctcgctgggcagcatctcaggggtgtccgtgaagtcggagatgaagaagcgccgagcccctcctcctccaggttcagggccacctgtgcaagacaaggcatcggaaaaggtatctcttgggtcacagattgatttacagaagaagaagcggcgagcgccagctccccctccaccacagccaccaccaccgagtcccctgatccccaaccgcactgaggataaggaggagaacaggaagagcacgatggtaagcctgcccctggggtctggcagccactgcagcccggatggagccccgcaggtgctgtcagaggcggaggagaccgtgtcagttggcagctgttttgcgtcggaggacacgaccgaggactcaggagtgatgagttccccctcagacatcgtctctctggactcgcagcaggacagcatgaaatacaaagacaagtgggccacagaccaggaagactgcagtgaccaggacctcgctggaaccccagacctgggtccccagaagagccccttgtgggagaagaatggctctgagaactcacatctgagaactgaaaaagctgtcacagcctcaaatgatgaagaagacctattaattgctggagagttccgtaaaacccttgcagaacttgatgaagacctggaagaaatggaagacagctatgaaacagacaccagctccctcaccagctccatccatggtgcatccaaccactgcccacaggatgccatgatccctcacggcgacacagatgcaatcccagtaacattcataggggaagtttcagatgatcctgtggattcggggttgttttccaatagaaacaacaatgctgggtctttcgactcggagggtgttgccagcaggagagactccctggcgccacttcaagctgagcacagccagccccatgaaaaggcaagggaggaagtacctgccctgcaccccgcttcccatgacgtcggaaaaggaatccgtgtggccttatctaacatctctaaagatgggaatctaatggaaacggcgcccagggtgacttcttttgcttcgaatcttcacacagacaacctaaatgcaaaagtgaaagacaaagtgtatggctgtgctgacggggagaggactcaagccacagagagagtgaattcccaaccggtgaatgaaaaggacagcaacgataaaaacgctgccttggcaccaacatcatggcaccaacgaggccaaaacccagggaaaagctacagacttaagcacggcctcacaacgtataaaatcattcctccaaagtcagagatgcgatgttacgacagagatgtgtccctctccaccggagccattaagattgacgagctggggaacttggtgagtcctcacgccaccggcatcaggatcatttccctgtcttcgtctgtgcctgaagcagaatctcagcccattgggaaagtcagagagttctggaggtgcaactctgtggaaaaacacctgggccgaccctcagagagctctgccaggggacccccctccacccctgtgcccacgcagacgcagaatccagagagcagactccaagcagaccccaagccaatatcgccccagcagaagtctgcccaccatgagggccggaaccccctaggggaggggagaaaccagccccccaccatgggcatgggtcacgtgagggtgccagcagctcacaccacagaagtcacatttctcaagcctcagagaagaacgtccagccagtatgtggcctctgccattgccaagcgcataggagccccaggcaaggcgccagtgctggctgcaccacctgtcactgtgaaagatgacaggacatccagcccacactcagagacacaaggatggaaggatggtgcccagtggccctgtgtcactcctcccaacaaccacggggaagatttggcagtgggagcccctcctaggggggaggtcattggcccacacaggaagttgtctactcaggacagacctgctgctatccacagaagctcctgtttctcactggttcagtcttcccagagggatcgtgtttctgtgggacagagctgtggtttcagtggaaagcaaagcacaagtagccaggaggccagctcagcatctgagcccagacgcgcacctgatggtacagacccaccccctccacacacatctgacactcaggcctgcagcagggagctggtcaatggctctgtgcgcgccccaggccacggcgagccttcccaccctccaggagggtctggcacagaaagccacattctcctagaaagagaggaaaagcccagtgtgttctctacagatggaaatgaaacagacagtatttggccacccagcatttttgggccgaagaaaaaattcaaacctgttgtccagagaccagtcccaaaagacacatccctgcactctgccctgatggaagccatccactctgcgggagggaaggacagactacgcaagacggcagaacacaccggggagggcaggccagcgaaactgtcctacacggaggcagagggcgaacgatctgcactgctggcagctatccgcgggcacagcggcacctgcagcctgaggaaggtggcatcctctgcttctgaggagctccagagcttccgagatgccgcactctctgcacagggctcggaaagtcctctgctagaagaccttggtcttctgtccccaccagccattcccccaccaccccctccaccctcccaggctctctctgcaccaaggacggcctccaggttcagcacgggcaccctcagcaacaccgcagacgcaaggcaagccttgatggacgccatccgctccggcacaggggctgcgagactgagaaaggtgcccttgctcgtgtgaatgaacagaggccagagaattgcagaaacccacctgtaatatgcccacaggcgtcactcaaggagtctgcatagccaggaacatcaagttttggtgttactttcttgtctacaggccaaaatgcgcacagttgattttcggtgtgttcctgtataacggcttgaaaggaaaggagaagatgctgtgtcgctgcgcagctcgtgtgccaaggaaatgtgttttgcctctgaatatcttaagttgctaataaacgattcttgttggcaggttaatgggactataaatgctggagcccagcactcacacttaattatatttatgggcaaagtaaaaagaatcatgccttagactgattttggacctttgagacttttaccacatacagatggatgaaactacttactgatttaagatcttttgaattttagaaaaaacatatgaatcagatggaacaatctgaatgtgatatgctccatgatgctgtgtgttttggtagtaagaaaaaaaaattgggaggcttttcaaaggtggctttgttaggtagtaaaactgctggattcttcttcctcaaatatttggggctaacacttcacagagggtcacagtccatgatctgaccaactaagcttttaaaaatcaactattaccacccagaaaacagtcctacgtgatcatgtggccagggcatgcccgagtcctgcaagggtggcgggtggctgaggtcacaccaccactggagtggatgggcagtgccccacatggacagccattccccaggctatgaagtgacataggcctcccccacggtgcctgtgtacggagcctgatgacttcactgggagccttctggaatcctgcagagggtcaaggagcagggatgttggatgcccacctgtcaagagttcagatcaaagttgcgctgagagcgtcacaattttggttcagccttgacgcgtttgtccaacagctcattggctccctttgtatgatatcgtggtcttctcacatggtgcccagtcaccaatatttataatgaggtctaactacagcagtagtttttcatatatatctctaaaacattttgttatattgaaaaaagtaatagaaatcaagatgtgttgatgaaataaaatgtgtatctgagtgagaaaacaagtatggtgaggtcactttaatgtttcacagcgatctcagatctaggcctcaggtagaatggaagctgttctgcattcactgattaacgttgctaaactcttggtgaggcacgagctaccagccaattgctcttcatcacagctatctgtcttttagtgccacaaataaaagaaaatcaaatcttaaaaaat

SEQ ID NO: 440340 - DNA, 4394 bp, Homo sapiens
tttccccgtacggccaaccgtacgcccaaaaagaagcaatagtagggctgtttaacgacccccaactccccatccatgcactcacgttctcttacgctgggtccatccctctcgctgggcagcatctcaggggtgtccgtgaagtcggagatgaagaagcgccgagcccctcctcctccaggttcagggccacctgtgcaagacaaggcatcggaaaaggtatctcttgggtcacagattgatttacagaagaagaagcggcgagcgccagctccccctccaccacagccaccaccaccgagtcccctgatccccaaccgcactgaggataaggaggagaacaggaagagcacgatggtaagcctgcccctggggtctggcagccactgcagcccggatggagccccgcaggtgctgtcagaggcggaggagaccgtgtcagttggcagctgttttgcgtcggaggacacgaccgaggactcaggagtgatgagttccccctcagacatcgtctctctggactcgcagcaggacagcatgaaatacaaagacaagtgggccacagaccaggaagactgcagtgaccaggacctcgctggaaccccagacctgggtccccagaagagccccttgtgggagaagaatggctctgagaactcacatctgagaactgaaaaagctgtcacagcctcaaatgatgaagaagacctattaattgctggagagttccgtaaaacccttgcagaacttgatgaagacctggaagaaatggaagacagctatgaaacagacaccagctccctcaccagctccatccatggtgcatccaaccactgcccacaggatgccatgatccctcacggcgacacagatgcaatcccagtaacattcataggggaagtttcagatgatcctgtggattcggggttgttttccaatagaaacaacaatgctgggtctttcgactcggagggtgttgccagcaggagagactccctggcgccacttcaagctgagcacagccagccccatgaaaaggcaagggaggaagtacctgccctgcaccccgcttcccatgacgtcggaaaaggaatccgtgtggccttatctaacatctctaaagatgggaatctaatggaaacggcgcccagggtgacttcttttgcttcgaatcttcacacagacaacctaaatgcaaaagtgaaagacaaagtgtatggctgtgctgacggggagaggactcaagccacagagagagtgaattcccaaccggtgaatgaaaaggacagcaacgataaaaacgctgccttggcaccaacatcatggcaccaacgaggccaaaacccagggaaaagctacagacttaagcacggcctcacaacgtataaaatcattcctccaaagtcagagatgcgatgttacgacagagatgtgtccctctccaccggagccattaagattgacgagctggggaacttggtgagtcctcacgccaccggcatcaggatcatttccctgtcttcgtctgtgcctgaagcagaatctcagcccattgggaaagtcagagagttctggaggtgcaactctgtggaaaaacacctgggccgaccctcagagagctctgccaggggacccccctccacccctgtgcccacgcagacgcagaatccagagagcagactccaagcagaccccaagccaatatcgccccagcagaagtctgcccaccatgagggccggaaccccctaggggaggggagaaaccagccccccaccatgggcatgggtcacgtgagggtgccagcagctcacaccacagaagtcacatttctcaagcctcagagaagaacgtccagccagtatgtggcctctgccattgccaagcgcataggagccccaaaagtccatgctgatgtggtgaggccacacggttatgccgagaagggttatgcaggcaaggcgccagtgctggctgcaccacctgtcactgtgaaagatgacaggacatccagcccacactcagagacacaaggatggaaggatggtgcccagtggccctgtgtcactcctcccaacaaccacggggaagatttggcagtgggagcccctcctaggggggaggtcattggcccacacaggaagttgtctactcaggacagacctgctgctatccacagaagctcctgtttctcactggttcagtcttcccagagggatcgtgtttctgtgggacagagctgtggtttcagtggaaagcaaagcacaagtagccaggaggccagctcagcatctgagcccagacgcgcacctgatggtacagacccaccccctccacacacatctgacactcaggcctgcagcagggagctggtcaatggctctgtgcgcgccccaggccacggcgagccttcccaccctccaggagggtctggcacagaaagccacattctcctagaaagagaggaaaagcccagtgtgttctctacagatggaaatgaaacagacagtatttggccacccagcatttttgggccgaagaaaaaattcaaacctgttgtccagagaccagtcccaaaagacacatccctgcactctgccctgatggaagccatccactctgcgggagggaaggacagactacgcaagacggcagaacacaccggggagggcaggccagcgaaactgtcctacacggaggcagagggcgaacgatctgcactgctggcagctatccgcgggcacagcggcacctgcagcctgaggaaggtggcatcctctgcttctgaggagctccagagcttccgagatgccgcactctctgcacagggctcggaaagtcctctgctagaagaccttggtcttctgtccccaccagccattcccccaccaccccctccaccctcccaggctctctctgcaccaaggacggcctccaggttcagcacgggcaccctcagcaacaccgcagacgcaaggcaagccttgatggacgccatccgctccggcacaggggctgcgagactgagaaaggtgcccttgctcgtgtgaatgaacagaggccagagaattgcagaaacccacctgtaatatgcccacaggcgtcactcaaggagtctgcatagccaggaacatcaagttttggtgttactttcttgtctacaggccaaaatgcgcacagttgattttcggtgtgttcctgtataacggcttgaaaggaaaggagaagatgctgtgtcgctgcgcagctcgtgtgccaaggaaatgtgttttgcctctgaatatcttaagttgctaataaacgattcttgttggcaggttaatgggactataaatgctggagcccagcactcacacttaattatatttatgggcaaagtaaaaagaatcatgccttagactgattttggacctttgagacttttaccacatacagatggatgaaactacttactgatttaagatcttttgaattttagaaaaaacatatgaatcagatggaacaatctgaatgtgatatgctccatgatgctgtgtgttttggtagtaagaaaaaaaaattgggaggcttttcaaaggtggctttgttaggtagtaaaactgctggattcttcttcctcaaatatttggggctaacacttcacagagggtcacagtccatgatctgaccaactaagcttttaaaaatcaactattaccacccagaaaacagtcctacgtgatcatgtggccagggcatgcccgagtcctgcaagggtggcgggtggctgaggtcacaccaccactggagtggatgggcagtgccccacatggacagccattccccaggctatgaagtgacataggcctcccccacggtgcctgtgtacggagcctgatgacttcactgggagccttctggaatcctgcagagggtcaaggagcagggatgttggatgcccacctgtcaagagttcagatcaaagttgcgctgagagcgtcacaattttggttcagccttgacgcgtttgtccaacagctcattggctccctttgtatgatatcgtggtcttctcacatggtgcccagtcaccaatatttataatgaggtctaactacagcagtagtttttcatatatatctctaaaacattttgttatattgaaaaaagtaatagaaatcaagatgtgttgatgaaataaaatgtgtatctgagtgagaaaacaagtatggtgaggtcactttaatgtttcacagcgatctcagatctaggcctcaggtagaatggaagctgttctgcattcactgattaacgttgctaaactcttggtgaggcacgagctaccagccaattgctcttcatcacagctatctgtcttttagtgccacaaataaaagaaaatcaaatcttaaaaaat

SEQ ID NO: 440341 - DNA, 3920 bp, Homo sapiens
tgcacacacatgggggacacacacacccatgaacaatctgcgtctccgtagttctgaggacaacagcagtacagtgagtatgtgactgcttgaatttgagtatgagctgttctatcctcagatattcctggaaaggagtacattaaatcaatagtaagagaaatgagtgctcctttctctttggtcttccctagaactgaaaaagctgtcacagcctcaaatgatgaagaagacctattaattgctggagagttccgtaaaacccttgcagaacttgatgaagacctggaagaaatggaagacagctatgaaacagacaccagctccctcaccagctccatccatggtgcatccaaccactgcccacaggatgccatgatccctcacggcgacacagatgcaatcccagtaacattcataggggaagtttcagatgatcctgtggattcggggttgttttccaatagaaacaacaatgctgggtctttcgactcggagggtgttgccagcaggagagactccctggcgccacttcaagctgagcacagccagccccatgaaaaggcaagggaggaagtacctgccctgcaccccgcttcccatgacgtcggaaaaggaatccgtgtggccttatctaacatctctaaagatgggaatctaatggaaacggcgcccagggtgacttcttttgcttcgaatcttcacacagacaacctaaatgcaaaagtgaaagacaaagtgtatggctgtgctgacggggagaggactcaagccacagagagagtgaattcccaaccggtgaatgaaaaggacagcaacgataaaaacgctgccttggcaccaacatcatggcaccaacgaggccaaaacccagggaaaagctacagacttaagcacggcctcacaacgtataaaatcattcctccaaagtcagagatgcgatgttacgacagagatgtgtccctctccaccggagccattaagattgacgagctggggaacttggtgagtcctcacgccaccggcatcaggatcatttccctgtcttcgtctgtgcctgaagcagaatctcagcccattgggaaagtcagagagttctggaggtgcaactctgtggaaaaacacctgggccgaccctcagagagctctgccaggggacccccctccacccctgtgcccacgcagacgcagaatccagagagcagactccaagcagaccccaagccaatatcgccccagcagaagtctgcccaccatgagggccggaaccccctaggggaggggagaaaccagccccccaccatgggcatgggtcacgtgagggtgccagcagctcacaccacagaagtcacatttctcaagcctcagagaagaacgtccagccagtatgtggcctctgccattgccaagcgcataggagccccaaaagtccatgctgatgtggtgaggccacacggttatgccgagaagggttatgcaggcaaggcgccagtgctggctgcaccacctgtcactgtgaaagatgacaggacatccagcccacactcagagacacaaggatggaaggatggtgcccagtggccctgtgtcactcctcccaacaaccacggggaagatttggcagtgggagcccctcctaggggggaggtcattggcccacacaggaagttgtctactcaggacagacctgctgctatccacagaagctcctgtttctcactggttcagtcttcccagagggatcgtgtttctgtgggacagagctgtggtttcagtggaaagcaaagcacaagtagccaggaggccagctcagcatctgagcccagacgcgcacctgatggtacagacccaccccctccacacacatctgacactcaggcctgcagcagggagctggtcaatggctctgtgcgcgccccaggccacggcgagccttcccaccctccaggagggtctggcacagaaagccacattctcctagaaagagaggaaaagcccagtgtgttctctacagatggaaatgaaacagacagtatttggccacccagcatttttgggccgaagaaaaaattcaaacctgttgtccagagaccagtcccaaaagacacatccctgcactctgccctgatggaagccatccactctgcgggagggaaggacagactacgcaagacggcagaacacaccggggagggcaggccagcgaaactgtcctacacggaggcagagggcgaacgatctgcactgctggcagctatccgcgggcacagcggcacctgcagcctgaggaaggtggcatcctctgcttctgaggagctccagagcttccgagatgccgcactctctgcacagggctcggaaagtcctctgctagaagaccttggtcttctgtccccaccagccattcccccaccaccccctccaccctcccaggctctctctgcaccaaggacggcctccaggttcagcacgggcaccctcagcaacaccgcagacgcaaggcaagccttgatggacgccatccgctccggcacaggggctgcgagactgagaaaggtgcccttgctcgtgtgaatgaacagaggccagagaattgcagaaacccacctgtaatatgcccacaggcgtcactcaaggagtctgcatagccaggaacatcaagttttggtgttactttcttgtctacaggccaaaatgcgcacagttgattttcggtgtgttcctgtataacggcttgaaaggaaaggagaagatgctgtgtcgctgcgcagctcgtgtgccaaggaaatgtgttttgcctctgaatatcttaagttgctaataaacgattcttgttggcaggttaatgggactataaatgctggagcccagcactcacacttaattatatttatgggcaaagtaaaaagaatcatgccttagactgattttggacctttgagacttttaccacatacagatggatgaaactacttactgatttaagatcttttgaattttagaaaaaacatatgaatcagatggaacaatctgaatgtgatatgctccatgatgctgtgtgttttggtagtaagaaaaaaaaattgggaggcttttcaaaggtggctttgttaggtagtaaaactgctggattcttcttcctcaaatatttggggctaacacttcacagagggtcacagtccatgatctgaccaactaagcttttaaaaatcaactattaccacccagaaaacagtcctacgtgatcatgtggccagggcatgcccgagtcctgcaagggtggcgggtggctgaggtcacaccaccactggagtggatgggcagtgccccacatggacagccattccccaggctatgaagtgacataggcctcccccacggtgcctgtgtacggagcctgatgacttcactgggagccttctggaatcctgcagagggtcaaggagcagggatgttggatgcccacctgtcaagagttcagatcaaagttgcgctgagagcgtcacaattttggttcagccttgacgcgtttgtccaacagctcattggctccctttgtatgatatcgtggtcttctcacatggtgcccagtcaccaatatttataatgaggtctaactacagcagtagtttttcatatatatctctaaaacattttgttatattgaaaaaagtaatagaaatcaagatgtgttgatgaaataaaatgtgtatctgagtgagaaaacaagtatggtgaggtcactttaatgtttcacagcgatctcagatctaggcctcaggtagaatggaagctgttctgcattcactgattaacgttgctaaactcttggtgaggcacgagctaccagccaattgctcttcatcacagctatctgtcttttagtgccacaaataaaagaaaatcaaatcttaaaaaat

SEQ ID NO: 440342 - DNA, 2019 bp, Homo sapiens
ccagccccttccgtccgccgcgctccgccgctgtcctccgccggcccgcgtgggaggacgatgggtcagcgcggaaaaagtgaatgagggcggcagcggtggcggcggtagccagcgcctgactcggcgggcccggagcaccgcccgcgtcccggcccccggcaccatggacgcgccgcgcgcctcggcggccaagcccccgaccgggaggaagatgaaggctcgtgctcccccacctcctggaaaggctgccactctgcatgtgcacagtgaccagaagcccccccacgatggggccctcgggtcgcagcagaacttggttcgcatgaaggaggcgctgagggccagcaccatggacgtcaccgtggtcctgcctagcgggctggagaagaggagcgtgctcaatgggagccatgcgatgatggacctactggttgaactttgccttcagaaccacctgaatccatcccaccatgcccttgaaattcggtcttcagaaacccaacaacctttgagttttaagccaaatactttgattgggaccctgaatgtgcatactgtgtttctgaaagaaaaagttcctgaagagaaggttaagcctggtccccctaaggtgcctgagaaatctgtgcgtttggtcgtgaattacctgcggacacaaaaagctgttgtgcgtgtgagccctgaggttcctctccagaatattctcccagtcatttgtgcaaagtgtgaggtcagcccagagcacgtggttctcctcagggacaacattgccggagaggagctggagctgtccaagtccctgaacgagctcgggataaaggagctctacgcgtgggacaacagaagagaaacctttaggaaatcatcacttggcaatgatgagacagataaagagaagaaaaaatttctgggatttttcaaagttaataaaagaagcaatagtaaggctgagcagctcgtgctgtcgggtgcagacagcgatgaggacacctccagggctgccccaggaaggggtttgaacgggctgtttaacgacccccaactccccatccatgcactcacgttctcttacgctgggtccatccctctcgctgggcagcatctcaggggtgtccgtgaagtcggagatgaagaagcgccgagcccctcctcctccaggttcagggccacctgtgcaagacaaggcatcggaaaaggtatctcttgggtcacagattgatttacagaagaagaagcggcgagcgccagctccccctccaccacagccaccaccaccgagtcccctgatccccaaccgcactgaggataaggaggagaacaggaagagcacgatggtttattgctgtgcgtcattccctactcaggccaagcgcttctgatggacgggcctcttcctgacctcggacctttcccagtgtctcttctgccctggctctgattttcctgttgttcttcctcctttcaggataaaagggctcattgtatacccagaatttacttcctttggggtttacatataaatgcattaataacagagatttgtttgattgaggtttatatttttttgaaggaggtaaattatatgcaaattttaggttgataatattcacctgtctgaaattcactgatacttggaaatgttcctgtgaagaactctgctttattttaattcattattaattcatgtttttcttattggatattcagttccagaatttattgccaatttttcttaaaactagattgtatccataaattgaccagtatagtcaatttggatagaactgaaactttctgtctacctggtaaaactaagtgcctaaaaacatgaactataaatgtagttactaggaactcacaacttatatatactatccattcaatgatacataggacccaatgtctttgtgtttttgaggttttcctgttactgtgtactttgccattttacatagttcactaaaaagaaagaagtgggagaagaagggtgttctattcattattctatattatgat

SEQ ID NO: 440343 - DNA, 234 bp, Homo sapiens
tgacctagtcacccccaatcctcatctcctcatgccactaccttgggcgttgggatttcacagctgaattttgggagacattcactctatagcagtcatttaatcatctcattgccaggtggcatcctctgcttctgaggagctccagagcttccgagatgccgcactctctgcacagggctcggaaagtcctctgctagaagaccttggtcttctgtccccaccagccattcc

SEQ ID NO: 440344 - DNA, 5299 bp, Homo sapiens
ccagccccttccgtccgccgcgctccgccgctgtcctccgccggcccgcgtgggaggacgatgggtcagcgcggaaaaagtgaatgagggcggcagcggtggcggcggtagccagcgcctgactcggcgggcccggagcaccgcccgcgtcccggcccccggcaccatggacgcgccgcgcgcctcggcggccaagcccccgaccgggaggaagatgaaggctcgtgctcccccacctcctggaaaggctgccactctgcatgtgcacagtgaccagaagcccccccacgatggggccctcgggtcgcagcagaacttggttcgcatgaaggaggcgctgagggccagcaccatggacgtcaccgtggtcctgcctagcgggctggagaagaggagcgtgctcaatgggagccatgcgatgatggacctactggttgaactttgccttcagaaccacctgaatccatcccaccatgcccttgaaattcggtcttcagaaacccaacaacctttgagttttaagccaaatactttgattgggaccctgaatgtgcatactgtgtttctgaaagaaaaagttcctgaagagaaggttaagcctggtccccctaaggtgcctgagaaatctgtgcgtttggtcgtgaattacctgcggacacaaaaagctgttgtgcgtgtgagccctgaggttcctctccagaatattctcccagtcatttgtgcaaagtgtgaggtcagcccagagcacgtggttctcctcagggacaacattgccggagaggagctggagctgtccaagtccctgaacgagctcgggataaaggagctctacgcgtgggacaacagaagagaaacctttaggaaatcatcacttggcaatgatgagacagataaagagaagaaaaaatttctgggatttttcaaagttaataaaagaagcaatagtaaggggctgtttaacgacccccaactccccatccatgcactcacgttctcttacgctgggtccatccctctcgctgggcagcatctcaggggtgtccgtgaagtcggagatgaagaagcgccgagcccctcctcctccaggttcagggccacctgtgcaagacaaggcatcggaaaaggtatctcttgggtcacagattgatttacagaagaagaagcggcgagcgccagctccccctccaccacagccaccaccaccgagtcccctgatccccaaccgcactgaggataaggaggagaacaggaagagcacgatggtaagcctgcccctggggtctggcagccactgcagcccggatggagccccgcaggtgctgtcagaggcggaggagaccgtgtcagttggcagctgttttgcgtcggaggacacgaccgaggactcaggagtgatgagttccccctcagacatcgtctctctggactcgcagcaggacagcatgaaatacaaagacaagtgggccacagaccaggaagactgcagtgaccaggacctcgctggaaccccagacctgggtccccagaagagccccttgtgggagaagaatggctctgagaactcacatctgagaactgaaaaagctgtcacagcctcaaatgatgaagaagacctattaattgctggagagttccgtaaaacccttgcagaacttgatgaagacctggaagaaatggaagacagctatgaaacagacaccagctccctcaccagctccatccatggtgcatccaaccactgcccacaggatgccatgatccctcacggcgacacagatgcaatcccagtaacattcataggggaagtttcagatgatcctgtggattcggggttgttttccaatagaaacaacaatgctgggtctttcgactcggagggtgttgccagcaggagagactccctggcgccacttcaagctgagcacagccagccccatgaaaaggcaagggaggaagtacctgccctgcaccccgcttcccatgacgtcggaaaaggaatccgtgtggccttatctaacatctctaaagatgggaatctaatggaaacggcgcccagggtgacttcttttgcttcgaatcttcacacagacaacctaaatgcaaaagtgaaagacaaagtgtatggctgtgctgacggggagaggactcaagccacagagagagtgaattcccaaccggtgaatgaaaaggacagcaacgataaaaacgctgccttggcaccaacatcatggcaccaacgaggccaaaacccagggaaaagctacagacttaagcacggcctcacaacgtataaaatcattcctccaaagtcagagatgcgatgttacgacagagatgtgtccctctccaccggagccattaagattgacgagctggggaacttggtgagtcctcacgccaccggcatcaggatcatttccctgtcttcgtctgtgcctgaagcagaatctcagcccattgggaaagtcagagagttctggaggtgcaactctgtggaaaaacacctgggccgaccctcagagagctctgccaggggacccccctccacccctgtgcccacgcagacgcagaatccagagagcagactccaagcagaccccaagccaatatcgccccagcagaagtctgcccaccatgagggccggaaccccctaggggaggggagaaaccagccccccaccatgggcatgggtcacgtgagggtgccagcagctcacaccacagaagtcacatttctcaagcctcagagaagaacgtccagccagtatgtggcctctgccattgccaagcgcataggagccccaaaagtccatgctgatgtggtgaggccacacggttatgccgagaagggttatgcaggcaaggcgccagtgctggctgcaccacctgtcactgtgaaagatgacaggacatccagcccacactcagagacacaaggatggaaggatggtgcccagtggccctgtgtcactcctcccaacaaccacggggaagatttggcagtgggagcccctcctaggggggaggtcattggcccacacaggaagttgtctactcaggacagacctgctgctatccacagaagctcctgtttctcactggttcagtcttcccagagggatcgtgtttctgtgggacagagctgtggtttcagtggaaagcaaagcacaagtagccaggaggccagctcagcatctgagcccagacgcgcacctgatggtacagacccaccccctccacacacatctgacactcaggcctgcagcagggagctggtcaatggctctgtgcgcgccccaggccacggcgagccttcccaccctccaggagggtctggcacagaaagccacattctcctagaaagagaggaaaagcccagtgtgttctctacagatggaaatgaaacagacagtatttggccacccagcatttttgggccgaagaaaaaattcaaacctgttgtccagagaccagtcccaaaagacacatccctgcactctgccctgatggaagccatccactctgcgggagggaaggacagactacgcaagacggcagaacacaccggggagggcaggccagcgaaactgtcctacacggaggcagagggcgaacgatctgcactgctggcagctatccgcgggcacagcggcacctgcagcctgaggaaggtggcatcctctgcttctgaggagctccagagcttccgagatgccgcactctctgcacagggctcggaaagtcctctgctagaagaccttggtcttctgtccccaccagccattcccccaccaccccctccaccctcccaggctctctctgcaccaaggacggcctccaggttcagcacgggcaccctcagcaacaccgcagacgcaaggcaagccttgatggacgccatccgctccggcacaggggctgcgagactgagaaaggtgcccttgctcgtgtgaatgaacagaggccagagaattgcagaaacccacctgtaatatgcccacaggcgtcactcaaggagtctgcatagccaggaacatcaagttttggtgttactttcttgtctacaggccaaaatgcgcacagttgattttcggtgtgttcctgtataacggcttgaaaggaaaggagaagatgctgtgtcgctgcgcagctcgtgtgccaaggaaatgtgttttgcctctgaatatcttaagttgctaataaacgattcttgttggcaggttaatgggactataaatgctggagcccagcactcacacttaattatatttatgggcaaagtaaaaagaatcatgccttagactgattttggacctttgagacttttaccacatacagatggatgaaactacttactgatttaagatcttttgaattttagaaaaaacatatgaatcagatggaacaatctgaatgtgatatgctccatgatgctgtgtgttttggtagtaagaaaaaaaaattgggaggcttttcaaaggtggctttgttaggtagtaaaactgctggattcttcttcctcaaatatttggggctaacacttcacagagggtcacagtccatgatctgaccaactaagcttttaaaaatcaactattaccacccagaaaacagtcctacgtgatcatgtggccagggcatgcccgagtcctgcaagggtggcgggtggctgaggtcacaccaccactggagtggatgggcagtgccccacatggacagccattccccaggctatgaagtgacataggcctcccccacggtgcctgtgtacggagcctgatgacttcactgggagccttctggaatcctgcagagggtcaaggagcagggatgttggatgcccacctgtcaagagttcagatcaaagttgcgctgagagcgtcacaattttggttcagccttgacgcgtttgtccaacagctcattggctccctttgtatgatatcgtggtcttctcacatggtgcccagtcaccaatatttataatgaggtctaactacagcagtagtttttcatatatatctctaaaacattttgttatattgaaaaaagtaatagaaatcaagatgtgttgatgaaataaaatgtgtatctgagtgagaaaacaagtatggtgaggtcactttaatgtttcacagcgatctcagatctaggcctcaggtagaatggaagctgttctgcattcactgattaacgttgctaaactcttggtgaggcacgagctaccagccaattgctcttcatcacagctatctgtcttttagtgccacaaataaaagaaaatcaaatcttaaaaaat

SEQ ID NO: 440345 - DNA, 5233 bp, Homo sapiens
ccagccccttccgtccgccgcgctccgccgctgtcctccgccggcccgcgtgggaggacgatgggtcagcgcggaaaaagtgaatgagggcggcagcggtggcggcggtagccagcgcctgactcggcgggcccggagcaccgcccgcgtcccggcccccggcaccatggacgcgccgcgcgcctcggcggccaagcccccgaccgggaggaagatgaaggctcgtgctcccccacctcctggaaaggctgccactctgcatgtgcacagtgaccagaagcccccccacgatggggccctcgggtcgcagcagaacttggttcgcatgaaggaggcgctgagggccagcaccatggacgtcaccgtggtcctgcctagcgggctggagaagaggagcgtgctcaatgggagccatgcgatgatggacctactggttgaactttgccttcagaaccacctgaatccatcccaccatgcccttgaaattcggtcttcagaaacccaacaacctttgagttttaagccaaatactttgattgggaccctgaatgtgcatactgtgtttctgaaagaaaaagttcctgaagagaaggttaagcctggtccccctaaggtgcctgagaaatctgtgcgtttggtcgtgaattacctgcggacacaaaaagctgttgtgcgtgtgagccctgaggttcctctccagaatattctcccagtcatttgtgcaaagtgtgaggtcagcccagagcacgtggttctcctcagggacaacattgccggagaggagctggagctgtccaagtccctgaacgagctcgggataaaggagctctacgcgtgggacaacagaagagaaacctttaggaaatcatcacttggcaatgatgagacagataaagagaagaaaaaatttctgggatttttcaaagttaataaaagaagcaatagtaaggctgagcagctcgtgctgtcgggtgcagacagcgatgaggacacctccagggctgccccaggaaggggtttgaacgggctgtttaacgacccccaactccccatccatgcactcacgttctcttacgctgggtccatccctctcgctgggcagcatctcaggggtgtccgtgaagtcggagatgaagaagcgccgagcccctcctcctccaggttcagggccacctgtgcaagacaaggcatcggaaaaggtatctcttgggtcacagattgatttacagaagaagaagcggcgagcgccagctccccctccaccacagccaccaccaccgagtcccctgatccccaaccgcactgaggataaggaggagaacaggaagagcacgatggtaagcctgcccctggggtctggcagccactgcagcccggatggagccccgcaggtgctgtcagaggcggaggagaccgtgtcagttggcagctgttttgcgtcggaggacacgaccgaggactcaggagtgatgagttccccctcagacatcgtctctctggactcgcagcaggacagcatgaaatacaaagacaagtgggccacagaccaggaagactgcagtgaccaggacctcgctggaaccccagacctgggtccccagaagagccccttgtgggagaagaatggctctgagaactcacatctgagaactgaaaaagctgtcacagcctcaaatgatgaagaagacctattaattgctggagagttccgtaaaacccttgcagaacttgatgaagacctggaagaaatggaagacagctatgaaacagacaccagctccctcaccagctccatccatggtgcatccaaccactgcccacaggatgccatgatccctcacggcgacacagatgcaatcccagtaacattcataggggaagtttcagatgatcctgtggattcggggttgttttccaatagaaacaacaatgctgggtctttcgactcggagggtgttgccagcaggagagactccctggcgccacttcaagctgagcacagccagccccatgaaaaggcaagggaggaagtacctgccctgcaccccgcttcccatgacgtcggaaaaggaatccgtgtggccttatctaacatctctaaagatgggaatctaatggaaacggcgcccagggtgacttcttttgcttcgaatcttcacacagacaacctaaatgcaaaagtgaaagacaaagtgtatggctgtgctgacggggagaggactcaagccacagagagagtgaattcccaaccggtgaatgaaaaggacagcaacgataaaaacgctgccttggcaccaacatcatggcaccaacgaggccaaaacccagggaaaagctacagacttaagcacggcctcacaacgtataaaatcattcctccaaagtcagagatgcgatgttacgacagagatgtgtccctctccaccggagccattaagattgacgagctggggaacttggtgagtcctcacgccaccggcatcaggatcatttccctgtcttcgtctgtgcctgaagcagaatctcagcccattgggaaagtcagagagttctggaggtgcaactctgtggaaaaacacctgggccgaccctcagagagctctgccaggggacccccctccacccctgtgcccacgcagacgcagaatccagagagcagactccaagcagaccccaagccaatatcgccccagcagaagtctgcccaccatgagggccggaaccccctaggggaggggagaaaccagccccccaccatgggcatgggtcacgtgagggtgccagcagctcacaccacagaagtcacatttctcaagcctcagagaagaacgtccagccagtatgtggcctctgccattgccaagcgcataggagccccaaaagtccatgctgatgtggtgaggccacacggttatgccgagaagggttatgcaggcaaggcgccagtgctggctgcaccacctgtcactgtgaaagatgacaggacatccagcccacactcagagacacaaggatggaaggatggtgcccagtggccctgtgtcactcctcccaacaaccacggggaagatttggcagtgggagcccctcctaggggggaggtcattggcccacacaggaagttgtctactcaggacagacctgctgctatccacagaagctcctgtttctcactggttcagtcttcccagagggatcgtgtttctgtgggacagagctgtggtttcagtggaaagcaaagcacaagtagccaggaggccagctcagcatctgagcccagacgcgcacctgatggtacagacccaccccctccacacacatctgacactcaggcctgcagcagggagctggtcaatggctctgtgcgcgccccaggccacggcgagccttcccaccctccaggagggtctggcacagaaagccacattctcctagaaagagaggaaaagcccagtgtgttctctacagatggaaatgaaacagacagtatttggccacccagcatttttgggccgaagaaaaaattcaaacctgttgtccagagaccagtcccaaaagacacatccctgcactctgccctgatggaagccatccactctgcgggagggaaggacagactacgcaagacggcagaacacaccggggagggcaggccagcgaaactgtcctacacggaggcagagggcgaacgatctgcactgctggcagctatccgcgggcacagcggcacctgcagcctgaggaaggctctctctgcaccaaggacggcctccaggttcagcacgggcaccctcagcaacaccgcagacgcaaggcaagccttgatggacgccatccgctccggcacaggggctgcgagactgagaaaggtgcccttgctcgtgtgaatgaacagaggccagagaattgcagaaacccacctgtaatatgcccacaggcgtcactcaaggagtctgcatagccaggaacatcaagttttggtgttactttcttgtctacaggccaaaatgcgcacagttgattttcggtgtgttcctgtataacggcttgaaaggaaaggagaagatgctgtgtcgctgcgcagctcgtgtgccaaggaaatgtgttttgcctctgaatatcttaagttgctaataaacgattcttgttggcaggttaatgggactataaatgctggagcccagcactcacacttaattatatttatgggcaaagtaaaaagaatcatgccttagactgattttggacctttgagacttttaccacatacagatggatgaaactacttactgatttaagatcttttgaattttagaaaaaacatatgaatcagatggaacaatctgaatgtgatatgctccatgatgctgtgtgttttggtagtaagaaaaaaaaattgggaggcttttcaaaggtggctttgttaggtagtaaaactgctggattcttcttcctcaaatatttggggctaacacttcacagagggtcacagtccatgatctgaccaactaagcttttaaaaatcaactattaccacccagaaaacagtcctacgtgatcatgtggccagggcatgcccgagtcctgcaagggtggcgggtggctgaggtcacaccaccactggagtggatgggcagtgccccacatggacagccattccccaggctatgaagtgacataggcctcccccacggtgcctgtgtacggagcctgatgacttcactgggagccttctggaatcctgcagagggtcaaggagcagggatgttggatgcccacctgtcaagagttcagatcaaagttgcgctgagagcgtcacaattttggttcagccttgacgcgtttgtccaacagctcattggctccctttgtatgatatcgtggtcttctcacatggtgcccagtcaccaatatttataatgaggtctaactacagcagtagtttttcatatatatctctaaaacattttgttatattgaaaaaagtaatagaaatcaagatgtgttgatgaaataaaatgtgtatctgagtgagaaaacaagtatggtgaggtcactttaatgtttcacagcgatctcagatctaggcctcaggtagaatggaagctgttctgcattcactgattaacgttgctaaactcttggtgaggcacgagctaccagccaattgctcttcatcacagctatctgtcttttagtgccacaaataaaagaaaatcaaatcttaaaaaat

SEQ ID NO: 440346 - DNA, 5110 bp, Homo sapiens
ccagccccttccgtccgccgcgctccgccgctgtcctccgccggcccgcgtgggaggacgatgggtcagcgcggaaaaagtgaatgagggcggcagcggtggcggcggtagccagcgcctgactcggcgggcccggagcaccgcccgcgtcccggcccccggcaccatggacgcgccgcgcgcctcggcggccaagcccccgaccgggaggaagatgaaggctcgtgctcccccacctcctggaaaggctgccactctgcatgtgcacagtgaccagaagcccccccacgatggggccctcgggtcgcagcagaacttggttcgcatgaaggaggcgctgagggccagcaccatggacgtcaccgtggtcctgcctagcgggctggagaagaggagcgtgctcaatgggagccatgcgatgatggacctactggttgaactttgccttcagaaccacctgaatccatcccaccatgcccttgaaattcggtcttcagaaacccaacaacctttgagttttaagccaaatactttgattgggaccctgaatgtgcatactgtgtttctgaaagaaaaagttcctgaagagaaggttaagcctggtccccctaaggtgcctgagaaatctgtgcgtttggtcgtgaattacctgcggacacaaaaagctgttgtgcgtgtgagccctgaggttcctctccagaatattctcccagtcatttgtgcaaagtgtgaggtcagcccagagcacgtggttctcctcagggacaacattgccggagaggagctggagctgtccaagtccctgaacgagctcgggataaaggagctctacgcgtgggacaacagaagagaaacctttaggaaatcatcacttggcaatgatgagacagataaagagaagaaaaaatttctgggatttttcaaagttaataaaagaagcaatagtaaggctgagcagctcgtgctgtcgggtgcagacagcgatgaggacacctccagggctgccccaggaaggggtttgaacgggctgtttaacgacccccaactccccatccatgcactcacgttctcttacgctgggtccatccctctcgctgggcagcatctcaggggtgtccgtgaagtcggagatgaagaagcgccgagcccctcctcctccaggttcagggccacctgtgcaagacaaggcatcggaaaaggtatctcttgggtcacagattgatttacagaagaagaagcggcgagcgccagctccccctccaccacagccaccaccaccgagtcccctgatccccaaccgcactgaggataaggaggagaacaggaagagcacgatggtaagcctgcccctggggtctggcagccactgcagcccggatggagccccgcaggtgctgtcagaggcggaggagaccgtgtcagttggcagctgttttgcgtcggaggacacgaccgaggactcaggagtgatgagttccccctcagacatcgtctctctggactcgcagcaggacagcatgaaatacaaagacaagtgggccacagaccaggaagactgcagtgaccaggacctcgctggaaccccagacctgggtccccagaagagccccttgtgggagaagaatggctctgagaactcacatctgagaactgaaaaagctgtcacagcctcaaatgatgaagaagacctattaattgctggagagttccgtaaaacccttgcagaacttgatgaagacctggaagaaatggaagacagctatgaaacagacaccagctccctcaccagctccatccatggtgcatccaaccactgcccacaggatgccatgatccctcacggcgacacagatgcaatcccagtaacattcataggggaagtttcagatgatcctgtggattcggggttgttttccaatagaaacaacaatgctgggtctttcgactcggagggtgttgccagcaggagagactccctggcgccacttcaagctgagcacagccagccccatgaaaaggcaagggaggaagtacctgccctgcaccccgcttcccatgacgtcggaaaaggaatccgtgtggccttatctaacatctctaaagatgggaatctaatggaaacggcgcccagggtgacttcttttgcttcgaatcttcacacagacaacctaaatgcaaaagtgaaagacaaagtgtatggctgtgctgacggggagaggactcaagccacagagagagtgaattcccaaccggtgaatgaaaaggacagcaacgataaaaacgctgccttggcaccaacatcatggcaccaacgaggccaaaacccagggaaaagctacagacttaagcacggcctcacaacgtataaaatcattcctccaaagtcagagatgcgatgttacgacagagatgtgtccctctccaccggagccattaagattgacgagctggggaacttggtgagtcctcacgccaccggcatcaggatcatttccctgtcttcgtctgtgcctgaagcagaatctcagcccattgggaaagtcagagagttctggaggtgcaactctgtggaaaaacacctgggccgaccctcagagagctctgccaggggacccccctccacccctgtgcccacgcagacgcagaatccagagagcagactccaagcagaccccaagccaatatcgccccagcagaagtctgcccaccatgagggccggaaccccctaggggaggggagaaaccagccccccaccatgggcatgggtcacgtgagggtgccagcagctcacaccacagaagtcacatttctcaagcctcagagaagaacgtccagccagtatgtggcctctgccattgccaagcgcataggagccccaaaagtccatgctgatgtggtgaggccacacggttatgccgagaagggttatgcaggcaaggcgccagtgctggctgcaccacctgtcactgtgaaagatgacaggacatccagcccacactcagagacacaaggatggaaggatggtgcccagtggccctgtgtcactcctcccaacaaccacggggaagatttggcagtgggagcccctcctaggggggaggtcattggcccacacaggaagttgtctactcaggacagacctgctgctatccacagaagctcctgtttctcactggttcagtcttcccagagggatcgtgtttctgtgggacagagctgtggtttcagtggaaagcaaagcacaagtagccaggaggccagctcagcatctgagcccagacgcgcacctgatggtacagacccaccccctccacacacatctgacactcaggcctgcagcagggagctggtcaatggctctgtgcgcgccccaggccacggcgagccttcccaccctccaggagggtctggcacagaaagccacattctcctagaaagagaggaaaagcccagtgtgttctctacagatggaaatgaaacagacagtatttggccacccagcatttttgggccgaagaaaaaattcaaacctgttgtccagagaccagtcccaaaagacacatccctgcactctgccctgatggaagccatccactctgcgggagggaaggacagactacgcaagacggcagaacacaccggggagggcaggccagcgaaactgtcctacacggaggcagagggcgaacgatctgcactgctggcagctatccgcgggcacagcggcacctgcagcctgaggaaggtgcccttgctcgtgtgaatgaacagaggccagagaattgcagaaacccacctgtaatatgcccacaggcgtcactcaaggagtctgcatagccaggaacatcaagttttggtgttactttcttgtctacaggccaaaatgcgcacagttgattttcggtgtgttcctgtataacggcttgaaaggaaaggagaagatgctgtgtcgctgcgcagctcgtgtgccaaggaaatgtgttttgcctctgaatatcttaagttgctaataaacgattcttgttggcaggttaatgggactataaatgctggagcccagcactcacacttaattatatttatgggcaaagtaaaaagaatcatgccttagactgattttggacctttgagacttttaccacatacagatggatgaaactacttactgatttaagatcttttgaattttagaaaaaacatatgaatcagatggaacaatctgaatgtgatatgctccatgatgctgtgtgttttggtagtaagaaaaaaaaattgggaggcttttcaaaggtggctttgttaggtagtaaaactgctggattcttcttcctcaaatatttggggctaacacttcacagagggtcacagtccatgatctgaccaactaagcttttaaaaatcaactattaccacccagaaaacagtcctacgtgatcatgtggccagggcatgcccgagtcctgcaagggtggcgggtggctgaggtcacaccaccactggagtggatgggcagtgccccacatggacagccattccccaggctatgaagtgacataggcctcccccacggtgcctgtgtacggagcctgatgacttcactgggagccttctggaatcctgcagagggtcaaggagcagggatgttggatgcccacctgtcaagagttcagatcaaagttgcgctgagagcgtcacaattttggttcagccttgacgcgtttgtccaacagctcattggctccctttgtatgatatcgtggtcttctcacatggtgcccagtcaccaatatttataatgaggtctaactacagcagtagtttttcatatatatctctaaaacattttgttatattgaaaaaagtaatagaaatcaagatgtgttgatgaaataaaatgtgtatctgagtgagaaaacaagtatggtgaggtcactttaatgtttcacagcgatctcagatctaggcctcaggtagaatggaagctgttctgcattcactgattaacgttgctaaactcttggtgaggcacgagctaccagccaattgctcttcatcacagctatctgtcttttagtgccacaaataaaagaaaatcaaatcttaaaaaat

SEQ ID NO: 440347 - DNA, 1619 bp, Homo sapiens
agttcccttgacctcgggcctctgcatcctgctagtcgtccttccctggcagcttttacgaggaagctggagcgtgagaaggtctgtgaggacagccctgatcacagcctcctttctgcaggtcaaaggaactgggaagggggttccaggagtactattgcaagagtggctgtgcacagagctctctagcaccagaagatctgcatcctgggcttattgacataccaaataactgtgaatctctcttccctgcaggtgcccttgctcgtgtgaatgaacagaggccagagaattgcagaaacccacctgtaatatgcccacaggcgtcactcaaggagtctgcatagccaggaacatcaagttttggtgttactttcttgtctacaggccaaaatgcgcacagttgattttcggtgtgttcctgtataacggcttgaaaggaaaggagaagatgctgtgtcgctgcgcagctcgtgtgccaaggaaatgtgttttgcctctgaatatcttaagttgctaataaacgattcttgttggcaggttaatgggactataaatgctggagcccagcactcacacttaattatatttatgggcaaagtaaaaagaatcatgccttagactgattttggacctttgagacttttaccacatacagatggatgaaactacttactgatttaagatcttttgaattttagaaaaaacatatgaatcagatggaacaatctgaatgtgatatgctccatgatgctgtgtgttttggtagtaagaaaaaaaaattgggaggcttttcaaaggtggctttgttaggtagtaaaactgctggattcttcttcctcaaatatttggggctaacacttcacagagggtcacagtccatgatctgaccaactaagcttttaaaaatcaactattaccacccagaaaacagtcctacgtgatcatgtggccagggcatgcccgagtcctgcaagggtggcgggtggctgaggtcacaccaccactggagtggatgggcagtgccccacatggacagccattccccaggctatgaagtgacataggcctcccccacggtgcctgtgtacggagcctgatgacttcactgggagccttctggaatcctgcagagggtcaaggagcagggatgttggatgcccacctgtcaagagttcagatcaaagttgcgctgagagcgtcacaattttggttcagccttgacgcgtttgtccaacagctcattggctccctttgtatgatatcgtggtcttctcacatggtgcccagtcaccaatatttataatgaggtctaactacagcagtagtttttcatatatatctctaaaacattttgttatattgaaaaaagtaatagaaatcaagatgtgttgatgaaataaaatgtgtatctgagtgagaaaacaagtatggtgaggtcactttaatgtttcacagcgatctcagatctaggcctcaggtagaatggaagctgttctgcattcactgattaacgttgctaaactcttggtgaggcacgagctaccagccaattgctcttcatcacagctatctgtcttttagtgccacaaataaaagaaaatcaaatcttaaaaaat

SEQ ID NO: 440348 - DNA, 1571 bp, Homo sapiens
ccagccccttccgtccgccgcgctccgccgctgtcctccgccggcccgcgtgggaggacgatgggtcagcgcggaaaaagtgaatgagggcggcagcggtggcggcggtagccagcgcctgactcggcgggcccggagcaccgcccgcgtcccggcccccggcaccatggacgcgccgcgcgcctcggcggccaagcccccgaccgggaggaagatgaaggctcgtgctcccccacctcctggaaaggctgccactctgcatgtgcacagtgaccagaagcccccccacgatggggccctcgggtcgcagcagaacttggttcgcatgaaggaggcgctgagggccagcaccatggacgtcaccgtggtcctgcctagcgggctggagaagaggagcgtgctcaatgggagccatgcgatgatggacctactggttgaactttgccttcagaaccacctgaatccatcccaccatgcccttgaaattcggtcttcagaaacccaacaacctttgagttttaagccaaatactttgattgggaccctgaatgtgcatactgtgtttctgaaagaaaaagttcctgaagagaaggttaagcctggtccccctaaggtgcctgagaaatctgtgcgtttggtcgtgaattacctgcggacacaaaaagctgttgtgcgtgtgagccctgaggttcctctccagaatattctcccagtcatttgtgcaaagtgtgaggtcagcccagagcacgtggttctcctcagggacaacattgccggagaggagctggagctgtccaagtccctgaacgagctcgggataaaggagctctacgcgtgggacaacagaagagaaacctttaggaaatcatcacttggcaatgatgagacagataaagagaagaaaaaatttctgggatttttcaaagttaataaaagaagcaatagtaaggctgagcagctcgtgctgtcgggtgcagacagcgatgaggacacctccagggctgccccaggaaggggtttgaacgggctgtttaacgacccccaactccccatccatgcactcacgttctcttacgctgggtccatccctctcgctgggcagcatctcaggggtgtccgtgaagtcggagatgaagaagcgccgagcccctcctcctccaggttcagggccacctgtgcaagacaaggcatcggaaaaggtatctcttgggtcacagattgatttacagaagaagaagcggcgagcgccagctccccctccaccacagccaccaccaccgagtcccctgatccccaaccgcactgaggataaggaggagaacaggaagagcacgatgggtgagtgaggctcggcctgccgtctgcatgcggggatgcttgctctgtcctggaatgtcagctctgatgtgaactcctgcagtggcctcatccataatgacattaacccaaaaaatattaatgctaaagaaagaagggctggaaagaaataattgcaagttcacttcatatcttactagcagtatttggtgggcattatgtgagcatttaggaggcgggggacggtggaaggg

SEQ ID NO: 440349 - DNA, 700 bp, Homo sapiens
tgcggtggctcaagcctgtaatcccagcactttgggaggcggaggcaggtggatcacgaggtcaagagatcgaggtcatcctggccagcatggtgacaccccgtctctactaaaaatacaaaaattacccaggtgtaatggcacacgcctgtagtcccagctactcgggaggctgaggcaggagaatcacttgaacccgggaggcagagcttgcagagagctgagatcgcgccactgcactccaggatattctaaaataaagtaacatcaagttgccgtaatatttatgacactatttaaattgtatcaatataattttaaacaaagtgtatttttgtgtatatttagcatattggtatacacgctgttctctatatatgttgttctttaataagagtctatcggccgggcgtaatggctcatgcctgtaatcccagcactttgggaggctgaggtgggcggatcaactgaggtcgggagttcgagaccagcctgacaacatggagaaaccctgtctctattaaaaatacaaaaaagttagccgggtgtggtggcgcatgcctgtaatcccagctgctcgggaggctgacgcaggagaatcgcttcaacctgggaggcagaggttgcagtgagccaagattgcaccattgcactccagcctgggcaacaagagcaaaattgtatctcaaaacaaaaaaaa

SEQ ID NO: 440350 - DNA, 756 bp, Homo sapiens
caacaactttaccttccacctgcaaaaatgttatgaacactttcattcccttcataactagaaaatgataatcccaaagcttcagataagccaaatatcagcacttcaaagatgcatctaaatctgagccagaagttcaagaacaaactttctaatgtttctgggttaaaatacagcaagttgtccttgtctacaaatgtagcaccacccagattgcagccctgggtctccctgtcagtccctatgttttaaaacagaagggtgtgaaatcaaaacagcttcaacctcgaaggcctccagggatattctaaaataaagtaacatcaagttgccgtaatatttatgacactatttaaattgtatcaatataattttaaacaaagtgtatttttgtgtatatttagcatattggtatacacgctgttctctatatatgttgttctttaataagagtctatcggccgggcgtaatggctcatgcctgtaatcccagcactttgggaggctgaggtgggcggatcaactgaggtcgggagttcgagaccagcctgacaacatggagaaaccctgtctctattaaaaatacaaaaaagttagccgggtgtggtggcgcatgcctgtaatcccagctgctcgggaggctgacgcaggagaatcgcttcaacctgggaggcagaggttgcagtgagccaagattgcaccattgcactccagcctgggcaacaagagcaaaattgtatctcaaaacaaaaaaaa

SEQ ID NO: 440351 - DNA, 1742 bp, Homo sapiens
cacagctctctttcccaaggagtaatcagagggtgagaacgtggagcctggtggacaggtgaaagcactgggatctttctgcccagaaaggggaaagttgcacatttatatcctagagggaagcgacacgagtgcttctccctgtgctgaggtacaggagccatgtggctagaaatcctcctcacttcagtgctgggctttgccatctactggttcatctcccgggacaaagaggaaactttgccacttgaagatgggtggtgggggccaggcacgaggtccgcagccagggaggacgacagcatccgccctttcaaggtggaaacgtcagatgaggagatccacgacttacaccagaggatcgataagttccgtttcaccccacctttggaggacagctgcttccactatggcttcaactccaactacctgaagaaagtcatctcctactggcggaatgaatttgactggaagaagcaggtggagattctcaacagacaccctcacttcaagactaagattgaagggctggacatccacttcatccacgtgaagcccccccagctgcccgcaggccataccccgaagcccttgctgatggtgcacggctggcccggctctttctacgagttttataagatcatcccactcctgactgaccccaagaaccatggcctgagcgatgagcacgtttttgaagtcatctgcccttccatccctggctatggcttctcagaggcatcctccaagaaggggttcaactcggtggccaccgccaggatcttttacaagctgatgctgcggctgggcttccaggaattctacattcaaggaggggactgggggtccctgatctgcactaatatggcccagctggtgcccagccacgtgaaaggcctgcacttgaacatggctttggttttaagcaacttctctaccctgaccctcctcctgggacagcgtttcgggaggtttcttggcctcactgagagggatgtggagctgctgtaccccgtcaaggagaaggtattctacagcctgatgagggagagcggctacatgcacatccagtgcaccaagcctgacaccgtaggctctgctctgaatgactctcctgtgggtctggctgcctatattctagagaagttttccacctggaccaatacggaattccgatacctggaggatggaggcctggaaaggaagttctccctggacgacctgctgaccaacgtcatgctctactggacaacaggcaccatcatctcctcccagcgcttctacaaggagaacctgggacagggctggatgacccagaagcatgagcggatgaaggtctatgtgcccactggcttctctgccttcccttttgagctattgcacacgcctgaaaagtgggtgaggttcaagtacccaaagctcatctcctattcctacatggttcgtgggggccactttgcggcctttgaggagccggagctgctcgcccaggacatccgcaagttcctgtcggtgctggagcggcaatgacccacccctctccccccgcctgccacctccccccacaagtgccctccaggcttttcttggggaagataccccttttctgaggaatgagtttgcctccgtcccctgcccatgctgggagcccacgctcaccccctcacccctccaagctcactccccaacccccaactccgtgtggtaagcaacatggctttgatgataaacgactttactct

SEQ ID NO: 440352 - DNA, 488 bp, Homo sapiens
tgcatgtatgtgttcctgcctagctctaaagatggacagatttgttgtgactgcaatatttttgcatttagtaaggttacaacgtataagtacatctcagtcacctataattgggttctgaatctctccaactttatctgactgtaagtcacattgtggaagaaggctgttctcatgacatacatccctctctggctggcgttttgcaaacatacctcttcaatcttagtcttgaagtgagggtatctgttgagaatctccacctgcttcttccagtcaaattcattccgccagtaggagatgactttcttcaggtagttggagttgaagccatagtggaagcagctgtcctccaaaggtggggtgaaacggaacttatcgatcctctggtgtaagtcgtggatctcctcatctgacgtttccaccttgaaagggcggatgctgtcgtcctccctggctgcggacctcaacggggagaacggggataa

SEQ ID NO: 440353 - DNA, 5734 bp, Homo sapiens
cctagtgctggtaccctcggggttaccgggcatcggaacacgccccgcgctgctgggtcccgccagacacgccgccgccgcaggaaagtctacagtttggtaccccaggactcgctggtcaggaaagccctgcaggacatgagtgttaggcccgacgcctggcccttggcagcttgggaggtggctggggctgcttttgcctttgccagagacagctccaactgaggacctctccaacgggcccatccacagtccttccttcccctagtgtctgggaagacaggcgcgatgatggactccccgttcctggagctgtggcagtccaaggcagtgtccatcagggagcagctgggactcggggaccggcccaacgactcctattgctacaactcggccaaaaacagcaccgtgctccagggggtcacctttggtggcatccccactgtcctgctcatagacgtcagctgcttcctgttcttaatcttggtgttttctattataagaagaagattctgggactatggccgcattgccctggtgtcagaagcagacagcgagtccagatttcagagattgtcatcgacttcctcctcaggtcaacaagactttgaaaatgagctgggatgctgtccctggctgactgccatcttccgtctgcatgatgaccagatcctggaatggtgtggggaggacgccatccactacctgtccttccagaggcacatcatcttcctgttggtggtggtcagctttttgtccctgtgtgtcatcctgcctgtcaacctctcaggggatttgctggacaaagacccgtatagttttgggaggacaacaatagcaaacctacagactgacaatgacctcctttggctgcacaccatctttgctgtcatttacctcttcttcactgtgggtttcatgcggcaccacactcagtccattaagtacaaagaggagaacctggtgaggcggaccctgttcatcacaggactccccagagatgccaggaaggagactgtggagagccacttccgggacgcgtatcccacgtgtgaggtggttgatgtgcagctgtgctacaacgtggccaaactgatctacctgtgcaaggagaaaaagaagactgagaagagcctgacctattacacaaacctgcaggtgaagacaggccagcggaccctcatcaaccccaagccctgtggccagttttgctgctgtgaagtgctgggctgtgagtgggaagacgccatctcttactacacacggatgaaggacaggctgctggagaggatcacagaggaagaacgccacgtccaggaccagcccctgggaatggccttcgtcaccttccaggagaagtccatggccacctacatcctgaaagatttcaatgcctgcaagtgtcagagccttcagtgcaaaggtgagccccagccgtcctcccatagcagggagctctatacctccaagtggacagtcacctttgctgctgaccctgaggacatctgctggaagaacctctctatccagggcctccgctggtggctacagtggctgggcatcaacttcaccctcttcctggggctatttttcctgaccacaccctccatcatcctgtccaccatggacaagtttaatgtcaccaaacccatccatgcgctgaataacccgatcatcagccagttcttccccaccctcctgctctggtccttctcggccctgctcccctccattgtctactactctacactgctggagtctcactggaccaagtcgggggaaaaccagatcatgatgaccaaagtctacatattcttgatcttcatggtgctgatcctgccctccctgggtctcaccagtctagattttttcttccggtggctctttgacaaaacttcctcggaggcctccatcaggttggagtgcgtcttcctgcctgaccagggtgccttctttgtgaactatgtcatcgcctcggccttcatcggcaatggcatggagctgctgcggctgccaggtctcatcctctataccttccgcatgatcatggccaagacggctgctgaccgcaggaatgtcaagcagaaccaggccttccagtacgagtttggagccatgtatgcatggatgctgtgtgtcttcactgtcatcgtggcctacagcatcacttgtcccatcatcgcgccatttggcctcatctacatcctgctcaagcacatggtggaccggcacaacctctacttcgtctacctcccagccaagctggagaaggggatccactttgccgctgtgaaccaggccttggcagcccccatcctgtgcctcttctggctctacttcttttccttcctgcgcctgggtatgaaggcccccgccactctgttcaccttcctggtgctgctgctcaccatcctggtctgcctggctcacacctgctttggatgcttcaagcacctcagccctctgaactacaaaacagaagagcctgcaagtgacaaaggaagtgaggcagaggcccacatgcccccaccgttcacaccctacgtgcctcggattctgaacggcttggcctcggagaggacagcactgtctccgcagcagcagcagcagcagacctatggtgccatccacaacatcagcgggactatccctggacagtgcttggcgcagagcgccacgggcagtgtggctgctgccccccaggaggcctgaggctgggtctcactgctctgaaaagacacaaccagaatggcctggggctcaggcccttggctgagtgggaatgcgttgggactgcccagctgagctatcaggtgcccatcttttctggtcccagcagtggtgaggagagcacaggcaggcctcgcccctcccttgctcacccagtttcccctccggcacaagcttccagctctgcagctggggtgacatccccagtggtttgtcgccaagaccatgtggtggacttttcgccccccaaactgatgagtccgggagaatatatggagagagagatgtaacaaggggaaggcctcctcccttctgagcacacacacaaccgataaccaaagagatgctgcagtccaggtctgaggtcccgctggcatccagctccctgctccatggccagtccctccccagcccagcagtccctccaggctacatccaggagtaagctatggggaacaggttgggaggtggccagtgctcctgccagctgtgcacacatctctgtatcccgctagagttctgtgtttttgtatcatgttgtcagggacgctagctgggtcagggttaccccatagcaggcagggacaaggaccactcataatatgcccattggaccacagttaagatccagcctctctcacctcttcagggctgagtgcatgagtctgcacctccaggcaggctctgtgcagtactcaccccctccgtctgctccctccaaggtgtgggggtgggcagtgctcagggcctcctcggagccaaaggacagcatggtcggcacagaggaaggggtacctgggctgggtgcagggccatcccactgcccttgagctgtggctctggcaggaaggaggggcagcccatccctcttctccctcctggggattctggggaatgggatgcaacttaagacttctgcctgagaagcctcctccctgctgcctccagggggcaccaaggcacaagcctgtgcagtaggggcgggatgggggtgtggaagagcaggtccaggctcctagcacaactggcctggggccttggcacctctgtaggccctgcctgtgcctgtccgctggcctggggggcctgggcttatctgggccttctcactcagggactctcttgacgctgacttgcccccgcagtggtggccagtgctgcctctgctccaagctgcccctgcgctgggaggggtgggggcggtgccattggtctggtgcagcatagccctggccagtggcctcatccccagcaggcctcccgtgcctctgccagcaaggaggggccggccagctctgcttgcacagggggccccatgtggggtcagcgcacgctcatgtcactgagttccagccgcttttagagtaaagtcgtttatcatcaaagccatgttgcttaccacacggagttgggggttggggagtgagcttggaggggtgagggggtgagcgtgggctcccagcatgggcaggggacggaggcaaactcattcctcagaaaaggggtatcttccccaagaaaagcctggagggcacttgtggggggaggtggcaggcggggggagaggggtgggtcattgccgctccagcaccgacaggaacttgcggatgtcctgggcgagcagctccggctcctcaaaggccgcaaagtggcccccacgaaccatgtaggaataggagatgagctttgggtacttgaacctcacccacttttcaggcgtgtgcaatagctcaaaagggaaggcagagaagccagtgggcacatagaccttcatccgctcatgcttctgggtcatccagccctgtcccaggttctccttgtagaagcgctgggaggagatgatggtgcctgttgtccagtagagcatgacgttggtcagcaggtcgtccagggagaacttcctttccaggcctccatcctccaggtatcggaattccgtattggtccaggtggaaaacttctctagaatataggcagccagacccacaggagagtcattcagagcagagcctacggtgtcaggcttggtgcactggatgtgcatgtagccgctctccctcatcaggctgtagaataccttctccttgacggggtacagcagctccacatccctctcagtgaggccaagaaacctcccgaaacgctgtcccaggaggagggtcagggtagagaagttgcttaaaaccaaagccatgttcaagtgcaggcctttcacgtggctgggcaccagctgggccatattagtgcagatcagggacccccagtcccctccttgaatgtagaattcctggaagcccagccgcagcatcagcttgtaaaagatcctggcggtggccaccgagttgaaccccttcttggaggatgcctctgagaagccatagccagggatggaagggcagatgacttcaaaaacgtgctcatcgctcaggccatggttcttggggtcagtcaggagtgggatgatcttataaaactcgtagaaagagccgggccagccgtgcaccatcagcaagggcttcggggtatggcctgcgggcagctgggggggcttcacgtggatgaagtggatgtccagcccttcaatcttagtcttgaagtgagggtatctgttgagaatctccacctgcttcttccagtcaaattcattccgccagtaggagatgactttcttcaggtagttggagttgaagccatagtggaagcagctgtcctccaaaggtggggtgaaacggaacttatcgatcctctggtgtaagtcgtggatctcctcatctgacgtttccaccttgaaagggcggatgctgtcgtcctccctggctgcggacctcgtgcctggcccccaccacccatcttcaagtggcaaagtttcctctttgtcccgggagatgaaccagtagatggcaaagcccagcactgaagtgaggaggatttctagccacatggctcggtctcggctcgcaggctccggcggcggcaggcgcgcgatctctccggctcctggctc

SEQ ID NO: 440354 - DNA, 6180 bp, Homo sapiens
cctagtgctggtaccctcggggttaccgggcatcggaacacgccccgcgctgctgggtcccgccagacacgccgccgccgcaggaaagtctacagtttggtaccccaggactcgctggtcaggaaagccctgcaggacatgagtgttaggcccgacgcctggcccttggcagcttgggaggtggctggggctgcttttgcctttgccagagacagctccaactgaggacctctccaacgggcccatccacagtccttccttcccctagtgtctgggaagacaggcgcgatgatggactccccgttcctggagctgtggcagtccaaggcagtgtccatcagggagcagctgggactcggggaccggcccaacgactcctattgctacaactcggccaaaaacagcaccgtgctccagggggtcacctttggtggcatccccactgtcctgctcatagacgtcagctgcttcctgttcttaatcttggtgttttctattataagaagaagattctgggactatggccgcattgccctggtgtcagaagcagacagcgagtccagatttcagagattgtcatcgacttcctcctcaggtcaacaagactttgaaaatgagctgggatgctgtccctggctgactgccatcttccgtctgcatgatgaccagatcctggaatggtgtggggaggacgccatccactacctgtccttccagaggcacatcatcttcctgttggtggtggtcagctttttgtccctgtgtgtcatcctgcctgtcaacctctcaggggatttgctggacaaagacccgtatagttttgggaggacaacaatagcaaacctacagactgacaatgacctcctttggctgcacaccatctttgctgtcatttacctcttcttcactgtgggtttcatgcggcaccacactcagtccattaagtacaaagaggagaacctggtgaggcggaccctgttcatcacaggactccccagagatgccaggaaggagactgtggagagccacttccgggacgcgtatcccacgtgtgaggtggttgatgtgcagctgtgctacaacgtggccaaactgatctacctgtgcaaggagaaaaagaagactgagaagagcctgacctattacacaaacctgcaggtgaagacaggccagcggaccctcatcaaccccaagccctgtggccagttttgctgctgtgaagtgctgggctgtgagtgggaagacgccatctcttactacacacggatgaaggacaggctgctggagaggatcacagaggaagaacgccacgtccaggaccagcccctgggaatggccttcgtcaccttccaggagaagtccatggccacctacatcctgaaagatttcaatgcctgcaagtgtcagagccttcagtgcaaaggtgagccccagccgtcctcccatagcagggagctctatacctccaagtggacagtcacctttgctgctgaccctgaggacatctgctggaagaacctctctatccagggcctccgctggtggctacagtggctgggcatcaacttcaccctcttcctggggctatttttcctgaccacaccctccatcatcctgtccaccatggacaagtttaatgtcaccaaacccatccatgcgctgaataacccgatcatcagccagttcttccccaccctcctgctctggtccttctcggccctgctcccctccattgtctactactctacactgctggagtctcactggaccaagtcgggggaaaaccagatcatgatgaccaaagtctacatattcttgatcttcatggtgctgatcctgccctccctgggtctcaccagtctagattttttcttccggtggctctttgacaaaacttcctcggaggcctccatcaggttggagtgcgtcttcctgcctgaccagggtgccttctttgtgaactatgtcatcgcctcggccttcatcggcaatggcatggagctgctgcggctgccaggtctcatcctctataccttccgcatgatcatggccaagacggctgctgaccgcaggaatgtcaagcagaaccaggccttccagtacgagtttggagccatgtatgcatggatgctgtgtgtcttcactgtcatcgtggcctacagcatcacttgtcccatcatcgcgccatttggcctcatctacatcctgctcaagcacatggtggaccggcacaacctctacttcgtctacctcccagccaagctggagaaggggatccactttgccgctgtgaaccaggccttggcagcccccatcctgtgcctcttctggctctacttcttttccttcctgcgcctgggtatgaaggcccccgccactctgttcaccttcctggtgctgctgctcaccatcctggtctgcctggctcacacctgctttggatgcttcaagcacctcagccctctgaactacaaaacagaagagcctgcaagtgacaaaggaagtgaggcagaggcccacatgcccccaccgttcacaccctacgtgcctcggattctgaacggcttggcctcggagaggacagcactgtctccgcagcagcagcagcagcagacctatggtgccatccacaacatcagcgggactatccctggacagtgcttggcgcagagcgccacgggcagtgtggctgctgccccccaggaggcctgaggctgggtctcactgctctgaaaagacacaaccagaatggcctggggctcaggcccttggctgagtgggaatgcgttgggactgcccagctgagctatcaggtgcccatcttttctggtcccagcagtggtgaggagagcacaggcaggcctcgcccctcccttgctcacccagtttcccctccggcacaagcttccagctctgcagctggggtgacatccccagtggtttgtcgccaagaccatgtggtggacttttcgccccccaaactgatgagtccgggagaatatatggagagagagatgtaacaaggggaaggcctcctcccttctgagcacacacacaaccgataaccaaagagatgctgcagtccaggtctgaggtcccgctggcatccagctccctgctccatggccagtccctccccagcccagcagtccctccaggctacatccaggagtaagctatggggaacaggttgggaggtggccagtgctcctgccagctgtgcacacatctctgtatcccgctagagttctgtgtttttgtatcatgttgtcagggacgctagctgggtcagggttaccccatagcaggcagggacaaggaccactcataatatgcccattggaccacagttaagatccagcctctctcacctcttcagggctgagtgcatgagtctgcacctccaggcaggctctgtgcagtactcaccccctccgtctgctccctccaaggtgtgggggtgggcagtgctcagggcctcctcggagccaaaggacagcatggtcggcacagaggaaggggtacctgggctgggtgcagggccatcccactgcccttgagctgtggctctggcaggaaggaggggcagcccatccctcttctccctcctggggattctggggaatgggatgcaacttaagacttctgcctgagaagcctcctccctgctgcctccagggggcaccaaggcacaagcctgtgcagtaggggcgggatgggggtgtggaagagcaggtccaggctcctagcacaactggcctggggccttggcacctctgtaggccctgcctgtgcctgtccgctggcctggggggcctgggcttatctgggccttctcactcagggactctcttgacgctgacttgcccccgcagtggtggccagtgctgcctctgctccaagctgcccctgcgctgggaggggtgggggcggtgccattggtctggtgcagcatagccctggccagtggcctcatccccagcaggcctcccgtgcctctgccagcaaggaggggccggccagctctgcttgcacagggggccccatgtggggtcagcgcacgctcatgtcactgagttccagccgcttttagagtaaagtcgtttatcatcaaagccatgttgcttaccacacggagttgggggttggggagtgagcttggaggggtgagggggtgagcgtgggctcccagcatgggcaggggacggaggcaaactcattcctcagaaaaggggtatcttccccaagaaaagcctggagggcacttgtggggggaggtggcaggcggggggagaggggtgggtcattgccgctccagcaccgacaggaacttgcggatgtcctgggcgagcagctccggctcctcaaaggccgcaaagtggcccccacgaaccatgtaggaataggagatgagctttgggtacttgaacctcacccacttttcaggcgtgtgcaatagctcaaaagggaaggcagagaagccagtgggcacatagaccttcatccgctcatgcttctgggtcatccagccctgtcccaggttctccttgtagaagcgctgggaggagatgatggtgcctgttgtccagtagagcatgacgttggtcagcaggtcgtccagggagaacttcctttccaggcctccatcctccaggtatcggaattccgtattggtccaggtggaaaacttctctagaatataggcagccagacccacaggagagtcattcagagcagagcctacggtgtcaggcttggtgcactggatgtgcatgtagccgctctccctcatcaggctgtagaataccttctccttgacggggtacagcagctccacatccctctcagtgaggccaagaaacctcccgaaacgctgtcccaggaggagggtcagggtagagaagttgcttaaaaccaaagccatgttcaagtgcaggcctttcacgtggctgggcaccagctgggccatattagtgcagatcagggacccccagtcccctccttgaatgtagaattcctggaagcccagccgcagcatcagcttgtaaaagatcctggcggtggccaccgagttgaaccccttcttggaggatgcctctgagaagccatagccagggatggaagggcagatgacttcaaaaacgtgctcatcgctcaggccatggttcttggggtcagtcaggagtgggatgatcttataaaactcgtagaaagagccgggccagccgtgcaccatcagcaagggcttcggggtatggcctgcgggcagctgggggggcttcacgtggatgaagtggatgtccagcccttcaatcttagtcttgaagtgagggtatctgttgagaatctccacctgcttcttccagtcaaattcattccgccagtaggagatgactttcttcaggtagttggagttgaagccatagtggaagcagctgtcctccaaaggtggggtgaaacggaacttatcgatcctctggtgtaagtcgtggatctcctcatctgacgtttccaccttgaaagggcggatgctgtcgtcctccctggctgcggacctcgtgcctggcccccaccacccatcttcaagtggcaaagtttcctctttgtcccgggagatgaaccagtagatggcaaagcccagcactgaagtgaggaggatttctagccacatggctcacaaagcctgtttggtggtctcttcacacggacgcgcatgaaaatcagtgttccgacttgggtgacaaattaagtgcatttcaccgccgagcgagccacggccctggaagcagagctcgcccaggccaggggacgcggtgcgctctcggggtcgcgagcctccctccctgcggcgtccgcccacagtctgggacgcggaattccctgcgagaagtccgcggtcgcctgcaggctccttcccccagtaggcggcacgcgcagtctcctggccggggcaggagctgggggcggaccaactacaagtccctctgcacccctgcgggccgaccgcagccccgacccctcggcgccccggcccgccgcccaccccggcggccgagcccgcgcggagcccgaaccgcgtctgcgtccggggagtgcgggcccggccggccccgggcgcttacggtctcggctcgcaggctccggcggcggcaggcgcgcgatctctccggctcctggctc

SEQ ID NO: 440355 - DNA, 3449 bp, Homo sapiens
tgagaactgctctcttgtgcttccttctgtgatcatgagaactgtataactgtgctttctcttttgccctggctgctaggaaattctgcaggtgtcatattttcggtcttaatgtcctaaatggatgtcggtgtttcttcatatgtcctttatggccactgtctgtgtcctgttgggagaagggcaggaggggagggatgcagtgtggaagctcatgcctgtccaggccaagcacaaatccatttgctgacagccctacgtgcctcggattctgaacggcttggcctcggagaggacagcactgtctccgcagcagcagcagcagcagacctatggtgccatccacaacatcagcgggactatccctggacagtgcttggcgcagagcgccacgggcagtgtggctgctgccccccaggaggcctgaggctgggtctcactgctctgaaaagacacaaccagaatggcctggggctcaggcccttggctgagtgggaatgcgttgggactgcccagctgagctatcaggtgcccatcttttctggtcccagcagtggtgaggagagcacaggcaggcctcgcccctcccttgctcacccagtttcccctccggcacaagcttccagctctgcagctggggtgacatccccagtggtttgtcgccaagaccatgtggtggacttttcgccccccaaactgatgagtccgggagaatatatggagagagagatgtaacaaggggaaggcctcctcccttctgagcacacacacaaccgataaccaaagagatgctgcagtccaggtctgaggtcccgctggcatccagctccctgctccatggccagtccctccccagcccagcagtccctccaggctacatccaggagtaagctatggggaacaggttgggaggtggccagtgctcctgccagctgtgcacacatctctgtatcccgctagagttctgtgtttttgtatcatgttgtcagggacgctagctgggtcagggttaccccatagcaggcagggacaaggaccactcataatatgcccattggaccacagttaagatccagcctctctcacctcttcagggctgagtgcatgagtctgcacctccaggcaggctctgtgcagtactcaccccctccgtctgctccctccaaggtgtgggggtgggcagtgctcagggcctcctcggagccaaaggacagcatggtcggcacagaggaaggggtacctgggctgggtgcagggccatcccactgcccttgagctgtggctctggcaggaaggaggggcagcccatccctcttctccctcctggggattctggggaatgggatgcaacttaagacttctgcctgagaagcctcctccctgctgcctccagggggcaccaaggcacaagcctgtgcagtaggggcgggatgggggtgtggaagagcaggtccaggctcctagcacaactggcctggggccttggcacctctgtaggccctgcctgtgcctgtccgctggcctggggggcctgggcttatctgggccttctcactcagggactctcttgacgctgacttgcccccgcagtggtggccagtgctgcctctgctccaagctgcccctgcgctgggaggggtgggggcggtgccattggtctggtgcagcatagccctggccagtggcctcatccccagcaggcctcccgtgcctctgccagcaaggaggggccggccagctctgcttgcacagggggccccatgtggggtcagcgcacgctcatgtcactgagttccagccgcttttagagtaaagtcgtttatcatcaaagccatgttgcttaccacacggagttgggggttggggagtgagcttggaggggtgagggggtgagcgtgggctcccagcatgggcaggggacggaggcaaactcattcctcagaaaaggggtatcttccccaagaaaagcctggagggcacttgtggggggaggtggcaggcggggggagaggggtgggtcattgccgctccagcaccgacaggaacttgcggatgtcctgggcgagcagctccggctcctcaaaggccgcaaagtggcccccacgaaccatgtaggaataggagatgagctttgggtacttgaacctcacccacttttcaggcgtgtgcaatagctcaaaagggaaggcagagaagccagtgggcacatagaccttcatccgctcatgcttctgggtcatccagccctgtcccaggttctccttgtagaagcgctgggaggagatgatggtgcctgttgtccagtagagcatgacgttggtcagcaggtcgtccagggagaacttcctttccaggcctccatcctccaggtatcggaattccgtattggtccaggtggaaaacttctctagaatataggcagccagacccacaggagagtcattcagagcagagcctacggtgtcaggcttggtgcactggatgtgcatgtagccgctctccctcatcaggctgtagaataccttctccttgacggggtacagcagctccacatccctctcagtgaggccaagaaacctcccgaaacgctgtcccaggaggagggtcagggtagagaagttgcttaaaaccaaagccatgttcaagtgcaggcctttcacgtggctgggcaccagctgggccatattagtgcagatcagggacccccagtcccctccttgaatgtagaattcctggaagcccagccgcagcatcagcttgtaaaagatcctggcggtggccaccgagttgaaccccttcttggaggatgcctctgagaagccatagccagggatggaagggcagatgacttcaaaaacgtgctcatcgctcaggccatggttcttggggtcagtcaggagtgggatgatcttataaaactcgtagaaagagccgggccagccgtgcaccatcagcaagggcttcggggtatggcctgcgggcagctgggggggcttcacgtggatgaagtggatgtccagcccttcaatcttagtcttgaagtgagggtatctgttgagaatctccacctgcttcttccagtcaaattcattccgccagtaggagatgactttcttcaggtagttggagttgaagccatagtggaagcagctgtcctccaaaggtggggtgaaacggaacttatcgatcctctggtgtaagtcgtggatctcctcatctgacgtttccaccttgaaagggcggatgctgtcgtcctccctggctgcggacctcgtgcctggcccccaccacccatcttcaagtggcaaagtttcctctttgtcccgggagatgaaccagtagatggcaaagcccagcactgaagtgaggaggatttctagccacatggctcggtctcggctcgcaggctccggcggcggcaggcgcgcgatctctccggctcctggctc

SEQ ID NO: 440356 - DNA, 5692 bp, Homo sapiens
cctagtgctggtaccctcggggttaccgggcatcggaacacgccccgcgctgctgggtcccgccagacacgccgccgccgcaggaaagtctacagtttggtaccccaggactcgctggtcaggaaagccctgcaggacatgagtgttaggcccgacgcctggcccttggcagcttgggaggtggctggggctgcttttgcctttgccagagacagctccaactgaggacctctccaacgggcccatccacagtccttccttcccctagtgtctgggaagacaggcgcgatgatggactccccgttcctggagctgtggcagtccaaggcagtgtccatcagggagcagctgggactcggggaccggcccaacgactcctattgctacaactcggccaaaaacagcaccgtgctccagggggtcacctttggtggcatccccactgtcctgctcatagacgtcagctgcttcctgttcttaatcttggtgttttctattataagaagaagattctgggactatggccgcattgccctggtgtcagaagcagacagcgagtccagatttcagagattgtcatcgacttcctcctcaggtcaacaagactttgaaaatgagctgggatgctgtccctggctgactgccatcttccgtctgcatgatgaccagatcctggaatggtgtggggaggacgccatccactacctgtccttccagaggcacatcatcttcctgttggtggtggtcagctttttgtccctgtgtgtcatcctgcctgtcaacctctcaggggatttgctggacaaagacccgtatagttttgggaggacaacaatagcaaacctacagactgacaatgacctcctttggctgcacaccatctttgctgtcatttacctcttcttcactgtgggtttcatgcggcaccacactcagtccattaagtacaaagaggagaacctggtgaggcggaccctgttcatcacaggactccccagagatgccaggaaggagactgtggagagccacttccgggacgcgtatcccacgtgtgaggtggttgatgtgcagctgtgctacaacgtggccaaactgatctacctgtgcaaggagaaaaagaagactgagaagagcctgacctattacacaaacctgcaggtgaagacaggccagcggaccctcatcaaccccaagccctgtggccagttttgctgctgtgaagtgctgggctgtgagtgggaagacgccatctcttactacacacggatgaaggacaggctgctggagaggatcacagaggaagaacgccacgtccaggaccagcccctgggaatggccttcgtcaccttccaggagaagtccatggccacctacatcctgaaagatttcaatgcctgcaagtgtcagagccttcagtgcaaaggtgagccccagccgtcctcccatagcagggagctctatacctccaagtggacagtcacctttgctgctgaccctgaggacatctgctggaagaacctctctatccagggcctccgctggtggctacagtggctgggcatcaacttcaccctcttcctggggctatttttcctgaccacaccctccatcatcctgtccaccatggacaagtttaatgtcaccaaacccatccatgcgctgaataacccgatcatcagccagttcttccccaccctcctgctctggtccttctcggccctgctcccctccattgtctactactctacactgctggagtctcactggaccaagtcgggggaaaaccagatcatgatgaccaaagtctacatattcttgatcttcatggtgctgatcctgccctccctgggtctcaccagtctagattttttcttccggtggctctttgacaaaacttcctcggaggcctccatcaggttggagtgcgtcttcctgcctgaccagggtgccttctttgtgaactatgtcatcgcctcggccttcatcggcaatggcatggagctgctgcggctgccaggtctcatcctctataccttccgcatgatcatggccaagacggctgctgaccgcaggaatgtcaagcagaaccaggccttccagtacgagtttggagccatgtatgcatggatgctgtgtgtcttcactgtcatcgtggcctacagcatcacttgtcccatcatcgcgccatttggcctcatctacatcctgctcaagcacatggtggaccggcacaacctctacttcgtctacctcccagccaagctggagaaggggatccactttgccgctgtgaaccaggccttggcagcccccatcctgtgcctcttctggctctacttcttttccttcctgcgcctgggtatgaaggcccccgccactctgttcaccttcctggtgctgctgctcaccatcctggtctgcctggctcacacctgctttggatgcttcaagcacctcagccctctgaactacaaaacagaagagcctgcaagtgacaaaggaagtgaggcagaggcccacatgcccccaccgttcacaccctacgtgcctcggattctgaacggcttggcctcggagaggacagcactgtctccgcagcagcagcagcagcagacctatggtgccatccacaacatcagcgggactatccctggacagtgcttggcgcagagcgccacgggcagtgtggctgctgccccccaggaggcctgaggctgggtctcactgctctgaaaagacacaaccagaatggcctggggctcaggcccttggctgagtgggaatgcgttgggactgcccagctgagctatcaggtgcccatcttttctggtcccagcagtggtgaggagagcacaggcaggcctcgcccctcccttgctcacccagtttcccctccggcacaagcttccagctctgcagctggggtgacatccccagtggtttgtcgccaagaccatgtggtggacttttcgccccccaaactgatgagtccgggagaatatatggagagagagatgtaacaaggggaaggcctcctcccttctgagcacacacacaaccgataaccaaagagatgctgcagtccaggtctgaggtcccgctggcatccagctccctgctccatggccagtccctccccagcccagcagtccctccaggctacatccaggagtaagctatggggaacaggttgggaggtggccagtgctcctgccagctgtgcacacatctctgtatcccgctagagttctgtgtttttgtatcatgttgtcagggacgctagctgggtcagggttaccccatagcaggcagggacaaggaccactcataatatgcccattggaccacagttaagatccagcctctctcacctcttcagggctgagtgcatgagtctgcacctccaggcaggctctgtgcagtactcaccccctccgtctgctccctccaaggtgtgggggtgggcagtgctcagggcctcctcggagccaaaggacagcatggtcggcacagaggaaggggtacctgggctgggtgcagggccatcccactgcccttgagctgtggctctggcaggaaggaggggcagcccatccctcttctccctcctggggattctggggaatgggatgcaacttaagacttctgcctgagaagcctcctccctgctgcctccagggggcaccaaggcacaagcctgtgcagtaggggcgggatgggggtgtggaagagcaggtccaggctcctagcacaactggcctggggccttggcacctctgtaggccctgcctgtgcctgtccgctggcctggggggcctgggcttatctgggccttctcactcagggactctcttgacgctgacttgcccccgcagtggtggccagtgctgcctctgctccaagctgcccctgcgctgggaggggtgggggcggtgccattggtctggtgcagcatagccctggccagtggcctcatccccagcaggcctcccgtgcctctgccagcaaggaggggccggccagctctgcttgcacagggggccccatgtggggtcagcgcacgctcatgtcactgagttccagccgcttttagagtaaagtcgtttatcatcaaagccatgttgcttaccacacggagttgggggttggggagtgagcttggaggggtgagggggtgagcgtgggctcccagcatgggcaggggacggaggcaaactcattcctcagaaaaggggtatcttccccaagaaaagcctggagggcacttgtggggggaggtggcaggcggggggagaggggtgggtcattgccgctccagcaccgacaggaacttgcggatgtcctgggcgagcagctccggctcctcaaaggccgcaaagtggcccccacgaaccatgtaggaataggagatgagctttgggtacttgaacctcacccacttttcaggcgtgtgcaatagctcaaaagggaaggcagagaagccagtgggcacatagaccttcatccgctcatgcttctgggtcatccagccctgtcccaggttctccttgtagaagcgctgggaggagatgatggtgcctgttgtccagtagagcatgacgttggtcagcaggtcgtccagggagaacttcctttccaggcctccatcctccaggtatcggaattccgtattggtccaggtggaaaacttctctagaatataggcagccagacccacaggagagtcattcagagcagagcctacggtgtcaggcttggtgcactggatgtgcatgtagccgctctccctcatcaggctgtagaataccttctccttgacggggtacagcagctccacatccctctcagtgaggccaagaaacctcccgaaacgctgtcccaggaggagggtcagggtagagaagttgcttaaaaccaaagccatgttcaagtgcaggcctttcacgtggctgggcaccagctgggccatattagtgcagatcagggacccccagtcccctccttgaatgtagaattcctggaagcccagccgcagcatcagcttgtaaaagatcctggcggtggccaccgagttgaaccccttcttggaggatgcctctgagaagccatagccagggatggaagggcagatgacttcaaaaacgtgctcatcgctcaggccatggttcttggggtcagtcaggagtgggatgatcttataaaactcgtagaaagagccgggccagccgtgcaccatcagcaagggcttcggggtatggcctgcggcttcaatcttagtcttgaagtgagggtatctgttgagaatctccacctgcttcttccagtcaaattcattccgccagtaggagatgactttcttcaggtagttggagttgaagccatagtggaagcagctgtcctccaaaggtggggtgaaacggaacttatcgatcctctggtgtaagtcgtggatctcctcatctgacgtttccaccttgaaagggcggatgctgtcgtcctccctggctgcggacctcgtgcctggcccccaccacccatcttcaagtggcaaagtttcctctttgtcccgggagatgaaccagtagatggcaaagcccagcactgaagtgaggaggatttctagccacatggctcggtctcggctcgcaggctccggcggcggcaggcgcgcgatctctccggctcctggctc

SEQ ID NO: 440357 - DNA, 2075 bp, Homo sapiens
ggacgcgtgggtcgacccacgcgtcgcaaggcacaagcctgtgcagtaggggcgggatgggggtgtggaagagcaggtccaggctcctagcacaactggcctggggccttggcacctctgtaggccctgcctgtgcctgtccgctggcctggggggcctgggcttatctgggccttctcactcagggactctcttgacgctgacttgcccccgcagtggtggccagtgctgcctctgctccaagctgcccctgcgctgggaggggtgggggcggtgccattggtctggtgcagcatagccctggccagtggcctcatccccagcaggcctcccgtgcctctgccagcaaggaggggccggccagctctgcttgcacagggggccccatgtggggtcagcgcacgctcatgtcactgagttccagccgcttttagagtaaagtcgtttatcatcaaagccatgttgcttaccacacggagttgggggttggggagtgagcttggaggggtgagggggtgagcgtgggctcccagcatgggcaggggacggaggcaaactcattcctcagaaaaggggtatcttccccaagaaaagcctggagggcacttgtggggggaggtggcaggcggggggagaggggtgggtcattgccgctccagcaccgacaggaacttgcggatgtcctgggcgagcagctccggctcctcaaaggccgcaaagtggcccccacgaaccatgtaggaataggagatgagctttgggtacttgaacctcacccacttttcaggcgtgtgcaatagctcaaaagggaaggcagagaagccagtgggcacatagaccttcatccgctcatgcttctgggtcatccagccctgtcccaggttctccttgtagaagcgctgggaggagatgatggtgcctgttgtccagtagagcatgacgttggtcagcaggtcgtccagggagaacttcctttccaggcctccatcctccaggtatcggaattccgtattggtccaggtggaaaacttctctagaatataggcagccagacccacaggagagtcattcagagcagagcctacggtgtcaggcttggtgcactggatgtgcatgtagccgctctccctcatcaggctgtagaataccttctccttgacggggtacagcagctccacatccctctcagtgaggccaagaaacctcccgaaacgctgtcccaggaggagggtcagggtagagaagttgcttaaaaccaaagccatgttcaagtgcaggcctttcacgtggctgggcaccagctgggccatattagtgcagatcagggacccccagtcccctccttgaatgtagaattcctggaagcccagccgcagcatcagcttgtaaaagatcctggcggtggccaccgagttgaaccccttcttggaggatgcctctgagaagccatagccagggatggaagggcagatgacttcaaaaacgtgctcatcgctcaggccatggttcttggggtcagtcaggagtgggatgatcttataaaactcgtagaaagagccgggccagccgtgcaccatcagcaagggcttcggggtatggcctgcgggcagctgggggggcttcacgtggatgaagtggatgtccagcccttcaatcttagtcttgaagtgagggtatctgttgagaatctccacctgcttcttccagtcaaattcattccgccagtaggagatgactttcttcaggtagttggagttgaagccatagtggaagcagctgtcctccaaaggtggggtgaaacggaacttatcgatcctctggtgtaagtcgtggatctcctcatctgacgtttccaccttgaaagggcggatgctgtcgtcctccctggctgcggacctcgtgcctggcccccaccacccatcttcaagtggcaaagtttcctctttgtcccgggagatgaaccagtagatggcaaagcccagcactgaagtgaggaggatttctagccacatggctcggtctcggctcgcaggctccggcggcggcaggcgcgcgatctctccggctcctggctc

SEQ ID NO: 440358 - DNA, 2519 bp, Homo sapiens
  misc_feature (29)..(29): n is a, c, g, or t
agcgaactagccgaggagagccaggagcnggagagatcgcgcgcctgccgccgccggagcctgcgagccgagaccgagccatgtggctagaaatcctcctcacttcagtgctgggctttgccatctactggttcatctcccgggacaaagaggaaactttgccacttgaagatgggtggtgggggccaggcacgaggtccgcagccagggaggacgacagcatccgccctttcaaggtggaaacgtcagatgaggagatccacgacttacaccagaggatcgataagttccgtttcaccccacctttggaggacagctgcttccactatggcttcaactccaactacctgaagaaagtcatctcctactggcggaatgaatttgactggaagaagcaggtggagattctcaacagacaccctcacttcaagactaagattgaagggctggacatccacttcatccacgtgaagcccccccagctgcccgcaggccataccccgaagcccttgctgatggtgcacggctggcccggctctttctacgagttttataagatcatcccactcctgactgaccccaagaaccatggcctgagcgatgagcacgtttttgaagtcatctgcccttccatccctggctatggcttctcagaggcatcctccaagaaggggttcaactcggtggccaccgccaggatcttttacaagctgatgctgcggctgggcttccaggaattctacattcaaggaggggactgggggtccctgatctgcactaatatggcccagctggtgcccagccacgtgaaaggcctgcacttgaacatggctttggttttaagcaacttctctaccctgaccctcctcctgggacagcgtttcgggaggtttcttggcctcactgagagggatgtggagctgctgtaccccgtcaaggagaaggtattctacagcctgatgagggagagcggctacatgcacatccagtgcaccaagcctgacaccgtaggctctgctctgaatgactctcctgtgggtctggctgcctatattctagagaagttttccacctggaccaatacggaattccgatacctggaggatggaggcctggaaagggatgtcctgggcgagcagctccggctcctcaaaggccgcaaagtggcccccacgaaccatgtaggaataggagatgagctttgggtacttgaacctcacccacttttcaggcgtgtgcaatagctcaaaagggaaggcagagaagccagtgggcacatagaccttcatccgctcatgcttctgggtcatccagccctgtcccaggttctccttgtagaagcgctgggaggagatgatggtgcctgttgtccagtagagcatgacgttggtcagcaggtcgtccagggagaacttcctttccaggcctccatcctccaggtatcggaattccgtattggtccaggtggaaaacttctctagaatataggcagccagacccacaggagagtcattcagagcagagcctacggtgtcaggcttggtgcactggatgtgcatgtagccgctctccctcatcaggctgtagaataccttctccttgacggggtacagcagctccacatccctctcagtgaggccaagaaacctcccgaaacgctgtcccaggaggagggtcagggtagagaagttgcttaaaaccaaagccatgttcaagtgcaggcctttcacgtggctgggcaccagctgggccatattagtgcagatcagggacccccagtcccctccttgaatgtagaattcctggaagcccagccgcagcatcagcttgtaaaagatcctggcggtggccaccgagttgaaccccttcttggaggatgcctctgagaagccatagccagggatggaagggcagatgacttcaaaaacgtgctcatcgctcaggccatggttcttggggtcagtcaggagtgggatgatcttataaaactcgtagaaagagccgggccagccgtgcaccatcagcaagggcttcggggtatggcctgcgggcagctgggggggcttcacgtggatgaagtggatgtccagcccttcaatcttagtcttgaagtgagggtatctgttgagaatctccacctgcttcttccagtcaaattcattccgccagtaggagatgactttcttcaggtagttggagttgaagccatagtggaagcagctgtcctccaaaggtggggtgaaacggaacttatcgatcctctggtgtaagtcgtggatctcctcatctgacgtttccaccttgaaagggcggatgctgtcgtcctccctggctgcggacctcgtgcctggcccccaccacccatcttcaagtggcaaagtttcctctttgtcccgggagatgaaccagtagatggcaaagcccagcactgaagtgaggaggatttctagccacatggctcggtctcggctcgcaggctccggcggcggcaggcgcgcgatctctccggctcctggctc

SEQ ID NO: 440359 - DNA, 2601 bp, Homo sapiens
cacagctctctttcccaaggagtaatcagagggtgagaacgtggagcctggtggacaggtgaaagcactgggatctttctgcccagaaaggggaaagttgcacatttatatcctagagggaagcgacacgagtgcttctccctgtgctgaggtacaggagccatgtggctagaaatcctcctcacttcagtgctgggctttgccatctactggttcatctcccgggacaaagaggaaactttgccacttgaagatgggtggtgggggccaggcacgaggtccgcagccagggaggacgacagcatccgccctttcaaggtggaaacgtcagatgaggagatccacgacttacaccagaggatcgataagttccgtttcaccccacctttggaggacagctgcttccactatggcttcaactccaactacctgaagaaagtcatctcctactggcggaatgaatttgactggaagaagcaggtggagattctcaacagacaccctcacttcaagactaagattgaagggctggacatccacttcatccacgtgaagcccccccagctgcccgcaggccataccccgaagcccttgctgatggtgcacggctggcccggctctttctacgagttttataagatcatcccactcctgactgaccccaagaaccatggcctgagcgatgagcacgtttttgaagtcatctgcccttccatccctggctatggcttctcagaggcatcctccaagaaggggttcaactcggtggccaccgccaggatcttttacaagctgatgctgcggctgggcttccaggaattctacattcaaggaggggactgggggtccctgatctgcactaatatggcccagctggtgcccagccacgtgaaaggcctgcacttgaacatggctttggttttaagcaacttctctaccctgaccctcctcctgggacagcgtttcgggaggtttcttggcctcactgagagggatgtggagctgctgtaccccgtcaaggagaaggtattctacagcctgatgagggagagcggctacatgcacatccagtgcaccaagcctgacaccgtaggctctgctctgaatgactctcctgtgggtctggctgcctatattctagagaagttttccacctggaccaatacggaattccgatacctggaggatggaggcctggaaagggatgtcctgggcgagcagctccggctcctcaaaggccgcaaagtggcccccacgaaccatgtaggaataggagatgagctttgggtacttgaacctcacccacttttcaggcgtgtgcaatagctcaaaagggaaggcagagaagccagtgggcacatagaccttcatccgctcatgcttctgggtcatccagccctgtcccaggttctccttgtagaagcgctgggaggagatgatggtgcctgttgtccagtagagcatgacgttggtcagcaggtcgtccagggagaacttcctttccaggcctccatcctccaggtatcggaattccgtattggtccaggtggaaaacttctctagaatataggcagccagacccacaggagagtcattcagagcagagcctacggtgtcaggcttggtgcactggatgtgcatgtagccgctctccctcatcaggctgtagaataccttctccttgacggggtacagcagctccacatccctctcagtgaggccaagaaacctcccgaaacgctgtcccaggaggagggtcagggtagagaagttgcttaaaaccaaagccatgttcaagtgcaggcctttcacgtggctgggcaccagctgggccatattagtgcagatcagggacccccagtcccctccttgaatgtagaattcctggaagcccagccgcagcatcagcttgtaaaagatcctggcggtggccaccgagttgaaccccttcttggaggatgcctctgagaagccatagccagggatggaagggcagatgacttcaaaaacgtgctcatcgctcaggccatggttcttggggtcagtcaggagtgggatgatcttataaaactcgtagaaagagccgggccagccgtgcaccatcagcaagggcttcggggtatggcctgcgggcagctgggggggcttcacgtggatgaagtggatgtccagcccttcaatcttagtcttgaagtgagggtatctgttgagaatctccacctgcttcttccagtcaaattcattccgccagtaggagatgactttcttcaggtagttggagttgaagccatagtggaagcagctgtcctccaaaggtggggtgaaacggaacttatcgatcctctggtgtaagtcgtggatctcctcatctgacgtttccaccttgaaagggcggatgctgtcgtcctccctggctgcggacctcgtgcctggcccccaccacccatcttcaagtggcaaagtttcctctttgtcccgggagatgaaccagtagatggcaaagcccagcactgaagtgaggaggatttctagccacatggctcggtctcggctcgcaggctccggcggcggcaggcgcgcgatctctccggctcctggctc

SEQ ID NO: 440360 - DNA, 1917 bp, Homo sapiens
  misc_feature (36)..(36): n is a, c, g, or t
  misc_feature (50)..(50): n is a, c, g, or t
atgacccagaagcatgagcggatgaaggtctatgtncccactggcttctnagaggcatcctccaagaaggggttcaactcggtggccaccgccaggatcttttacaagctgatgctgcggctgggcttccaggaattctacattcaaggaggggactgggggtccctgatctgcactaatatggcccagctggtgcccagccacgtgaaaggcctgcacttgaacatggctttggttttaagcaacttctctaccctgaccctcctcctgggacagcgtttcgggaggtttcttggcctcactgagagggatgtggagctgctgtaccccgtcaaggagaaggtattctacagcctgatgagggagagcggctacatgcacatccagtgcaccaagcctgacaccgtaggctctgctctgaatgactctcctgtgggtctggctgcctatattctagagaagttttccacctggaccaatacggaattccgatacctggaggatggaggcctggaaagggatgtcctgggcgagcagctccggctcctcaaaggccgcaaagtggcccccacgaaccatgtaggaataggagatgagctttgggtacttgaacctcacccacttttcaggcgtgtgcaatagctcaaaagggaaggcagagaagccagtgggcacatagaccttcatccgctcatgcttctgggtcatccagccctgtcccaggttctccttgtagaagcgctgggaggagatgatggtgcctgttgtccagtagagcatgacgttggtcagcaggtcgtccagggagaacttcctttccaggcctccatcctccaggtatcggaattccgtattggtccaggtggaaaacttctctagaatataggcagccagacccacaggagagtcattcagagcagagcctacggtgtcaggcttggtgcactggatgtgcatgtagccgctctccctcatcaggctgtagaataccttctccttgacggggtacagcagctccacatccctctcagtgaggccaagaaacctcccgaaacgctgtcccaggaggagggtcagggtagagaagttgcttaaaaccaaagccatgttcaagtgcaggcctttcacgtggctgggcaccagctgggccatattagtgcagatcagggacccccagtcccctccttgaatgtagaattcctggaagcccagccgcagcatcagcttgtaaaagatcctggcggtggccaccgagttgaaccccttcttggaggatgcctctgagaagccatagccagggatggaagggcagatgacttcaaaaacgtgctcatcgctcaggccatggttcttggggtcagtcaggagtgggatgatcttataaaactcgtagaaagagccgggccagccgtgcaccatcagcaagggcttcggggtatggcctgcgggcagctgggggggcttcacgtggatgaagtggatgtccagcccttcaatcttagtcttgaagtgagggtatctgttgagaatctccacctgcttcttccagtcaaattcattccgccagtaggagatgactttcttcaggtagttggagttgaagccatagtggaagcagctgtcctccaaaggtggggtgaaacggaacttatcgatcctctggtgtaagtcgtggatctcctcatctgacgtttccaccttgaaagggcggatgctgtcgtcctccctggctgcggacctcgtgcctggcccccaccacccatcttcaagtggcaaagtttcctctttgtcccgggagatgaaccagtagatggcaaagcccagcactgaagtgaggaggatttctagccacatggctcggtctcggctcgcaggctccggcggcggcaggcgcgcgatctctccggctcctggctc

SEQ ID NO: 440361 - DNA, 1616 bp, Homo sapiens
aggcgcctgcgtagtacttaatgttgaaccagggactctagaaaagaattgtaaatcagaatgtcttgtgcaaaccacgtacagtatccctagggtagtaagccgccagattaggggtcatgttggcctcaaagttcggcagccattgagcaaaacccttgccaattgaaaatatatcttcccaaggatggtcaggacttcccatgtatgcgagtggcaggcggggggagaggggtgggtcattgccgctccagcaccgacaggaacttgcggatgtcctgggcgagcagctccggctcctcaaaggccgcaaagtggcccccaccaggcgtgtgcaatagctcaaaagggaaggcagagaagccagtgggcacatagaccttcatccgctcatgcttctgggtcatccagccctgtcccaggttctccttgtagaagcgctgggaggagatgatggtgcctgttgtccagtagagcatgacgttggtcagcaggtcgtccagggagaacttcctttccaggcctccatcctccaggtatcggaattccgtattggtccaggtggaaaacttctctagaatataggcagccagacccacaggagagtcattcagagcagagcctacggtgtcaggcttggtgcactggatgtgcatgtagccgctctccctcatcaggctgtagaataccttctccttgacggggtacagcagctccacatccctctcagtgaggccaagaaacctcccgaaacgctgtcccaggaggagggtcagggtagagaagttgcttaaaaccaaagccatgttcaagtgcaggcctttcacgtggctgggcaccagctgggccatattagtgcagatcagggacccccagtcccctccttgaatgtagaattcctggaagcccagccgcagcatcagcttgtaaaagatcctggcggtggccaccgagttgaaccccttcttggaggatgcctctgagaagccatagccagggatggaagggcagatgacttcaaaaacgtgctcatcgctcaggccatggttcttggggtcagtcaggagtgggatgatcttataaaactcgtagaaagagccgggccagccgtgcaccatcagcaagggcttcggggtatggcctgcgggcagctgggggggcttcacgtggatgaagtggatgtccagcccttcaatcttagtcttgaagtgagggtatctgttgagaatctccacctgcttcttccagtcaaattcattccgccagtaggagatgactttcttcaggtagttggagttgaagccatagtggaagcagctgtcctccaaaggtggggtgaaacggaacttatcgatcctctggtgtaagtcgtggatctcctcatctgacgtttccaccttgaaagggcggatgctgtcgtcctccctggctgcggacctcgtgcctggcccccaccacccatcttcaagtggcaaagtttcctctttgtcccgggagatgaaccagtagatggcaaagcccagcactgaagtgaggaggatttctagccacatggctcggtctcggctcgcaggctccggcggcggcaggcgcgcgatctctccggctcctggctc

SEQ ID NO: 440362 - DNA, 1837 bp, Homo sapiens
cccctctctgaataaggcagcatgacatttgcattcattcaacatctatgtactgggctctcccactgttcacccggcattgttctaggtgatggggctacagcatggccaagacagagtccctacccccaaggcaggattcagtctcattttactgtctttcccatccccagcactgtctggtcctgtgtgtcactgaaggaataaagggatgggccctggaaagggtgggtcagagctgaccttggtgaagcctgagtcaggccacagagctgggagtcaggcatgtagaggatacagcctctaaggctctgagagattaacagcctcctgtctttctgcgaccaccctcctggaacacgcagtcacgtgaccctgatgccaggctctccagggaatcaggaggaaaagcccaggtgctcttgacaataatgtggtgcctgctgccctgtgggctccctaatccccagaggggcctgttcagcaaaaggagcacaagcaggtgagcctgcatcctagtcttgaccatgcactgtgaggctgggaacaacccaccaggccacctcacccaaaaaatgcagctacgttggtcacagggtgaggatttgtaagaaagccaacaatagaatttgctgagtgccccatgcagagcaaccagacaaggggatgaagagggtgaggaggttggctgctgggaccagggtcatgactgcaggggcaaaccagggcctcacctttccaggcctccatcctccaggtatcggaattccgtattggtccaggtggaaaacttctctagaatataggcagccagacccacaggagagtcattcagagcagagcctacggtgtcaggcttggtgcactggatgtgcatgtagccgctctccctcatcaggctgtagaataccttctccttgacggggtacagcagctccacatccctctcagtgaggccaagaaacctcccgaaacgctgtcccaggaggagggtcagggtagagaagttgcttaaaaccaaagccatgttcaagtgcaggcctttcacgtggctgggcaccagctgggccatattagtgcagatcagggacccccagtcccctccttgaatgtagaattcctggaagcccagccgcagcatcagcttgtaaaagatcctggcggtggccaccgagttgaaccccttcttggaggatgcctctgagaagccatagccagggatggaagggcagatgacttcaaaaacgtgctcatcgctcaggccatggttcttggggtcagtcaggagtgggatgatcttataaaactcgtagaaagagccgggccagccgtgcaccatcagcaagggcttcggggtatggcctgcgggcagctgggggggcttcacgtggatgaagtggatgtccagcccttcaatcttagtcttgaagtgagggtatctgttgagaatctccacctgcttcttccagtcaaattcattccgccagtaggagatgactttcttcaggtagttggagttgaagccatagtggaagcagctgtcctccaaaggtggggtgaaacggaacttatcgatcctctggtgtaagtcgtggatctcctcatctgacgtttccaccttgaaagggcggatgctgtcgtcctccctggctgcggacctcgtgcctggcccccaccacccatcttcaagtggcaaagtttcctctttgtcccgggagatgaaccagtagatggcaaagcccagcactgaagtgaggaggatttctagccacatggctcggtctcggctcgcaggctccggcggcggcaggcgcgcgatctctccggctcctggctc

SEQ ID NO: 440363 - DNA, 2081 bp, Homo sapiens
  misc_feature (29)..(29): n is a, c, g, or t
  misc_feature (1945)..(1945): n is a, c, g, or t
agcgaactagccgaggagagccaggagcnggagagatcgcgcgcctgccgccgccggagcctgcgagccgagaccgagccatgtggctagaaatcctcctcacttcagtgctgggctttgccatctactggttcatctcccgggacaaagaggaaactttgccacttgaagatgggtggtgggggccaggcacgaggtccgcagccagggaggacgacagcatccgccctttcaaggtggaaacgtcagatgaggagatccacgacttacaccagaggatcgataagttccgtttcaccccacctttggaggacagctgcttccactatggcttcaactccaactacctgaagaaagtcatctcctactggcggaatgaatttgactggaagaagcaggtggagattctcaacagacaccctcacttcaagactaagattgaagggctggacatccacttcatccacgtgaagcccccccagctgcccgcaggccataccccgaagcccttgctgatggtgcacggctggcccggctctttctacgagttttataagatcatcccactcctgactgaccccaagaaccatggcctgagcgatgagcacgtttttgaagtcatctgcccttccatccctggctatggcttctcagaggcatcctccaagaaggggttcaactcggtggccaccgccaggatcttttacaagctgatgctgcggctgggcttccaggaattctacattcaaggaggggactgggggtccctgatctgcactaatatggcccagctggtgcccagccacgtgaaaggcctgcacttgaacatggctttggttttaagcaacttctctaccctgaccctcctcctgggacagcgtttcgggaggtttcttggcctcactgagagggatgtggagctgctgtaccccgtcaaggagaaggtattctacagcctgatgagggagagcggctacatgcacatccagtgcaccaagcctgacaccgtaggctctgctctgaatgactctcctgtgggtctggctgcctatattctagagaagttttccacctggaccaatacggaattccgatacctggaggatggaggcctggaaaggaagttctccctggacgacctgctgaccaacgtcatgctctactggacaacaggcaccatcatctcctcccagcgcttctacaaggagaacctgggacagggctggatgacccagaagcatgagcggatgaaggtctatgtgcccactggcttctctgccttcccttttgagctattgcacacgcctgaaaagtgggtgaggttcaagtacccaaagctcatctcctattcctacatggttcgtgggggccactttgcggcctttgaggagccggagctgctcgcccaggacatccgcaagttcctgtcggtgctggagcggcaatgacccacccctctccccccgcctgccacctccccccacaagtgccctccaggcttttcttggggaagataccccttttctgaggaatgagtttgcctccgtcccctgcccatgctgggagcccacgctcaccccctcacccctccaagctcactccccaacccccaactccgtgtggtaagcaacatggctttgatgataaacgactttactctaaaagcggctggaactcagtgacatgagcgtgcgctgaccccacatgggccccctgtgcaagcagagctggccggcccctccttgctggcagaggcacgggaggcctgctggggatgaggccactggccagggctatgctgcaccagaccaatggcaccgccccacccctcccagcgcaggggcagcttggagcagaggcagcactggccaccgctgcgggggcaagtcagcgtcaagagagtccctgagtgagaaggcccagataagcccaggccccccaggcnagcggacaggcacaggcaggggctacagaggtgccaaggccccaggccagttgtgctaggagcctggacctgctcttccacatcctcccattacccacccctactgcatcaggcttataccttggtgccccctgga

SEQ ID NO: 440364 - DNA, 5625 bp, Homo sapiens
cctagtgctggtaccctcggggttaccgggcatcggaacacgccccgcgctgctgggtcccgccagacacgccgccgccgcaggaaagtctacagtttggtaccccaggactcgctggtcaggaaagccctgcaggacatgagtgttaggcccgacgcctggcccttggcagcttgggaggtggctggggctgcttttgcctttgccagagacagctccaactgaggacctctccaacgggcccatccacagtccttccttcccctagtgtctgggaagacaggcgcgatgatggactccccgttcctggagctgtggcagtccaaggcagtgtccatcagggagcagctgggactcggggaccggcccaacgactcctattgctacaactcggccaaaaacagcaccgtgctccagggggtcacctttggtggcatccccactgtcctgctcatagacgtcagctgcttcctgttcttaatcttggtgttttctattataagaagaagattctgggactatggccgcattgccctggtgtcagaagcagacagcgagtccagatttcagagattgtcatcgacttcctcctcaggtcaacaagactttgaaaatgagctgggatgctgtccctggctgactgccatcttccgtctgcatgatgaccagatcctggaatggtgtggggaggacgccatccactacctgtccttccagaggcacatcatcttcctgttggtggtggtcagctttttgtccctgtgtgtcatcctgcctgtcaacctctcaggggatttgctggacaaagacccgtatagttttgggaggacaacaatagcaaacctacagactgacaatgacctcctttggctgcacaccatctttgctgtcatttacctcttcttcactgtgggtttcatgcggcaccacactcagtccattaagtacaaagaggagaacctggtgaggcggaccctgttcatcacaggactccccagagatgccaggaaggagactgtggagagccacttccgggacgcgtatcccacgtgtgaggtggttgatgtgcagctgtgctacaacgtggccaaactgatctacctgtgcaaggagaaaaagaagactgagaagagcctgacctattacacaaacctgcaggtgaagacaggccagcggaccctcatcaaccccaagccctgtggccagttttgctgctgtgaagtgctgggctgtgagtgggaagacgccatctcttactacacacggatgaaggacaggctgctggagaggatcacagaggaagaacgccacgtccaggaccagcccctgggaatggccttcgtcaccttccaggagaagtccatggccacctacatcctgaaagatttcaatgcctgcaagtgtcagagccttcagtgcaaaggtgagccccagccgtcctcccatagcagggagctctatacctccaagtggacagtcacctttgctgctgaccctgaggacatctgctggaagaacctctctatccagggcctccgctggtggctacagtggctgggcatcaacttcaccctcttcctggggctatttttcctgaccacaccctccatcatcctgtccaccatggacaagtttaatgtcaccaaacccatccatgcgctgaataacccgatcatcagccagttcttccccaccctcctgctctggtccttctcggccctgctcccctccattgtctactactctacactgctggagtctcactggaccaagtcgggggaaaaccagatcatgatgaccaaagtctacatattcttgatcttcatggtgctgatcctgccctccctgggtctcaccagtctagattttttcttccggtggctctttgacaaaacttcctcggaggcctccatcaggttggagtgcgtcttcctgcctgaccagggtgccttctttgtgaactatgtcatcgcctcggccttcatcggcaatggcatggagctgctgcggctgccaggtctcatcctctataccttccgcatgatcatggccaagacggctgctgaccgcaggaatgtcaagcagaaccaggccttccagtacgagtttggagccatgtatgcatggatgctgtgtgtcttcactgtcatcgtggcctacagcatcacttgtcccatcatcgcgccatttggcctcatctacatcctgctcaagcacatggtggaccggcacaacctctacttcgtctacctcccagccaagctggagaaggggatccactttgccgctgtgaaccaggccttggcagcccccatcctgtgcctcttctggctctacttcttttccttcctgcgcctgggtatgaaggcccccgccactctgttcaccttcctggtgctgctgctcaccatcctggtctgcctggctcacacctgctttggatgcttcaagcacctcagccctctgaactacaaaacagaagagcctgcaagtgacaaaggaagtgaggcagaggcccacatgcccccaccgttcacaccctacgtgcctcggattctgaacggcttggcctcggagaggacagcactgtctccgcagcagcagcagcagcagacctatggtgccatccacaacatcagcgggactatccctggacagtgcttggcgcagagcgccacgggcagtgtggctgctgccccccaggaggcctgaggctgggtctcactgctctgaaaagacacaaccagaatggcctggggctcaggcccttggctgagtgggaatgcgttgggactgcccagctgagctatcaggtgcccatcttttctggtcccagcagtggtgaggagagcacaggcaggcctcgcccctcccttgctcacccagtttcccctccggcacaagcttccagctctgcagctggggtgacatccccagtggtttgtcgccaagaccatgtggtggacttttcgccccccaaactgatgagtccgggagaatatatggagagagagatgtaacaaggggaaggcctcctcccttctgagcacacacacaaccgataaccaaagagatgctgcagtccaggtctgaggtcccgctggcatccagctccctgctccatggccagtccctccccagcccagcagtccctccaggctacatccaggagtaagctatggggaacaggttgggaggtggccagtgctcctgccagctgtgcacacatctctgtatcccgctagagttctgtgtttttgtatcatgttgtcagggacgctagctgggtcagggttaccccatagcaggcagggacaaggaccactcataatatgcccattggaccacagttaagatccagcctctctcacctcttcagggctgagtgcatgagtctgcacctccaggcaggctctgtgcagtactcaccccctccgtctgctccctccaaggtgtgggggtgggcagtgctcagggcctcctcggagccaaaggacagcatggtcggcacagaggaaggggtacctgggctgggtgcagggccatcccactgcccttgagctgtggctctggcaggaaggaggggcagcccatccctcttctccctcctggggattctggggaatgggatgcaacttaagacttctgcctgagaagcctcctccctgctgcctccagggggcaccaaggctctccagggaatcaggaggaaaagcccaggtgctcttgacaataatgtggtgcctgctgccctgtgggctccctaatccccagaggggcctgttcagcaaaaggagcacaagcaggtgagcctgcatcctagtcttgaccatgcactgtgaggctgggaacaacccaccaggccacctcacccaaaaaatgcagctacgttggtcacagggtgaggatttgtaagaaagccaacaatagaatttgctgagtgccccatgcagagcaaccagacaaggggatgaagagggtgaggaggttggctgctgggaccagggtcatgactgcaggggcaaaccagggcctcacctttccaggcctccatcctccaggtatcggaattccgtattggtccaggtggaaaacttctctagaatataggcagccagacccacaggagagtcattcagagcagagcctggcggggagcggggagcaagggagagactcaggcctggggaccagagagctggagcttcaggtgtgatgtgtggcactggccgcagagggcggggctgtgtgcaggaagccacgttcgagcacaggcctgccttaactcctgggtgctcacatgcctcgcttccttaactctgcctcggcatcctcatctgataaacagggacgataccttcccactgtctcccagggcctggcacactgcctgctcagcttccttcaaactgaagggcctacgcctctgcatttggtggggtcccaatgagaagtgctgtttttaaaaaggcggggtttttcagtctatgtgctctgattcatgaaaaatgagaagccacctaaaaaagtctaaaataggggatcagttacaaatattgatatactcataagccaaaatactgtacagtcattaaaaatggctggaacaggctgggggcattggctcatgcctgtaatcccagcactttgggagggcgagaaaggtggatcacctgcggtaaggagttcgagactatcctggctgacatggtgaaaccccatctctattaaaaatacaaaaaaattagcagggcatggtggtgcatgcctgtaatcccagctacttgggaggctgaggcaggcaaattgcttgaacccgggaggtggaggttgcagtgagccgagatcgtaccactgcactctagcctgggcaacagagcaagactctgtctcaaaaaaaaataaataaataaagctgggacaatggcataaatgaatctcacaaacataatattgagcaaaagaagccagactcaagggtatatactctgtgattctattcataggacttaaacaggcacaatcaaaaccatctcagtcagaagtcagagcgtggtacctgggagagaaccccgaggggcatctggagtgttggggccatgttggtgatatggacgtacttcacttgtgaaaattctcaccaaaatgttcacaagttcttttgaaggagaggggatgtggggagggagaagaggttatatgagattgtctttaatgttttgtactttttgcatttttaagctttttgacaacatgtattttataatcagagaaaaatgctgacttttataaagtgccattattatgattaaaaaaaaaaagctgcctcgtgtgtgtgggcatgggtttgccatgaaaactatgaagaactttgagatgggcaagacaattcctgggtgtcttctggacaagatctagggagttacctagcagaccttccggactgacgtgatgctacaggggtcccatctttccttgtcattgagctattttacagttctgtgaattgtaaagaactgagggtaatgcgaatgactcttgttcatagaggcaaatgaattttgtcccatggagatttaattgatattactctgtggatgttgacaagttttgtgtctgttagca

SEQ ID NO: 440365 - DNA, 6137 bp, Homo sapiens
  misc_feature (1133)..(1133): n is a, c, g, or t
  misc_feature (1144)..(1144): n is a, c, g, or t
cagtctcctgccatgcaaagaaggctcatagagttgctttggaagtggattctttgtacagcctggaagaagacgctgtgtaaatgacatgctttgggggctcccccggccacagaaggagaaaactggagccttctgatttcctgttgtttactttccagaggctggagttgggtaggaaacctgagcataccggcacactggcttgtgggtgacttctctccctgctgtatttcccggacaggtgaggcggaccctgttcatcacaggactccccagagatgccaggaaggagactgtggagagccacttccggtaagcaggtggggtgggaggggagctgagccccctccacgtaggaccaacacagccccacccgcagggcgagcaccttaggtgagcgccttctgtctctcgcttgggtatccaggtgagatctgagaaggacctggccctgccacacgtgtatggagtggctcctgtgtgccagccctgctggtgctgtgcagtgaatagcgccctggtggcctatcctcttcaagcagcctgtgcacagtgtccagagcacagaccagggtgtaggtgcgaataaacgtcttgagagcatacgggggaaaaaattgttgaccccggggttcttagcatcacctttgcagaataagagagacgtgagctgagcatttgtatggacccacagggctagggtctcacaggtggaaggacctcggggccatctctgcgtttgttcgtttgtccacccactgagcgggtgtctgttgagtgagcactgtgtctgagtccaggctctccctggtagaacctcctttccagcggctccctttgagtatctgcaccaccaattcctgcagatggaggctggaggaaagtctttcctgtgaggagattacgtgtgcagccagggatgcggggaaaggcccagagcatcaggaaaggtggcggtggggtgcaggggggcagggcaagcagtccgggaaggctcccaggaccccatgctggaggacctgaaggctgggctgaggagctgacattttattctttcttcattcctttttttgtaatcctatttttttagagacagggtcttgctctgttgcccaggctagagttcagtngtgcaataatngcttactgcggcctcaactcctggacttaaggcatcttcctgcctcagcctcccaagtagctgggactgcagacacatggcaccacacccagctaatttttaaattttttatggagatagagtcttgctatgttgcccaggctggtctcgaattgctgggctcaagtgatcctcctgccttgccctcccaaagtgctgggattacaggcgtgagccaccatgcccggcctctcttcattccttatcaatacagcagccactaatttgttgcatggactaggagttggctgcactttaactttgcactatttgtgaagaaagcacttgctaagcaaattgctagacaggatcgtaaactgaatgtttaaaatttgaaaaacttcttcagaaactctaagtattttagaaatatttactaatatgtaaatactcaataccagaatcatttttctgtatttccttgaagcaactcctcaaagttgcctgctaggcaacacctggaaacagtaattccacttaatgtataactttaaagagaaaaaaaaagtctcctcattctcatacaaacattgcatgactcatgctttcccctattttaagaggcctttttagtgaatgctgttgcagtccgtggggattgatgtatgaatttgcctttcaagcagggatgcttaaattgcagttttcttcctcacagctcttattgagaccagaaattgtcctactgtttaatttcatgattgatatacctatgggctgtctctctcactaaaatgtaagcacatccaggccctgttaccagcacctagaacagtgcctggcaggtggtaggtggggatttacatggttctggaatcccctggaattgtatgtataattttgcgtgtatggtgagggggtattgcatggtggccatgagcattgaccttggagccaggttgcctgtattcacctcctggctcagacactcactagctgtgtgatcttgggcacaagccacttacctctgtcggcctcagtttactcatctgtaaaatggggacaaaacctcacaggttatgatgaggattaaataaataaatatatgtaacaatacctggtcaatagtgagtatgtattttgctgggtgacagagtgagaccctgtctctaaacaaaacaaaacaaaacaaaagccctctttgtattaaatttcaaaatttcccccttttggaggataaaagacaaagagaagagaggtctccgctggcacagaaaccagcagcgagatcactctgccatcctttcccttggatccgtgggcacgtctcctgcttggggtgttttcttttccaacggtgtcttttgcctccttctctccctggccacagggacgcgtatcccacgtgtgaggtggttgatgtgcagctgtgctacaacgtggccaaactgatctacctgtgcaaggagaaaaagaagactgagaagagcctgacctattacacaaacctgcaggtgaagacaggccagcggaccctcatcaaccccaagccctgtggccagttttgctgctgtgaagtgctgggctgtgagtgggaagacgccatctcttactacacacggatgaaggacaggctgctggagaggatcacagaggaagaacgccacgtccaggaccagcccctgggaatggccttcgtcaccttccaggagaagtccatggccacctagtgagtgtaggcacatccagaccccttcttggctgactccctgttcccctccagataactcactgtccctctcgagtggagatggtactgctgacccaccatccctgggatttatctgtggtgtttccttctcctccctcagctacccacactcactttcagccagcccagcccatgtttgtgtaacaggcggtgggggtgtgggcagcagccacggagtgggtgattctggctgaccccctcgagctgatgtggcctggccccactgccgggctcttccctgctgccctggacccatcctgttggcttcatgtgccagccttgccccaggggagatggaggcaccctcctttcagacatctgctctgggccacagatccttctgtctgtggctccccaccttcccacaaatgcaaagctgtggggaagacccctggggcacgctggggcgctcactgcagtggggagcttgaccctggggagtggcttttcacagtggcccttggcatgggactctaggctctcatgcctgtggtctcagtgtcatctcgccttaggagcagcacagggtgggtcgggagaggggtgtggaaaggtgtccagccactgccccaggcattgtgacactaggaatggactcacacaggacttcctgcctccttgcagacactggggcaggaggaaaggggaaggcatctgaggcaggagtagaggggctgctgggctccttacgggaggttaaaggaggaaaagctgtgacctgttgagatggtgagggtcgaggtgggagccctgaggagggaagcttgggaacaggcaatgtgtaacgtggtctattgctacacttgggcctggggaaaaagtgacagaatgaaaagttgagccactggcctggcagtagcactgatcagagctccagcttaacaggcagggtggagggggatggccctatggaagagcagtgtgttgccctcagtttccttatctgtaaaatgggaatcgtactccctttgttgctggtggttgcgaggattaaacaaaattctccacacactgtgctagcgtggcacctcttacatagcgttactcataatacactaatcacaacaaagcaaaggtcctatgccactgcctcccactcctactcagtccccacttgccacatgtgtgctggtaacctgagtagcctgggcctggctgttgctacatttccttgcagcatcctgaaagatttcaatgcctgcaagtgtcagagccttcagtgcaaaggtgagccccagccgtcctcccatagcagggagctctatacctccaagtggacagtcacctttgctgctgaccctgaggacatctgctggtaagctcctagaccaaggagaggtgggagagaggcctgggttcctggtgggagctgcccatcacctggagcacaggtgtgacctggcagtcaatggagatctccacacatctgcaattctgtgggctgtgatgctgtgatgtgctcggtgtggcccaactggggtatctgcccagcccttccctccagtgttcctccctagcattcaagtgctacccagcagaaatataatgccagttctgcatctaattttaaatttcctaatagccatgctaaaaaagtaaaaagaaacagttgaaattaattttaataatgtatctcgcccaatatatccaaactgttatttcaacatgcaatttttgaaaaatgtgagatgttttacattctctttttcacacttagtcttcaatatctggtgtgtattttacacttctagcacctctcaattcacaccagccacatttaaaatgctcagtagccgcatgcagcttgtgcagccttacttaggtccagtgtcagcctggggccgtgctggggagctgagctgtgtccatgggggccctggtgagcctccagtgctgtgctgagggtaagggcacccagcgcaagccccagcgcagctgcctgtccagccctgcctcagctccttgcacagaatgagcttgaagtgctcccctctgctcggttctagttctgcctctgacagttttgctctttggttcacaaggcttcctaaactcaggattgctttgtgggtctgttctttgggatgagaggccagggcaggtgcaagctatgccttcactcctttgtccctgccttcctccttcctgtaccccagctacagccccgttgggaagaatgtgtcgttagtcacaaagcattgcagatgtgtctaagaaatgccacgctggggccgggcgtggtgctcacacctgtaatcccagcacttcgagaggctgaggcaggcggattgcctgagctcaggatttcaagaccaccctgggtaacatggtgaaaccctgtctctactaaaaatacaaaaaaattagctgggtgtggtggtacacgcctatagtcccagctacatgggaggctgagcaggagaattgcttgaacctgggaggcagaggttgcagtgagctgagatcacaccactgcactctaccctgggcaacagagccagactgggtcttgagaaaaaataaataaataaagctgggacaatggcataaatgaatctcacaaacataatattgagcaaaagaagccagactcaagggtatatactctgtgattctattcataggacttaaacaggcacaatcaaaaccatctcagtcagaagtcagagcgtggtacctgggagagaaccccgaggggcatctggagtgttggggccatgttggtgatatggacgtacttcacttgtgaaaattctcaccaaaatgttcacaagttcttttgaaggagaggggatgtggggagggagaagaggttatatgagattgtctttaatgttttgtactttttgcatttttaagctttttgacaacatgtattttataatcagagaaaaatgctgacttttataaagtgccattattatgattaaaaaaaaaaagctgcctcgtgtgtgtgggcatgggtttgccatgaaaactatgaagaactttgagatgggcaagacaattcctgggtgtcttctggacaagatctagggagttacctagcagaccttccggactgacgtgatgctacaggggtcccatctttccttgtcattgagctattttacagttctgtgaattgtaaagaactgagggtaatgcgaatgactcttgttcatagaggcaaatgaattttgtcccatggagatttaattgatattactctgtggatgttgacaagttttgtgtctgttagca

SEQ ID NO: 440366 - DNA, 3872 bp, Homo sapiens
cctagtgctggtaccctcggggttaccgggcatcggaacacgccccgcgctgctgggtcccgccagacacgccgccgccgcaggaaagtctacagtttggtaccccaggactcgctggtcaggaaagccctgcaggacatgagtgttaggcccgacgcctggcccttggcagcttgggaggtggctggggctgcttttgcctttgccagagacagctccaactgaggacctctccaacgggcccatccacagtccttccttcccctagtgtctgggaagacaggcgcgatgatggactccccgttcctggagctgtggcagtccaaggcagtgtccatcagggagcagctgggactcggggaccggcccaacgactcctattgctacaactcggccaaaaacagcaccgtgctccagggggtcacctttggtggcatccccactgtcctgctcatagacgtcagctgcttcctgttcttaatcttggtgttttctattataagaagaagattctgggactatggccgcattgccctggtgtcagaagcagacagcgagtccagatttcagagattgtcatcgacttcctcctcaggtcaacaagactttgaaaatgagctgggatgctgtccctggctgactgccatcttccgtctgcatgatgaccagatcctggaatggtgtggggaggacgccatccactacctgtccttccagaggcacatcatcttcctgttggtggtggtcagctttttgtccctgtgtgtcatcctgcctgtcaacctctcaggggatttgctggacaaagacccgtatagttttgggaggacaacaatagcaaacctacagactgacaatgacctcctttggctgcacaccatctttgctgtcatttacctcttcttcactgtgggtttcatgcggcaccacactcagtccattaagtacaaagaggagaacctggtgaggcggaccctgttcatcacaggactccccagagatgccaggaaggagactgtggagagccacttccgggacgcgtatcccacgtgtgaggtggttgatgtgcagctgtgctacaacgtggccaaactgatctacctgtgcaaggagaaaaagaagactgagaagagcctgacctattacacaaacctgcaggtgaagacaggccagcggaccctcatcaaccccaagccctgtggccagttttgctgctgtgaagtgctgggctgtgagtgggaagacgccatctcttactacacacggatgaaggacaggctgctggagaggatcacagaggaagaacgccacgtccaggaccagcccctgggaatggccttcgtcaccttccaggagaagtccatggccacctacatcctgaaagatttcaatgcctgcaagtgtcagagccttcagtgcaaaggtgagccccagccgtcctcccatagcagggagctctatacctccaagtggacagtcacctttgctgctgaccctgaggacatctgctggaagaacctctctatccagggcctccgctggtggctacagtggctgggcatcaacttcaccctcttcctggggctatttttcctgaccacaccctccatcatcctgtccaccatggacaagtttaatgtcaccaaacccatccatgcgctgaataacccgatcatcagccagttcttccccaccctcctgctctggtccttctcggccctgctcccctccattgtctactactctacactgctggagtctcactggaccaagtcgggggaaaaccagatcatgatgaccaaagtctacatattcttgatcttcatggtgctgatcctgccctccctgggtctcaccagtctagattttttcttccggtggctctttgacaaaacttcctcggaggcctccatcaggttggagtgcgtcttcctgcctgaccagggtgccttctttgtgaactatgtcatcgcctcggccttcatcggcaatggcatggagctgctgcggctgccaggtctcatcctctataccttccgcatgatcatggccaagacggctgctgaccgcaggaatgtcaagcagaaccaggccttccagtacgagtttggagccatgtatgcatggatgctgtgtgtcttcactgtcatcgtggcctacagcatcacttgtcccatcatcgcgccatttggcctcatctacatcctgctcaagcacatggtggaccggcacaacctctacttcgtctacctcccagccaagctggagaaggggatccactttgccgctgtgaaccaggccttggcagcccccatcctgtgcctcttctggctctacttcttttccttcctgcgcctgggtatgaaggcccccgccactctgttcaccttcctggtgctgctgctcaccatcctggtctgcctggctcacacctgctttggatgcttcaagcacctcagccctctgaactacaaaacagaagagcctgcaagtgacaaaggaagtgaggcagaggcccacatgcccccaccgttcacaccctacgtgcctcggattctgaacggcttggcctcggagaggacagcactgtctccgcagcagcagcagcagcagacctatggtgccatccacaacatcagcgggactatccctggacagtgcttggcgcagagcgccacgggcagtgtggctgctgccccccaggaggcctgaggctgggtctcactgctctgaaaagacacaaccagaatggcctggggctcaggcccttggctgagtgggaatgcgttgggactgcccagctgagctatcaggtgcccatcttttctggtcccagcagtggtgaggagagcacaggcaggcctcgcccctcccttgctcacccagtttcccctccggcacaagcttccagctctgcagctggggtgacatccccagtggtttgtcgccaagaccatgtggtggacttttcgccccccaaactgatgagtccgggagaatatatggagagagagatgtaacaaggggaaggcctcctcccttctgagcacacacacaaccgataaccaaagagatgctgcagtccaggtctgaggtcccgctggcatccagctccctgctccatggccagtccctccccagcccagcagtccctccaggctacatccaggagtaagctatggggaacaggttgggaggtggccagtgctcctgccagctgtgcacacatctctgtatcccgctagagttctgtgtttttgtatcatgttgtcagggacgctagctgggtcagggttaccccatagcaggcagggacaaggaccactcataatatgcccattggaccacagttaagatccagcctctctcacctcttcagggctgagtgcatgagtctgcacctccaggcaggctctgtgcagtactcaccccctccgtctgctccctccaaggtgtgggggtgggcagtgctcagggcctcctcggagccaaaggacagcatggtcggcacagaggaaggggtacctgggctgggtgcagggccatcccactgcccttgagctgtggctctggcaggaaggaggggcagcccatccctcttctccctcctggggattctggggaatgggatgcaacttaagacttctgcctgagaagcctcctccctgctgcctccagggggcaccaaggcacaagcctgtgcagtaggggcgggatgggggtgtggaagaccaattctaggttctctacatcacatgcgtatgtgacttgtctcctaatatatgtcatgtctgtgaccttcttctgattctttctggaccttccatatttgtgactcttttattactgatctttctttatgcatttcttgt

SEQ ID NO: 440367 - DNA, 3790 bp, Homo sapiens
cctagtgctggtaccctcggggttaccgggcatcggaacacgccccgcgctgctgggtcccgccagacacgccgccgccgcaggaaagtctacagtttggtaccccaggactcgctggtcaggaaagccctgcaggacatgagtgttaggcccgacgcctggcccttggcagcttgggaggtggctggggctgcttttgcctttgccagagacagctccaactgaggacctctccaacgggcccatccacagtccttccttcccctagtgtctgggaagacaggcgcgatgatggactccccgttcctggagctgtggcagtccaaggcagtgtccatcagggagcagctgggactcggggaccggcccaacgactcctattgctacaactcggccaaaaacagcaccgtgctccagggggtcacctttggtggcatccccactgtcctgctcatagacgtcagctgcttcctgttcttaatcttggtgttttctattataagaagaagattctgggactatggccgcattgccctggtgtcagaagcagacagcgagtccagatttcagagattgtcatcgacttcctcctcaggtcaacaagactttgaaaatgagctgggatgctgtccctggctgactgccatcttccgtctgcatgatgaccagatcctggaatggtgtggggaggacgccatccactacctgtccttccagaggcacatcatcttcctgttggtggtggtcagctttttgtccctgtgtgtcatcctgcctgtcaacctctcaggggatttgctggacaaagacccgtatagttttgggaggacaacaatagcaaacctacagactgacaatgacctcctttggctgcacaccatctttgctgtcatttacctcttcttcactgtgggtttcatgcggcaccacactcagtccattaagtacaaagaggagaacctggtgaggcggaccctgttcatcacaggactccccagagatgccaggaaggagactgtggagagccacttccgggacgcgtatcccacgtgtgaggtggttgatgtgcagctgtgctacaacgtggccaaactgatctacctgtgcaaggagaaaaagaagactgagaagagcctgacctattacacaaacctgcaggtgaagacaggccagcggaccctcatcaaccccaagccctgtggccagttttgctgctgtgaagtgctgggctgtgagtgggaagacgccatctcttactacacacggatgaaggacaggctgctggagaggatcacagaggaagaacgccacgtccaggaccagcccctgggaatggccttcgtcaccttccaggagaagtccatggccacctacatcctgaaagatttcaatgcctgcaagtgtcagagccttcagtgcaaaggtgagccccagccgtcctcccatagcagggagctctatacctccaagtggacagtcacctttgctgctgaccctgaggacatctgctggaagaacctctctatccagggcctccgctggtggctacagtggctgggcatcaacttcaccctcttcctggggctatttttcctgaccacaccctccatcatcctgtccaccatggacaagtttaatgtcaccaaacccatccatgcgctgaataacccgatcatcagccagttcttccccaccctcctgctctggtccttctcggccctgctcccctccattgtctactactctacactgctggagtctcactggaccaagtcgggggaaaaccagatcatgatgaccaaagtctacatattcttgatcttcatggtgctgatcctgccctccctgggtctcaccagtctagattttttcttccggtggctctttgacaaaacttcctcggaggcctccatcaggttggagtgcgtcttcctgcctgaccagggtgccttctttgtgaactatgtcatcgcctcggccttcatcggcaatggcatggagctgctgcggctgccaggtctcatcctctataccttccgcatgatcatggccaagacggctgctgaccgcaggaatgtcaagcagaaccaggccttccagtacgagtttggagccatgtatgcatggatgctgtgtgtcttcactgtcatcgtggcctacagcatcacttgtcccatcatcgcgccatttggcctcatctacatcctgctcaagcacatggtggaccggcacaacctctacttcgtctacctcccagccaagctggagaaggggatccactttgccgctgtgaaccaggccttggcagcccccatcctgtgcctcttctggctctacttcttttccttcctgcgcctgggtatgaaggcccccgccactctgttcaccttcctggtgctgctgctcaccatcctggtctgcctggctcacacctgctttggatgcttcaagcacctcagccctctgaactacaaaacagaagagcctgcaagtgacaaaggaagtgaggcagaggcccacatgcccccaccgttcacaccctacgtgcctcggattctgaacggcttggcctcggagaggacagcactgtctccgcagcagcagcagcagcagacctatggtgccatccacaacatcagcgggactatccctggacagtgcttggcgcagagcgccacgggcagtgtggctgctgccccccaggaggcctgaggctgggtctcactgctctgaaaagacacaaccagaatggcctggggctcaggcccttggctgagtgggaatgcgttgggactgcccagctgagctatcaggtgcccatcttttctggtcccagcagtggtgaggagagcacaggcaggcctcgcccctcccttgctcacccagtttcccctccggcacaagcttccagctctgcagctggggtgacatccccagtggtttgtcgccaagaccatgtggtggacttttcgccccccaaactgatgagtccgggagaatatatggagagagagatgtaacaaggggaaggcctcctcccttctgagcacacacacaaccgataaccaaagagatgctgcagtccaggtctgaggtcccgctggcatccagctccctgctccatggccagtccctccccagcccagcagtccctccaggctacatccaggagacttaaacaggcacaatcaaaaccatctcagtcagaagtcagagcgtggtacctgggagagaaccccgaggggcatctggagtgttggggccatgttggtgatatggacgtacttcacttgtgaaaattctcaccaaaatgttcacaagttcttttgaaggagaggggatgtggggagggagaagaggttatatgagattgtctttaatgttttgtactttttgcatttttaagctttttgacaacatgtattttataatcagagaaaaatgctgacttttataaagtgccattattatgattaaaaaaaaaaagctgcctcgtgtgtgtgggcatgggtttgccatgaaaactatgaagaactttgagatgggcaagacaattcctgggtgtcttctggacaagatctagggagttacctagcagaccttccggactgacgtgatgctacaggggtcccatctttccttgtcattgagctattttacagttctgtgaattgtaaagaactgagggtaatgcgaatgactcttgttcatagaggcaaatgaattttgtcccatggagatttaattgatattactctgtggatgttgacaagttttgtgtctgttagca

SEQ ID NO: 440368 - DNA, 3440 bp, Homo sapiens
cctagtgctggtaccctcggggttaccgggcatcggaacacgccccgcgctgctgggtcccgccagacacgccgccgccgcaggaaagtctacagtttggtaccccaggactcgctggtcaggaaagccctgcaggacatgagtgttaggcccgacgcctggcccttggcagcttgggaggtggctggggctgcttttgcctttgccagagacagctccaactgaggacctctccaacgggcccatccacagtccttccttcccctagtgtctgggaagacaggcgcgatgatggactccccgttcctggagctgtggcagtccaaggcagtgtccatcagggagcagctgggactcggggaccggcccaacgactcctattgctacaactcggccaaaaacagcaccgtgctccagggggtcacctttggtggcatccccactgtcctgctcatagacgtcagctgcttcctgttcttaatcttggtgttttctattataagaagaagattctgggactatggccgcattgccctggtgtcagaagcagacagcgagtccagatttcagagattgtcatcgacttcctcctcaggtcaacaagactttgaaaatgagctgggatgctgtccctggctgactgccatcttccgtctgcatgatgaccagatcctggaatggtgtggggaggacgccatccactacctgtccttccagaggcacatcatcttcctgttggtggtggtcagctttttgtccctgtgtgtcatcctgcctgtcaacctctcaggggatttgctggacaaagacccgtatagttttgggaggacaacaatagcaaacctacagactgacaatgacctcctttggctgcacaccatctttgctgtcatttacctcttcttcactgtgggtttcatgcggcaccacactcagtccattaagtacaaagaggagaacctggtgaggcggaccctgttcatcacaggactccccagagatgccaggaaggagactgtggagagccacttccgggacgcgtatcccacgtgtgaggtggttgatgtgcagctgtgctacaacgtggccaaactgatctacctgtgcaaggagaaaaagaagactgagaagagcctgacctattacacaaacctgcaggtgaagacaggccagcggaccctcatcaaccccaagccctgtggccagttttgctgctgtgaagtgctgggctgtgagtgggaagacgccatctcttactacacacggatgaaggacaggctgctggagaggatcacagaggaagaacgccacgtccaggaccagcccctgggaatggccttcgtcaccttccaggagaagtccatggccacctacatcctgaaagatttcaatgcctgcaagtgtcagagccttcagtgcaaaggtgagccccagccgtcctcccatagcagggagctctatacctccaagtggacagtcacctttgctgctgaccctgaggacatctgctggaagaacctctctatccagggcctccgctggtggctacagtggctgggcatcaacttcaccctcttcctggggctatttttcctgaccacaccctccatcatcctgtccaccatggacaagtttaatgtcaccaaacccatccatgcgctgaataacccgatcatcagccagttcttccccaccctcctgctctggtccttctcggccctgctcccctccattgtctactactctacactgctggagtctcactggaccaagtcgggggaaaaccagatcatgatgaccaaagtctacatattcttgatcttcatggtgctgatcctgccctccctgggtctcaccagtctagattttttcttccggtggctctttgacaaaacttcctcggaggcctccatcaggttggagtgcgtcttcctgcctgaccagggtgccttctttgtgaactatgtcatcgcctcggccttcatcggcaatggcatggagctgctgcggctgccaggtctcatcctctataccttccgcatgatcatggccaagacggctgctgaccgcaggaatgtcaagcagaaccaggccttccagtacgagtttggagccatgtatgcatggatgctgtgtgtcttcactgtcatcgtggcctacagcatcacttgtcccatcatcgcgccatttggcctcatctacatcctgctcaagcacatggtggaccggcacaacctctacttcgtctacctcccagccaagctggagaaggggatccactttgccgctgtgaaccaggccttggcagcccccatcctgtgcctcttctggctctacttcttttccttcctgcgcctgggtatgaaggcccccgccactctgttcaccttcctggtgctgctgctcaccatcctggtctgcctggctcacacctgctttggatgcttcaagcacctcagccctctgaactacaaaacagaagagcctgcaagtgacaaaggaagtgaggcagaggcccacatgcccccaccgttcacaccctacgtgcctcggattctgaacggcttggcctcggagaggacagcactgtctccgcagcagcagcagcagcagacctatggtgccatccacaacatcagcgggactatccctggacagtgcttggcgcagagcgccacgggcagtgtggctgctgccccccaggaggcctgaggctgggtctcactgctctgaaaagacacaaccagaatggcctggggctcaggcccttggctgagtgggaatgcgttgggactgcccagctgagctatcaggtgcccatcttttctggtcccagcagtggtgaggagagcacaggcaggcctcgcccctcccttgctcacccagtttcccctccggcacaagcttccagctctgcagctggggtgacatccccagtggtttgtcgccaagaccatgtggtggacttttcgccccccaaactgatgagtccgggagaatatatggagagagagatgtaacaaggggaaggcctcctcccttctgagcacacacacaaccgataaccaaagagatgctgcagtccaggtctgaggtcccgctggcatccagctccctgctccatggccagtccctccccagcccagcagtccctccaggctacatccaggaaaactatgaagaactttgagatgggcaagacaattcctgggtgtcttctggacaagatctagggagttacctagcagaccttccggactgacgtgatgctacaggggtcccatctttccttgtcattgagctattttacagttctgtgaattgtaaagaactgagggtaatgcgaatgactcttgttcatagaggcaaatgaattttgtcccatggagatttaattgatattactctgtggatgttgacaagttttgtgtctgttagca

SEQ ID NO: 440369 - DNA, 6849 bp, Homo sapiens
  misc_feature (1852)..(1852): n is a, c, g, or t
  misc_feature (1863)..(1863): n is a, c, g, or t
cctagtgctggtaccctcggggttaccgggcatcggaacacgccccgcgctgctgggtcccgccagacacgccgccgccgcaggaaagtctacagtttggtaccccaggactcgctggtcaggaaagccctgcaggacatgagtgttaggcccgacgcctggcccttggcagcttgggaggtggctggggctgcttttgcctttgccagagacagctccaactgaggacctctccaacgggcccatccacagtccttccttcccctagtgtctgggaagacaggcgcgatgatggactccccgttcctggagctgtggcagtccaaggcagtgtccatcagggagcagctgggactcggggaccggcccaacgactcctattgctacaactcggccaaaaacagcaccgtgctccagggggtcacctttggtggcatccccactgtcctgctcatagacgtcagctgcttcctgttcttaatcttggtgttttctattataagaagaagattctgggactatggccgcattgccctggtgtcagaagcagacagcgagtccagatttcagagattgtcatcgacttcctcctcaggtcaacaagactttgaaaatgagctgggatgctgtccctggctgactgccatcttccgtctgcatgatgaccagatcctggaatggtgtggggaggacgccatccactacctgtccttccagaggcacatcatcttcctgttggtggtggtcagctttttgtccctgtgtgtcatcctgcctgtcaacctctcaggggatttgctggacaaagacccgtatagttttgggaggacaacaatagcaaacctacagactgacaatgacctcctttggctgcacaccatctttgctgtcatttacctcttcttcactgtgggtttcatgcggcaccacactcagtccattaagtacaaagaggagaacctggtgaggcggaccctgttcatcacaggactccccagagatgccaggaaggagactgtggagagccacttccggtaagcaggtggggtgggaggggagctgagccccctccacgtaggaccaacacagccccacccgcagggcgagcaccttaggtgagcgccttctgtctctcgcttgggtatccaggtgagatctgagaaggacctggccctgccacacgtgtatggagtggctcctgtgtgccagccctgctggtgctgtgcagtgaatagcgccctggtggcctatcctcttcaagcagcctgtgcacagtgtccagagcacagaccagggtgtaggtgcgaataaacgtcttgagagcatacgggggaaaaaattgttgaccccggggttcttagcatcacctttgcagaataagagagacgtgagctgagcatttgtatggacccacagggctagggtctcacaggtggaaggacctcggggccatctctgcgtttgttcgtttgtccacccactgagcgggtgtctgttgagtgagcactgtgtctgagtccaggctctccctggtagaacctcctttccagcggctccctttgagtatctgcaccaccaattcctgcagatggaggctggaggaaagtctttcctgtgaggagattacgtgtgcagccagggatgcggggaaaggcccagagcatcaggaaaggtggcggtggggtgcaggggggcagggcaagcagtccgggaaggctcccaggaccccatgctggaggacctgaaggctgggctgaggagctgacattttattctttcttcattcctttttttgtaatcctatttttttagagacagggtcttgctctgttgcccaggctagagttcagtngtgcaataatngcttactgcggcctcaactcctggacttaaggcatcttcctgcctcagcctcccaagtagctgggactgcagacacatggcaccacacccagctaatttttaaattttttatggagatagagtcttgctatgttgcccaggctggtctcgaattgctgggctcaagtgatcctcctgccttgccctcccaaagtgctgggattacaggcgtgagccaccatgcccggcctctcttcattccttatcaatacagcagccactaatttgttgcatggactaggagttggctgcactttaactttgcactatttgtgaagaaagcacttgctaagcaaattgctagacaggatcgtaaactgaatgtttaaaatttgaaaaacttcttcagaaactctaagtattttagaaatatttactaatatgtaaatactcaataccagaatcatttttctgtatttccttgaagcaactcctcaaagttgcctgctaggcaacacctggaaacagtaattccacttaatgtataactttaaagagaaaaaaaaagtctcctcattctcatacaaacattgcatgactcatgctttcccctattttaagaggcctttttagtgaatgctgttgcagtccgtggggattgatgtatgaatttgcctttcaagcagggatgcttaaattgcagttttcttcctcacagctcttattgagaccagaaattgtcctactgtttaatttcatgattgatatacctatgggctgtctctctcactaaaatgtaagcacatccaggccctgttaccagcacctagaacagtgcctggcaggtggtaggtggggatttacatggttctggaatcccctggaattgtatgtataattttgcgtgtatggtgagggggtattgcatggtggccatgagcattgaccttggagccaggttgcctgtattcacctcctggctcagacactcactagctgtgtgatcttgggcacaagccacttacctctgtcggcctcagtttactcatctgtaaaatggggacaaaacctcacaggttatgatgaggattaaataaataaatatatgtaacaatacctggtcaatagtgagtatgtattttgctgggtgacagagtgagaccctgtctctaaacaaaacaaaacaaaacaaaagccctctttgtattaaatttcaaaatttcccccttttggaggataaaagacaaagagaagagaggtctccgctggcacagaaaccagcagcgagatcactctgccatcctttcccttggatccgtgggcacgtctcctgcttggggtgttttcttttccaacggtgtcttttgcctccttctctccctggccacagggacgcgtatcccacgtgtgaggtggttgatgtgcagctgtgctacaacgtggccaaactgatctacctgtgcaaggagaaaaagaagactgagaagagcctgacctattacacaaacctgcaggtgaagacaggccagcggaccctcatcaaccccaagccctgtggccagttttgctgctgtgaagtgctgggctgtgagtgggaagacgccatctcttactacacacggatgaaggacaggctgctggagaggatcacagaggaagaacgccacgtccaggaccagcccctgggaatggccttcgtcaccttccaggagaagtccatggccacctagtgagtgtaggcacatccagaccccttcttggctgactccctgttcccctccagataactcactgtccctctcgagtggagatggtactgctgacccaccatccctgggatttatctgtggtgtttccttctcctccctcagctacccacactcactttcagccagcccagcccatgtttgtgtaacaggcggtgggggtgtgggcagcagccacggagtgggtgattctggctgaccccctcgagctgatgtggcctggccccactgccgggctcttccctgctgccctggacccatcctgttggcttcatgtgccagccttgccccaggggagatggaggcaccctcctttcagacatctgctctgggccacagatccttctgtctgtggctccccaccttcccacaaatgcaaagctgtggggaagacccctggggcacgctggggcgctcactgcagtggggagcttgaccctggggagtggcttttcacagtggcccttggcatgggactctaggctctcatgcctgtggtctcagtgtcatctcgccttaggagcagcacagggtgggtcgggagaggggtgtggaaaggtgtccagccactgccccaggcattgtgacactaggaatggactcacacaggacttcctgcctccttgcagacactggggcaggaggaaaggggaaggcatctgaggcaggagtagaggggctgctgggctccttacgggaggttaaaggaggaaaagctgtgacctgttgagatggtgagggtcgaggtgggagccctgaggagggaagcttgggaacaggcaatgtgtaacgtggtctattgctacacttgggcctggggaaaaagtgacagaatgaaaagttgagccactggcctggcagtagcactgatcagagctccagcttaacaggcagggtggagggggatggccctatggaagagcagtgtgttgccctcagtttccttatctgtaaaatgggaatcgtactccctttgttgctggtggttgcgaggattaaacaaaattctccacacactgtgctagcgtggcacctcttacatagcgttactcataatacactaatcacaacaaagcaaaggtcctatgccactgcctcccactcctactcagtccccacttgccacatgtgtgctggtaacctgagtagcctgggcctggctgttgctacatttccttgcagcatcctgaaagatttcaatgcctgcaagtgtcagagccttcagtgcaaaggtgagccccagccgtcctcccatagcagggagctctatacctccaagtggacagtcacctttgctgctgaccctgaggacatctgctggaagaacctctctatccagggcctccgctggtggctacagtggctgggcatcaacttcaccctcttcctggggctatttttcctgaccacaccctccatcatcctgtccaccatggacaagtttaatgtcaccaaacccatccatgcgctgaataacccgatcatcagccagttcttccccaccctcctgctctggtccttctcggccctgctcccctccattgtctactactctacactgctggagtctcactggaccaagtcgggggaaaaccagatcatgatgaccaaagtctacatattcttgatcttcatggtgctgatcctgccctccctgggtctcaccagtctagattttttcttccggtggctctttgacaaaacttcctcggaggcctccatcaggttggagtgcgtcttcctgcctgaccagggtgccttctttgtgaactatgtcatcgcctcggccttcatcggcaatggcatggagctgctgcggctgccaggtctcatcctctataccttccgcatgatcatggccaagacggctgctgaccgcaggaatgtcaagcagaaccaggccttccagtacgagtttggagccatgtatgcatggatgctgtgtgtcttcactgtcatcgtggcctacagcatcacttgtcccatcatcgcgccatttggcctcatctacatcctgctcaagcacatggtggaccggcacaacctctacttcgtctacctcccagccaagctggagaaggggatccactttgccgctgtgaaccaggccttggcagcccccatcctgtgcctcttctggctctacttcttttccttcctgcgcctgggtatgaaggcccccgccactctgttcaccttcctggtgctgctgctcaccatcctggtctgcctggctcacacctgctttggatgcttcaagcacctcagccctctgaactacaaaacagaagagcctgcaagtgacaaaggaagtgaggcagaggcccacatgcccccaccgttcacaccctacgtgcctcggattctgaacggcttggcctcggagaggacagcactgtctccgcagcagcagcagcagcagacctatggtgccatccacaacatcagcgggactatccctggacagtgcttggcgcagagcgccacgggcagtgtggctgctgccccccaggaggcctgaggctgggtctcactgctctgaaaagacacaaccagaatggcctggggctcaggcccttggctgagtgggaatgcgttgggactgcccagctgagctatcaggacttaaacaggcacaatcaaaaccatctcagtcagaagtcagagcgtggtacctgggagagaaccccgaggggcatctggagtgttggggccatgttggtgatatggacgtacttcacttgtgaaaattctcaccaaaatgttcacaagttcttttgaaggagaggggatgtggggagggagaagaggttatatgagattgtctttaatgttttgtactttttgcatttttaagctttttgacaacatgtattttataatcagagaaaaatgctgacttttataaagtgccattattatgattaaaaaaaaaaagctgcctcgtgtgtgtgggcatgggtttgccatgaaaactatgaagaactttgagatgggcaagacaattcctgggtgtcttctggacaagatctagggagttacctagcagaccttccggactgacgtgatgctacaggggtcccatctttccttgtcattgagctattttacagttctgtgaattgtaaagaactgagggtaatgcgaatgactcttgttcatagaggcaaatgaattttgtcccatggagatttaattgatattactctgtggatgttgacaagttttgtgtctgttagca

SEQ ID NO: 440370 - DNA, 426 bp, Homo sapiens
tcctgattctagctcttggggaaccctggggagcctccccagtagcattggcccttggggcccaggtgaagtcctttgcttggggccctaccgtgagcccacaacctccagggtttctgtgggagagggctgctcccctagacccagcaggtccttgagccattggcaaagaggagagaggctggggccacaggtggtgctggccgaggaaggaggagtagggtcgcacagaggagcactgatggatggagaaccagttctgggagtttggggagagatcaaggcaggagggagcccactgggcagaacctaaaggtccatatgggcagcatgcatacacaggtgtgtgctggagggtttccatccagacccctacactggaaaagggtggctcccatgtgatgcttggtgtctgtgatccttcag

SEQ ID NO: 440371 - DNA, 279 bp, Homo sapiens
gctgatggtgcacggctggcccggctctttctacgagttttataagatcatcccactcctgactgaccccaagaaccatggcctgagcgatgagcacgtttttgaagtcatctgcccttccatccctggctatggcttctcagaggcatcctccaagaagggtacggggctgctagaggttccataactgccccgtcctcgccaagggtgggcccggtgttcccaccaggctctccttccggcggggtgagcagggagttggcccgaggaagctgggaa

SEQ ID NO: 440372 - DNA, 277 bp, Homo sapiens
ggctgcagggtttgctgtgttttctggaaacagactttgctcttgtgctctgtccttcccatccctctcaacttggggtcctgaattttgctccaggacttacaccagaggatcgataagttccgtttcaccccacctttggaggacagctgcttccactatggcttcaactccaactacctgaagaaagtcatctcctactggcggaatgaatttgactggaagaagcaggtggagattctcaacagacaccctcacttcaagactaagattgaag

SEQ ID NO: 440373 - DNA, 502 bp, Homo sapiens
tccacaccctaaccccccagctgctcaggcagtgggcacatggcaggggcctcactgggggcacatagagcatttgggggactgcgagtgctcacctttgacttcctgcaggtcgggggaaaaccagatcatgatgaccaaagtctacatattcttgatcttcatggtgctgatcctgccctccctgggtctcaccaggtatatgccaccaccttctgctctaaattcagaataagagtcacatcaggagagcactgtccccaggagaatgcaaacggtttggcagcagaagcaaacctctaacaatatctaagcctgtcgcaaccactcggcgtgcagtagggctgggtcattgattcttctggcaatatgattgattgttcttctttaaaaaagaaaaaaacaccatattggtcaggctgttcttgagctcctgacctcaggtgatccacccgcctcggcctcccaaagtgctgggattacaggcgtgagactctgtctc

SEQ ID NO: 440374 - DNA, 629 bp, Homo sapiens
  misc_feature (24)..(24): n is a, c, g, or t
  misc_feature (493)..(493): n is a, c, g, or t
tactttaagttttagggtacatgntgacattgtgcaggttagttacatatgtatacgtgtgccacgctggtgtgctgcacccactaactcgtcatctagcattaggtgtatctcccaatgctaaccccctcacccctccaagctcactccccaacccccaactccgtgtggtaagcaacatggctttgatgataaacgactttactctaaaagcggctggaactcagtgacatgagcgtgcgctgaccccacatgggccccctgtgcaagcagagctggccggcccctccttgctggcagaggcacgggaggcctgctggggatgaggccactggccagggctatgctgcaccagaccaatggcaccgccccacccctcccagcgcaggggcagcttggagcagaggcagcactggccaccgctgcgggggcaagtcagcgtcaagagagtccctgagtgagaaggcccagataagcccaggccccccaggcnagcggacaggcacaggcaggggctacagaggtgccaaggccccaggccagttgtgctaggagcctggacctgctcttccacatcctcccattacccacccctactgcatcaggcttataccttggtgccccctgga

SEQ ID NO: 440375 - DNA, 5946 bp, Homo sapiens
cctagtgctggtaccctcggggttaccgggcatcggaacacgccccgcgctgctgggtcccgccagacacgccgccgccgcaggaaagtctacagtttggtaccccaggactcgctggtcaggaaagccctgcaggacatgagtgttaggcccgacgcctggcccttggcagcttgggaggtggctggggctgcttttgcctttgccagagacagctccaactgaggacctctccaacgggcccatccacagtccttccttcccctagtgtctgggaagacaggcgcgatgatggactccccgttcctggagctgtggcagtccaaggcagtgtccatcagggagcagctgggactcggggaccggcccaacgactcctattgctacaactcggccaaaaacagcaccgtgctccagggggtcacctttggtggcatccccactgtcctgctcatagacgtcagctgcttcctgttcttaatcttggtgttttctattataagaagaagattctgggactatggccgcattgccctggtgtcagaagcagacagcgagtccagatttcagagattgtcatcgacttcctcctcaggtcaacaagactttgaaaatgagctgggatgctgtccctggctgactgccatcttccgtctgcatgatgaccagatcctggaatggtgtggggaggacgccatccactacctgtccttccagaggcacatcatcttcctgttggtggtggtcagctttttgtccctgtgtgtcatcctgcctgtcaacctctcaggggatttgctggacaaagacccgtatagttttgggaggacaacaatagcaaacctacagactgacaatgacctcctttggctgcacaccatctttgctgtcatttacctcttcttcactgtgggtttcatgcggcaccacactcagtccattaagtacaaagaggagaacctggtgaggcggaccctgttcatcacaggactccccagagatgccaggaaggagactgtggagagccacttccgggacgcgtatcccacgtgtgaggtggttgatgtgcagctgtgctacaacgtggccaaactgatctacctgtgcaaggagaaaaagaagactgagaagagcctgacctattacacaaacctgcaggtgaagacaggccagcggaccctcatcaaccccaagccctgtggccagttttgctgctgtgaagtgctgggctgtgagtgggaagacgccatctcttactacacacggatgaaggacaggctgctggagaggatcacagaggaagaacgccacgtccaggaccagcccctgggaatggccttcgtcaccttccaggagaagtccatggccacctacatcctgaaagatttcaatgcctgcaagtgtcagagccttcagtgcaaaggtgagccccagccgtcctcccatagcagggagctctatacctccaagtggacagtcacctttgctgctgaccctgaggacatctgctggaagaacctctctatccagggcctccgctggtggctacagtggctgggcatcaacttcaccctcttcctggggctatttttcctgaccacaccctccatcatcctgtccaccatggacaagtttaatgtcaccaaacccatccatgcgctgaataacccgatcatcagccagttcttccccaccctcctgctctggtccttctcggccctgctcccctccattgtctactactctacactgctggagtctcactggaccaagtcgggggaaaaccagatcatgatgaccaaagtctacatattcttgatcttcatggtgctgatcctgccctccctgggtctcaccagtctagattttttcttccggtggctctttgacaaaacttcctcggaggcctccatcaggttggagtgcgtcttcctgcctgaccagggtgccttctttgtgaactatgtcatcgcctcggccttcatcggcaatggcatggagctgctgcggctgccaggtctcatcctctataccttccgcatgatcatggccaagacggctgctgaccgcaggaatgtcaagcagaaccaggccttccagtacgagtttggagccatgtatgcatggatgctgtgtgtcttcactgtcatcgtggcctacagcatcacttgtcccatcatcgcgccatttggcctcatctacatcctgctcaagcacatggtggaccggcacaacctctacttcgtctacctcccagccaagctggagaaggggatccactttgccgctgtgaaccaggccttggcagcccccatcctgtgcctcttctggctctacttcttttccttcctgcgcctgggtatgaaggcccccgccactctgttcaccttcctggtgctgctgctcaccatcctggtctgcctggctcacacctgctttggatgcttcaagcacctcagccctctgaactacaaaacagaagagcctgcaagtgacaaaggaagtgaggcagaggcccacatgcccccaccgttcacaccctacgtgcctcggattctgaacggcttggcctcggagaggacagcactgtctccgcagcagcagcagcagcagacctatggtgccatccacaacatcagcgggactatccctggacagtgcttggcgcagagcgccacgggcagtgtggctgctgccccccaggaggcctgaggctgggtctcactgctctgaaaagacacaaccagaatggcctggggctcaggcccttggctgagtgggaatgcgttgggactgcccagctgagctatcaggtgcccatcttttctggtcccagcagtggtgaggagagcacaggcaggcctcgcccctcccttgctcacccagtttcccctccggcacaagcttccagctctgcagctggggtgacatccccagtggtttgtcgccaagaccatgtggtggacttttcgccccccaaactgatgagtccgggagaatatatggagagagagatgtaacaaggggaaggcctcctcccttctgagcacacacacaaccgataaccaaagagatgctgcagtccaggtctgaggtcccgctggcatccagctccctgctccatggccagtccctccccagcccagcagtccctccaggctacatccaggagtaagctatggggaacaggttgggaggtggccagtgctcctgccagctgtgcacacatctctgtatcccgctagagttctgtgtttttgtatcatgttgtcagggacgctagctgggtcagggttaccccatagcaggcagggacaaggaccactcataatatgcccattggaccacagttaagatccagcctctctcacctcttcagggctgagtgcatgagtctgcacctccaggcaggctctgtgcagtactcaccccctccgtctgctccctccaaggtgtgggggtgggcagtgctcagggcctcctcggagccaaaggacagcatggtcggcacagaggaaggggtacctgggctgggtgcagggccatcccactgcccttgagctgtggctctggcaggaaggaggggcagcccatccctcttctccctcctggggattctggggaatgggatgcaacttaagacttctgcctgagaagcctcctccctgctgcctccagggggcaccaaggcacaagcctgtgcagtaggggcgggatgggggtgtggaagagcaggtccaggctcctagcacaactggcctggggccttggcacctctgtaggccctgcctgtgcctgtccgctggcctggggggcctgggcttatctgggccttctcactcagggactctcttgacgctgacttgcccccgcagtggtggccagtgctgcctctgctccaagctgcccctgcgctgggaggggtgggggcggtgccattggtctggtgcagcatagccctggccagtggcctcatccccagcaggcctcccgtgcctctgccagcaaggaggggccggccagctctgcttgcacagggggccccatgtggggtcagcgcacgctcatgtcactgagttccagccgcttttagagtaaagtcgtttatcatcaaagccatgttgcttaccacacggagttgggggttggggagtgagcttggaggggtgagggggtgagcgtgggctcccagcatgggcaggggacggaggcaaactcattcctcagaaaaggggtatcttccccaagaaaagcctggagggcacttgtggggggaggtggcaggcggggggagaggggtgggtcattgccgctccagcaccgacaggaacttgcggatgtcctgggcgagcagctccggctcctcaaaggccgcaaagtggcccccacgaaccatgtaggaataggagatgagctttgggtacttgaacctcacccacttttcaggcgtgtgcaatagctcaaaagggaaggcagagaagccagtgggcacatagaccttcatccgctcatgcttctgggtcatccagccctgtcccaggttctccttgtagaagcgctgggaggagatgatggtgcctgttgtccagtagagcatgacgttggtcagcaggtcgtccagggagaacttcctttccaggcctccatcctccaggtatcggaattccgtattggtccaggtggaaaacttctctagaatataggcagccagacccacaggagagtcattcagagcagagcctacggtgtcaggcttggtgcactggatgtgcatgtagccgctctccctcatcaggctgtagaataccttctccttgacggggtacagcagctccacatccctctcagtgaggccaagaaacctcccgaaacgctgtcccaggaggagggtcagggtagagaagttgcttaaaaccaaagccatgttcaagtgcaggcctttcacgtggctgggcaccagctgggccatattagtgcagatcagggacccccagtcccctccttgaatgtagaattcctggaagcccagccgcagcatcagcttgtaaaagatcctggcggtggccaccgagttgaaccccttcttggaggatgcctctgagaagccatagccagggatggaagggcagatgacttcaaaaacgtgctcatcgctcaggccatggttcttggggtcagtcaggagtgggatgatcttataaaactcgtagaaagagccgggccagccgtgcaccatcagcaagggcttcggggtatggcctgcgggcagctgggggggcttcacgtggatgaagtggatgtccagcccttcaatcttagtcttgaagtgagggtatctgttgagaatctccacctgcttcttccagtcaaattcattccgccagtaggagatgactttcttcaggtagttggagttgaagccatagtggaagcagctgtcctccaaaggtggggtgaaacggaacttatcgatcctctggtgtaagtcgtggatctcctcatctgacgtttccaccttgaaagggcggatgctgtcgtcctccctggctgcggacctcgtgcctggcccccaccacccatcttcaagtggcaaagtttcctctttgtcccgggagatgaaccagtagatggcaaagcccagcactgaagtgaggaggatttctagccacatggctcctgtacctcagcacagggagaagcactgctgtcgcttccctctaggatataaatgtgcaactttcccctttctgggcagaaagatcccagtgctttcacctgtccaccaggctccacgttctcaccctctgattactccttgggaaagagagctgtggagctctgcacctggcgatgctctaagggcctgtgagagaggcagggcaggctgcaggcactggcccccactccccacggccttctgacaattgcacagtcctgccaagtcag

SEQ ID NO: 440376 - DNA, 8185 bp, Homo sapiens
  misc_feature (1852)..(1852): n is a, c, g, or t
  misc_feature (1863)..(1863): n is a, c, g, or t
cctagtgctggtaccctcggggttaccgggcatcggaacacgccccgcgctgctgggtcccgccagacacgccgccgccgcaggaaagtctacagtttggtaccccaggactcgctggtcaggaaagccctgcaggacatgagtgttaggcccgacgcctggcccttggcagcttgggaggtggctggggctgcttttgcctttgccagagacagctccaactgaggacctctccaacgggcccatccacagtccttccttcccctagtgtctgggaagacaggcgcgatgatggactccccgttcctggagctgtggcagtccaaggcagtgtccatcagggagcagctgggactcggggaccggcccaacgactcctattgctacaactcggccaaaaacagcaccgtgctccagggggtcacctttggtggcatccccactgtcctgctcatagacgtcagctgcttcctgttcttaatcttggtgttttctattataagaagaagattctgggactatggccgcattgccctggtgtcagaagcagacagcgagtccagatttcagagattgtcatcgacttcctcctcaggtcaacaagactttgaaaatgagctgggatgctgtccctggctgactgccatcttccgtctgcatgatgaccagatcctggaatggtgtggggaggacgccatccactacctgtccttccagaggcacatcatcttcctgttggtggtggtcagctttttgtccctgtgtgtcatcctgcctgtcaacctctcaggggatttgctggacaaagacccgtatagttttgggaggacaacaatagcaaacctacagactgacaatgacctcctttggctgcacaccatctttgctgtcatttacctcttcttcactgtgggtttcatgcggcaccacactcagtccattaagtacaaagaggagaacctggtgaggcggaccctgttcatcacaggactccccagagatgccaggaaggagactgtggagagccacttccggtaagcaggtggggtgggaggggagctgagccccctccacgtaggaccaacacagccccacccgcagggcgagcaccttaggtgagcgccttctgtctctcgcttgggtatccaggtgagatctgagaaggacctggccctgccacacgtgtatggagtggctcctgtgtgccagccctgctggtgctgtgcagtgaatagcgccctggtggcctatcctcttcaagcagcctgtgcacagtgtccagagcacagaccagggtgtaggtgcgaataaacgtcttgagagcatacgggggaaaaaattgttgaccccggggttcttagcatcacctttgcagaataagagagacgtgagctgagcatttgtatggacccacagggctagggtctcacaggtggaaggacctcggggccatctctgcgtttgttcgtttgtccacccactgagcgggtgtctgttgagtgagcactgtgtctgagtccaggctctccctggtagaacctcctttccagcggctccctttgagtatctgcaccaccaattcctgcagatggaggctggaggaaagtctttcctgtgaggagattacgtgtgcagccagggatgcggggaaaggcccagagcatcaggaaaggtggcggtggggtgcaggggggcagggcaagcagtccgggaaggctcccaggaccccatgctggaggacctgaaggctgggctgaggagctgacattttattctttcttcattcctttttttgtaatcctatttttttagagacagggtcttgctctgttgcccaggctagagttcagtngtgcaataatngcttactgcggcctcaactcctggacttaaggcatcttcctgcctcagcctcccaagtagctgggactgcagacacatggcaccacacccagctaatttttaaattttttatggagatagagtcttgctatgttgcccaggctggtctcgaattgctgggctcaagtgatcctcctgccttgccctcccaaagtgctgggattacaggcgtgagccaccatgcccggcctctcttcattccttatcaatacagcagccactaatttgttgcatggactaggagttggctgcactttaactttgcactatttgtgaagaaagcacttgctaagcaaattgctagacaggatcgtaaactgaatgtttaaaatttgaaaaacttcttcagaaactctaagtattttagaaatatttactaatatgtaaatactcaataccagaatcatttttctgtatttccttgaagcaactcctcaaagttgcctgctaggcaacacctggaaacagtaattccacttaatgtataactttaaagagaaaaaaaaagtctcctcattctcatacaaacattgcatgactcatgctttcccctattttaagaggcctttttagtgaatgctgttgcagtccgtggggattgatgtatgaatttgcctttcaagcagggatgcttaaattgcagttttcttcctcacagctcttattgagaccagaaattgtcctactgtttaatttcatgattgatatacctatgggctgtctctctcactaaaatgtaagcacatccaggccctgttaccagcacctagaacagtgcctggcaggtggtaggtggggatttacatggttctggaatcccctggaattgtatgtataattttgcgtgtatggtgagggggtattgcatggtggccatgagcattgaccttggagccaggttgcctgtattcacctcctggctcagacactcactagctgtgtgatcttgggcacaagccacttacctctgtcggcctcagtttactcatctgtaaaatggggacaaaacctcacaggttatgatgaggattaaataaataaatatatgtaacaatacctggtcaatagtgagtatgtattttgctgggtgacagagtgagaccctgtctctaaacaaaacaaaacaaaacaaaagccctctttgtattaaatttcaaaatttcccccttttggaggataaaagacaaagagaagagaggtctccgctggcacagaaaccagcagcgagatcactctgccatcctttcccttggatccgtgggcacgtctcctgcttggggtgttttcttttccaacggtgtcttttgcctccttctctccctggccacagggacgcgtatcccacgtgtgaggtggttgatgtgcagctgtgctacaacgtggccaaactgatctacctgtgcaaggagaaaaagaagactgagaagagcctgacctattacacaaacctgcaggtgaagacaggccagcggaccctcatcaaccccaagccctgtggccagttttgctgctgtgaagtgctgggctgtgagtgggaagacgccatctcttactacacacggatgaaggacaggctgctggagaggatcacagaggaagaacgccacgtccaggaccagcccctgggaatggccttcgtcaccttccaggagaagtccatggccacctagtgagtgtaggcacatccagaccccttcttggctgactccctgttcccctccagataactcactgtccctctcgagtggagatggtactgctgacccaccatccctgggatttatctgtggtgtttccttctcctccctcagctacccacactcactttcagccagcccagcccatgtttgtgtaacaggcggtgggggtgtgggcagcagccacggagtgggtgattctggctgaccccctcgagctgatgtggcctggccccactgccgggctcttccctgctgccctggacccatcctgttggcttcatgtgccagccttgccccaggggagatggaggcaccctcctttcagacatctgctctgggccacagatccttctgtctgtggctccccaccttcccacaaatgcaaagctgtggggaagacccctggggcacgctggggcgctcactgcagtggggagcttgaccctggggagtggcttttcacagtggcccttggcatgggactctaggctctcatgcctgtggtctcagtgtcatctcgccttaggagcagcacagggtgggtcgggagaggggtgtggaaaggtgtccagccactgccccaggcattgtgacactaggaatggactcacacaggacttcctgcctccttgcagacactggggcaggaggaaaggggaaggcatctgaggcaggagtagaggggctgctgggctccttacgggaggttaaaggaggaaaagctgtgacctgttgagatggtgagggtcgaggtgggagccctgaggagggaagcttgggaacaggcaatgtgtaacgtggtctattgctacacttgggcctggggaaaaagtgacagaatgaaaagttgagccactggcctggcagtagcactgatcagagctccagcttaacaggcagggtggagggggatggccctatggaagagcagtgtgttgccctcagtttccttatctgtaaaatgggaatcgtactccctttgttgctggtggttgcgaggattaaacaaaattctccacacactgtgctagcgtggcacctcttacatagcgttactcataatacactaatcacaacaaagcaaaggtcctatgccactgcctcccactcctactcagtccccacttgccacatgtgtgctggtaacctgagtagcctgggcctggctgttgctacatttccttgcagcatcctgaaagatttcaatgcctgcaagtgtcagagccttcagtgcaaaggtgagccccagccgtcctcccatagcagggagctctatacctccaagtggacagtcacctttgctgctgaccctgaggacatctgctggaagaacctctctatccagggcctccgctggtggctacagtggctgggcatcaacttcaccctcttcctggggctatttttcctgaccacaccctccatcatcctgtccaccatggacaagtttaatgtcaccaaacccatccatgcgctgaataacatcagcgggactatccctggacagtgcttggcgcagagcgccacgggcagtgtggctgctgccccccaggaggcctgaggctgggtctcactgctctgaaaagacacaaccagaatggcctggggctcaggcccttggctgagtgggaatgcgttgggactgcccagctgagctatcaggtgcccatcttttctggtcccagcagtggtgaggagagcacaggcaggcctcgcccctcccttgctcacccagtttcccctccggcacaagcttccagctctgcagctggggtgacatccccagtggtttgtcgccaagaccatgtggtggacttttcgccccccaaactgatgagtccgggagaatatatggagagagagatgtaacaaggggaaggcctcctcccttctgagcacacacacaaccgataaccaaagagatgctgcagtccaggtctgaggtcccgctggcatccagctccctgctccatggccagtccctccccagcccagcagtccctccaggctacatccaggagtaagctatggggaacaggttgggaggtggccagtgctcctgccagctgtgcacacatctctgtatcccgctagagttctgtgtttttgtatcatgttgtcagggacgctagctgggtcagggttaccccatagcaggcagggacaaggaccactcataatatgcccattggaccacagttaagatccagcctctctcacctcttcagggctgagtgcatgagtctgcacctccaggcaggctctgtgcagtactcaccccctccgtctgctccctccaaggtgtgggggtgggcagtgctcagggcctcctcggagccaaaggacagcatggtcggcacagaggaaggggtacctgggctgggtgcagggccatcccactgcccttgagctgtggctctggcaggaaggaggggcagcccatccctcttctccctcctggggattctggggaatgggatgcaacttaagacttctgcctgagaagcctcctccctgctgcctccagggggcaccaaggcacaagcctgtgcagtaggggcgggatgggggtgtggaagagcaggtccaggctcctagcacaactggcctggggccttggcacctctgtaggccctgcctgtgcctgtccgctggcctggggggcctgggcttatctgggccttctcactcagggactctcttgacgctgacttgcccccgcagtggtggccagtgctgcctctgctccaagctgcccctgcgctgggaggggtgggggcggtgccattggtctggtgcagcatagccctggccagtggcctcatccccagcaggcctcccgtgcctctgccagcaaggaggggccggccagctctgcttgcacagggggccccatgtggggtcagcgcacgctcatgtcactgagttccagccgcttttagagtaaagtcgtttatcatcaaagccatgttgcttaccacacggagttgggggttggggagtgagcttggaggggtgagggggtgagcgtgggctcccagcatgggcaggggacggaggcaaactcattcctcagaaaaggggtatcttccccaagaaaagcctggagggcacttgtggggggaggtggcaggcggggggagaggggtgggtcattgccgctccagcaccgacaggaacttgcggatgtcctgggcgagcagctccggctcctcaaaggccgcaaagtggcccccacgaaccatgtaggaataggagatgagctttgggtacttgaacctcacccacttttcaggcgtgtgcaatagctcaaaagggaaggcagagaagccagtgggcacatagaccttcatccgctcatgcttctgggtcatccagccctgtcccaggttctccttgtagaagcgctgggaggagatgatggtgcctgttgtccagtagagcatgacgttggtcagcaggtcgtccagggagaacttcctttccaggcctccatcctccaggtatcggaattccgtattggtccaggtggaaaacttctctagaatataggcagccagacccacaggagagtcattcagagcagagcctacggtgtcaggcttggtgcactggatgtgcatgtagccgctctccctcatcaggctgtagaataccttctccttgacggggtacagcagctccacatccctctcagtgaggccaagaaacctcccgaaacgctgtcccaggaggagggtcagggtagagaagttgcttaaaaccaaagccatgttcaagtgcaggcctttcacgtggctgggcaccagctgggccatattagtgcagatcagggacccccagtcccctccttgaatgtagaattcctggaagcccagccgcagcatcagcttgtaaaagatcctggcggtggccaccgagttgaaccccttcttggaggatgcctctgagaagccatagccagggatggaagggcagatgacttcaaaaacgtgctcatcgctcaggccatggttcttggggtcagtcaggagtgggatgatcttataaaactcgtagaaagagccgggccagccgtgcaccatcagcaagggcttcggggtatggcctgcgggcagctgggggggcttcacgtggatgaagtggatgtccagcccttcaatcttagtcttgaagtgagggtatctgttgagaatctccacctgcttcttccagtcaaattcattccgccagtaggagatgactttcttcaggtagttggagttgaagccatagtggaagcagctgtcctccaaaggtggggtgaaacggaacttatcgatcctctggtgtaagtcgtggatctcctcatctgacgtttccaccttgaaagggcggatgctgtcgtcctccctggctgcggacctcgtgcctggcccccaccacccatcttcaagtggcaaagtttcctctttgtcccgggagatgaaccagtagatggcaaagcccagcactgaagtgaggaggatttctagccacatggctcggtctcggctcgcaggctccggcggcggcaggcgcgcgatctctccggctcctggctc

SEQ ID NO: 440377 - DNA, 5952 bp, Homo sapiens
cctagtgctggtaccctcggggttaccgggcatcggaacacgccccgcgctgctgggtcccgccagacacgccgccgccgcaggaaagtctacagtttggtaccccaggactcgctggtcaggaaagccctgcaggacatgagtgttaggcccgacgcctggcccttggcagcttgggaggtggctggggctgcttttgcctttgccagagacagctccaactgaggacctctccaacgggcccatccacagtccttccttcccctagtgtctgggaagacaggcgcgatgatggactccccgttcctggagctgtggcagtccaaggcagtgtccatcagggagcagctgggactcggggaccggcccaacgactcctattgctacaactcggccaaaaacagcaccgtgctccagggggtcacctttggtggcatccccactgtcctgctcatagacgtcagctgcttcctgttcttaatcttggtgttttctattataagaagaagattctgggactatggccgcattgccctggtgtcagaagcagacagcgagtccagatttcagagattgtcatcgacttcctcctcaggtcaacaagactttgaaaatgagctgggatgctgtccctggctgactgccatcttccgtctgcatgatgaccagatcctggaatggtgtggggaggacgccatccactacctgtccttccagaggcacatcatcttcctgttggtggtggtcagctttttgtccctgtgtgtcatcctgcctgtcaacctctcaggggatttgctggacaaagacccgtatagttttgggaggacaacaatagcaaacctacagactgacaatgacctcctttggctgcacaccatctttgctgtcatttacctcttcttcactgtgggtttcatgcggcaccacactcagtccattaagtacaaagaggagaacctggtgaggcggaccctgttcatcacaggactccccagagatgccaggaaggagactgtggagagccacttccgggacgcgtatcccacgtgtgaggtggttgatgtgcagctgtgctacaacgtggccaaactgatctacctgtgcaaggagaaaaagaagactgagaagagcctgacctattacacaaacctgcaggtgaagacaggccagcggaccctcatcaaccccaagccctgtggccagttttgctgctgtgaagtgctgggctgtgagtgggaagacgccatctcttactacacacggatgaaggacaggctgctggagaggatcacagaggaagaacgccacgtccaggaccagcccctgggaatggccttcgtcaccttccaggagaagtccatggccacctacatcctgaaagatttcaatgcctgcaagtgtcagagccttcagtgcaaaggtgagccccagccgtcctcccatagcagggagctctatacctccaagtggacagtcacctttgctgctgaccctgaggacatctgctggaagaacctctctatccagggcctccgctggtggctacagtggctgggcatcaacttcaccctcttcctggggctatttttcctgaccacaccctccatcatcctgtccaccatggacaagtttaatgtcaccaaacccatccatgcgctgaataacccgatcatcagccagttcttccccaccctcctgctctggtccttctcggccctgctcccctccattgtctactactctacactgctggagtctcactggaccaagtcgggggaaaaccagatcatgatgaccaaagtctacatattcttgatcttcatggtgctgatcctgccctccctgggtctcaccagtctagattttttcttccggtggctctttgacaaaacttcctcggaggcctccatcaggttggagtgcgtcttcctgcctgaccagggtgccttctttgtgaactatgtcatcgcctcggccttcatcggcaatggcatggagctgctgcggctgccaggtctcatcctctataccttccgcatgatcatggccaagacggctgctgaccgcaggaatgtcaagcagaaccaggccttccagtacgagtttggagccatgtatgcatggatgctgtgtgtcttcactgtcatcgtggcctacagcatcacttgtcccatcatcgcgccatttggcctcatctacatcctgctcaagcacatggtggaccggcacaacctctacttcgtctacctcccagccaagctggagaaggggatccactttgccgctgtgaaccaggccttggcagcccccatcctgtgcctcttctggctctacttcttttccttcctgcgcctgggtatgaaggcccccgccactctgttcaccttcctggtgctgctgctcaccatcctggtctgcctggctcacacctgctttggatgcttcaagcacctcagccctctgaactacaaaacagaagagcctgcaagtgacaaaggaagtgaggcagaggcccacatgcccccaccgttcacaccctacgtgcctcggattctgaacggcttggcctcggagaggacagcactgtctccgcagcagcagcagcagcagacctatggtgccatccacaacatcagcgggactatccctggacagtgcttggcgcagagcgccacgggcagtgtggctgctgccccccaggaggcctgaggctgggtctcactgctctgaaaagacacaaccagaatggcctggggctcaggcccttggctgagtgggaatgcgttgggactgcccagctgagctatcaggtgcccatcttttctggtcccagcagtggtgaggagagcacaggcaggcctcgcccctcccttgctcacccagtttcccctccggcacaagcttccagctctgcagctggggtgacatccccagtggtttgtcgccaagaccatgtggtggacttttcgccccccaaactgatgagtccgggagaatatatggagagagagatgtaacaaggggaaggcctcctcccttctgagcacacacacaaccgataaccaaagagatgctgcagtccaggtctgaggtcccgctggcatccagctccctgctccatggccagtccctccccagcccagcagtccctccaggctacatccaggagtaagctatggggaacaggttgggaggtggccagtgctcctgccagctgtgcacacatctctgtatcccgctagagttctgtgtttttgtatcatgttgtcagggacgctagctgggtcagggttaccccatagcaggcagggacaaggaccactcataatatgcccattggaccacagttaagatccagcctctctcacctcttcagggctgagtgcatgagtctgcacctccaggcaggctctgtgcagtactcaccccctccgtctgctccctccaaggtgtgggggtgggcagtgctcagggcctcctcggagccaaaggacagcatggtcggcacagaggaaggggtacctgggctgggtgcagggccatcccactgcccttgagctgtggctctggcaggaaggaggggcagcccatccctcttctccctcctggggattctggggaatgggatgcaacttaagacttctgcctgagaagcctcctccctgctgcctccagggggcaccaaggcacaagcctgtgcagtaggggcgggatgggggtgtggaagagcaggtccaggctcctagcacaactggcctggggccttggcacctctgtaggccctgcctgtgcctgtccgctggcctggggggcctgggcttatctgggccttctcactcagggactctcttgacgctgacttgcccccgcagtggtggccagtgctgcctctgctccaagctgcccctgcgctgggaggggtgggggcggtgccattggtctggtgcagcatagccctggccagtggcctcatccccagcaggcctcccgtgcctctgccagcaaggaggggccggccagctctgcttgcacagggggccccatgtggggtcagcgcacgctcatgtcactgagttccagccgcttttagagtaaagtcgtttatcatcaaagccatgttgcttaccacacggagttgggggttggggagtgagcttggaggggtgagggggtgagcgtgggctcccagcatgggcaggggacggaggcaaactcattcctcagaaaaggggtatcttccccaagaaaagcctggagggcacttgtggggggaggtggcaggcggggggagaggggtgggtcattgccgctccagcaccgacaggaacttgcggatgtcctgggcgagcagctccggctcctcaaaggccgcaaagtggcccccacgaaccatgtaggaataggagatgagctttgggtacttgaacctcacccacttttcaggcgtgtgcaatagctcaaaagggaaggcagagaagccagtgggcacatagaccttcatccgctcatgcttctgggtcatccagccctgtcccaggttctccttgtagaagcgctgggaggagatgatggtgcctgttgtccagtagagcatgacgttggtcagcaggtcgtccagggagaacttcctttccaggcctccatcctccaggtatcggaattccgtattggtccaggtggaaaacttctctagaatataggcagccagacccacaggagagtcattcagagcagagcctacggtgtcaggcttggtgcactggatgtgcatgtagccgctctccctcatcaggctgtagaataccttctccttgacggggtacagcagctccacatccctctcagtgaggccaagaaacctcccgaaacgctgtcccaggaggagggtcagggtagagaagttgcttaaaaccaaagccatgttcaagtgcaggcctttcacgtggctgggcaccagctgggccatattagtgcagatcagggacccccagtcccctccttgaatgtagaattcctggaagcccagccgcagcatcagcttgtaaaagatcctggcggtggccaccgagttgaacccttcaatcttagtcttgaagtgagggtatctgttgagaatctccacctgcttcttccagtcaaattcattccgccagtaggagatgactttcttcaggtagttggagttgaagccatagtggaagcagctgtcctccaaaggtggggtgaaacggaacttatcgatcctctggtgtaagtcgtggatctcctcatctgacgtttccaccttgaaagggcggatgctgtcgtcctccctggctgcggacctcgtgcctggcccccaccacccatcttcaagtggcaaagtttcctctttgtcccgggagatgaaccagtagatggcaaagcccagcactgaagtgaggaggatttctagccacatggctcacaaagcctgtttggtggtctcttcacacggacgcgcatgaaaatcagtgttccgacttgggtgacaaattaagtgcatttcaccgccgagcgagccacggccctggaagcagagctcgcccaggccaggggacgcggtgcgctctcggggtcgcgagcctccctccctgcggcgtccgcccacagtctgggacgcggaattccctgcgagaagtccgcggtcgcctgcaggctccttcccccagtaggcggcacgcgcagtctcctggccggggcaggagctgggggcggaccaactacaagtccctctgcacccctgcgggccgaccgcagccccgacccctcggcgccccggcccgccgcccaccccggcggccgagcccgcgcggagcccgaaccgcgtctgcgtccggggagtgcgggcccggccggccccgggcgcttacggtctcggctcgcaggctccggcggcggcaggcgcgcgatctctccggctcctggctc

SEQ ID NO: 440378 - DNA, 6218 bp, Homo sapiens
cctagtgctggtaccctcggggttaccgggcatcggaacacgccccgcgctgctgggtcccgccagacacgccgccgccgcaggaaagtctacagtttggtaccccaggactcgctggtcaggaaagccctgcaggacatgagtgttaggcccgacgcctggcccttggcagcttgggaggtggctggggctgcttttgcctttgccagagacagctccaactgaggacctctccaacgggcccatccacagtccttccttcccctagtgtctgggaagacaggcgcgatgatggactccccgttcctggagctgtggcagtccaaggcagtgtccatcagggagcagctgggactcggggaccggcccaacgactcctattgctacaactcggccaaaaacagcaccgtgctccagggggtcacctttggtggcatccccactgtcctgctcatagacgtcagctgcttcctgttcttaatcttggtgttttctattataagaagaagattctgggactatggccgcattgccctggtgtcagaagcagacagcgagtccagatttcagagattgtcatcgacttcctcctcaggtcaacaagactttgaaaatgagctgggatgctgtccctggctgactgccatcttccgtctgcatgatgaccagatcctggaatggtgtggggaggacgccatccactacctgtccttccagaggcacatcatcttcctgttggtggtggtcagctttttgtccctgtgtgtcatcctgcctgtcaacctctcaggggatttgctggacaaagacccgtatagttttgggaggacaacaatagcaaacctacagactgacaatgacctcctttggctgcacaccatctttgctgtcatttacctcttcttcactgtgggtttcatgcggcaccacactcagtccattaagtacaaagaggagaacctggtgaggcggaccctgttcatcacaggactccccagagatgccaggaaggagactgtggagagccacttccgggacgcgtatcccacgtgtgaggtggttgatgtgcagctgtgctacaacgtggccaaactgatctacctgtgcaaggagaaaaagaagactgagaagagcctgacctattacacaaacctgcaggtgaagacaggccagcggaccctcatcaaccccaagccctgtggccagttttgctgctgtgaagtgctgggctgtgagtgggaagacgccatctcttactacacacggatgaaggacaggctgctggagaggatcacagaggaagaacgccacgtccaggaccagcccctgggaatggccttcgtcaccttccaggagaagtccatggccacctacatcctgaaagatttcaatgcctgcaagtgtcagagccttcagtgcaaaggtgagccccagccgtcctcccatagcagggagctctatacctccaagtggacagtcacctttgctgctgaccctgaggacatctgctggaagaacctctctatccagggcctccgctggtggctacagtggctgggcatcaacttcaccctcttcctggggctatttttcctgaccacaccctccatcatcctgtccaccatggacaagtttaatgtcaccaaacccatccatgcgctgaataacccgatcatcagccagttcttccccaccctcctgctctggtccttctcggccctgctcccctccattgtctactactctacactgctggagtctcactggaccaagtcgggggaaaaccagatcatgatgaccaaagtctacatattcttgatcttcatggtgctgatcctgccctccctgggtctcaccagtctagattttttcttccggtggctctttgacaaaacttcctcggaggcctccatcaggttggagtgcgtcttcctgcctgaccagggtgccttctttgtgaactatgtcatcgcctcggccttcatcggcaatggcatggagctgctgcggctgccaggtctcatcctctataccttccgcatgatcatggccaagacggctgctgaccgcaggaatgtcaagcagaaccaggccttccagtacgagtttggagccatgtatgcatggatgctgtgtgtcttcactgtcatcgtggcctacagcatcacttgtcccatcatcgcgccatttggcctcatctacatcctgctcaagcacatggtggaccggcacaacctctacttcgtctacctcccagccaagctggagaaggggatccactttgccgctgtgaaccaggccttggcagcccccatcctgtgcctcttctggctctacttcttttccttcctgcgcctgggtatgaaggcccccgccactctgttcaccttcctggtgctgctgctcaccatcctggtctgcctggctcacacctgctttggatgcttcaagcacctcagccctctgaactacaaaacagaagagcctgcaagtgacaaaggaagtgaggcagaggcccacatgcccccaccgttcacaccctacgtgcctcggattctgaacggcttggcctcggagaggacagcactgtctccgcagcagcagcagcagcagacctatggtgccatccacaacatcagcgggactatccctggacagtgcttggcgcagagcgccacgggcagtgtggctgctgccccccaggaggcctgaggctgggtctcactgctctgaaaagacacaaccagaatggcctggggctcaggcccttggctgagtgggaatgcgttgggactgcccagctgagctatcaggtgcccatcttttctggtcccagcagtggtgaggagagcacaggcaggcctcgcccctcccttgctcacccagtttcccctccggcacaagcttccagctctgcagctggggtgacatccccagtggtttgtcgccaagaccatgtggtggacttttcgccccccaaactgatgagtccgggagaatatatggagagagagatgtaacaaggggaaggcctcctcccttctgagcacacacacaaccgataaccaaagagatgctgcagtccaggtctgaggtcccgctggcatccagctccctgctccatggccagtccctccccagcccagcagtccctccaggctacatccaggagtaagctatggggaacaggttgggaggtggccagtgctcctgccagctgtgcacacatctctgtatcccgctagagttctgtgtttttgtatcatgttgtcagggacgctagctgggtcagggttaccccatagcaggcagggacaaggaccactcataatatgcccattggaccacagttaagatccagcctctctcacctcttcagggctgagtgcatgagtctgcacctccaggcaggctctgtgcagtactcaccccctccgtctgctccctccaaggtgtgggggtgggcagtgctcagggcctcctcggagccaaaggacagcatggtcggcacagaggaaggggtacctgggctgggtgcagggccatcccactgcccttgagctgtggctctggcaggaaggaggggcagcccatccctcttctccctcctggggattctggggaatgggatgcaacttaagacttctgcctgagaagcctcctccctgctgcctccagggggcaccaaggcacaagcctgtgcagtaggggcgggatgggggtgtggaagagcaggtccaggctcctagcacaactggcctggggccttggcacctctgtaggccctgcctgtgcctgtccgctggcctggggggcctgggcttatctgggccttctcactcagggactctcttgacgctgacttgcccccgcagtggtggccagtgctgcctctgctccaagctgcccctgcgctgggaggggtgggggcggtgccattggtctggtgcagcatagccctggccagtggcctcatccccagcaggcctcccgtgcctctgccagcaaggaggggccggccagctctgcttgcacagggggccccatgtggggtcagcgcacgctcatgtcactgagttccagccgcttttagagtaaagtcgtttatcatcaaagccatgttgcttaccacacggagttgggggttggggagtgagcttggaggggtgagggggtgagcgtgggctcccagcatgggcaggggacggaggcaaactcattcctcagaaaaggggtatcttccccaagaaaagcctggagggcacttgtggggggaggtggcaggcggggggagaggggtgggtcattgccgctccagcaccgacaggaacttgcggatgtcctgggcgagcagctccggctcctcaaaggccgcaaagtggcccccacgaaccatgtaggaataggagatgagctttgggtacttgaacctcacccacttttcaggcgtgtgcaatagctcaaaagggaaggcagagaagccagtgggcacatagaccttcatccgctcatgcttctgggtcatccagccctgtcccaggttctccttgtagaagcgctgggaggagatgatggtgcctgttgtccagtagagcatgacgttggtcagcaggtcgtccagggagaacttcctttccaggcctccatcctccaggtatcggaattccgtattggtccaggtggaaaacttctctagaatataggcagccagacccacaggagagtcattcagagcagagcctggcggggagcggggagcaagggagagactcaggcctggggaccagagagctggagcttcaggtgtgatgtgtggcactggccgcagagggcggggctgtgtgcaggaagccacgttcgagcacaggcctgccttaactcctgggtgctcacatgcctcgcttccttaactctgcctcggcatcctcatctgataaacagggacgataccttcccactgtctcccagggcctggcacactgcctgctcagcttccttcaaactgaagggcctacgcctctgcatttggtggggtcccaatgagaagtgctgtttttaaaaaggcggggtttttcagtctatgtgctctgattcatgaaaaatgagaagccacctaaaaaagtctaaaataggggatcagttacaaatattgatatactcataagccaaaatactgtacagtcattaaaaatggctggaacaggctgggggcattggctcatgcctgtaatcccagcactttgggagggcgagaaaggtggatcacctgcggtaaggagttcgagactatcctggctgacatggtgaaaccccatctctattaaaaatacaaaaaaattagcagggcatggtggtgcatgcctgtaatcccagctacttgggaggctgaggcaggcaaattgcttgaacccgggaggtggaggttgcagtgagccgagatcgtaccactgcactctagcctgggcaacagagcaagactctgtctcaaaaaaaaataaataaataaagctgggacaatggcataaatgaatctcacaaacataatattgagcaaaagaagccagactcaagggtatatactctgtgattctattcataggacttaaacaggcacaatcaaaaccatctcagtcagaagtcagagcgtggtacctgggagagaaccccgaggggcatctggagtgttggggccatgttggtgatatggacgtacttcacttgtgaaaattctcaccaaaatgttcacaagttcttttgaaggagaggggatgtggggagggagaagaggttatatgagattgtctttaatgttttgtactttttgcatttttaagctttttgacaacatgtattttataatcagagaaaaatgctgacttttataaagtgccattattatgattaaaaaaaaaaagctgcctcgtgtgtgtgggcatgggtttgccatgaaaactatgaagaactttgagatgggcaagacaattcctgggtgtcttctggacaagatctagggagttacctagcagaccttccggactgacgtgatgctacaggggtcccatctttccttgtcattgagctattttacagttctgtgaattgtaaagaactgagggtaatgcgaatgactcttgttcatagaggcaaatgaattttgtcccatggagatttaattgatattactctgtggatgttgacaagttttgtgtctgttagca

SEQ ID NO: 440379 - DNA, 5141 bp, Homo sapiens
cctagtgctggtaccctcggggttaccgggcatcggaacacgccccgcgctgctgggtcccgccagacacgccgccgccgcaggaaagtctacagtttggtaccccaggactcgctggtcaggaaagccctgcaggacatgagtgttaggcccgacgcctggcccttggcagcttgggaggtggctggggctgcttttgcctttgccagagacagctccaactgaggacctctccaacgggcccatccacagtccttccttcccctagtgtctgggaagacaggcgcgatgatggactccccgttcctggagctgtggcagtccaaggcagtgtccatcagggagcagctgggactcggggaccggcccaacgactcctattgctacaactcggccaaaaacagcaccgtgctccagggggtcacctttggtggcatccccactgtcctgctcatagacgtcagctgcttcctgttcttaatcttggtgttttctattataagaagaagattctgggactatggccgcattgccctggtgtcagaagcagacagcgagtccagatttcagagattgtcatcgacttcctcctcaggtcaacaagactttgaaaatgagctgggatgctgtccctggctgactgccatcttccgtctgcatgatgaccagatcctggaatggtgtggggaggacgccatccactacctgtccttccagaggcacatcatcttcctgttggtggtggtcagctttttgtccctgtgtgtcatcctgcctgtcaacctctcaggggatttgctggacaaagacccgtatagttttgggaggacaacaatagcaaacctacagactgacaatgacctcctttggctgcacaccatctttgctgtcatttacctcttcttcactgtgggtttcatgcggcaccacactcagtccattaagtacaaagaggagaacctggtgaggcggaccctgttcatcacaggactccccagagatgccaggaaggagactgtggagagccacttccgggacgcgtatcccacgtgtgaggtggttgatgtgcagctgtgctacaacgtggccaaactgatctacctgtgcaaggagaaaaagaagactgagaagagcctgacctattacacaaacctgcaggtgaagacaggccagcggaccctcatcaaccccaagccctgtggccagttttgctgctgtgaagtgctgggctgtgagtgggaagacgccatctcttactacacacggatgaaggacaggctgctggagaggatcacagaggaagaacgccacgtccaggaccagcccctgggaatggccttcgtcaccttccaggagaagtccatggccacctacatcctgaaagatttcaatgcctgcaagtgtcagagccttcagtgcaaaggtgagccccagccgtcctcccatagcagggagctctatacctccaagtggacagtcacctttgctgctgaccctgaggacatctgctggaagaacctctctatccagggcctccgctggtggctacagtggctgggcatcaacttcaccctcttcctggggctatttttcctgaccacaccctccatcatcctgtccaccatggacaagtttaatgtcaccaaacccatccatgcgctgaataacccgatcatcagccagttcttccccaccctcctgctctggtccttctcggccctgctcccctccattgtctactactctacactgctggagtctcactggaccaagtcgggggaaaaccagatcatgatgaccaaagtctacatattcttgatcttcatggtgctgatcctgccctccctgggtctcaccagtctagattttttcttccggtggctctttgacaaaacttcctcggaggcctccatcaggttggagtgcgtcttcctgcctgaccagggtgccttctttgtgaactatgtcatcgcctcggccttcatcggcaatggcatggagctgctgcggctgccaggtctcatcctctataccttccgcatgatcatggccaagacggctgctgaccgcaggaatgtcaagcagaaccaggccttccagtacgagtttggagccatgtatgcatggatgctgtgtgtcttcactgtcatcgtggcctacagcatcacttgtcccatcatcgcgccatttggcctcatctacatcctgctcaagcacatggtggaccggcacaacctctacttcgtctacctcccagccaagctggagaaggggatccactttgccgctgtgaaccaggccttggcagcccccatcctgtgcctcttctggctctacttcttttccttcctgcgcctgggtatgaaggcccccgccactctgttcaccttcctggtgctgctgctcaccatcctggtctgcctggctcacacctgctttggatgcttcaagcacctcagccctctgaactacaaaacagaagagcctgcaagtgacaaaggaagtgaggcagaggcccacatgcccccaccgttcacaccctacgtgcctcggattctgaacggcttggcctcggagaggacagcactgtctccgcagcagcagcagcagcagacctatggtgccatccacaacatcagcgggactatccctggacagtgcttggcgcagagcgccacgggcagtgtggctgctgccccccaggaggcctgaggctgggtctcactgctctgaaaagacacaaccagaatggcctggggctcaggcccttggctgagtgggaatgcgttgggactgcccagctgagctatcaggtgcccatcttttctggtcccagcagtggtgaggagagcacaggcaggcctcgcccctcccttgctcacccagtttcccctccggcacaagcttccagctctgcagctggggtgacatccccagtggtttgtcgccaagaccatgtggtggacttttcgccccccaaactgatgagtccgggagaatatatggagagagagatgtaacaaggggaaggcctcctcccttctgagcacacacacaaccgataaccaaagagatgctgcagtccaggtctgaggtcccgctggcatccagctccctgctccatggccagtccctccccagcccagcagtccctccaggctacatccaggagtaagctatggggaacaggttgggaggtggccagtgctcctgccagctgtgcacacatctctgtatcccgctagagttctgtgtttttgtatcatgttgtcagggacgctagctgggtcagggttaccccatagcaggcagggacaaggaccactcataatatgcccattggaccacagttaagatccagcctctctcacctcttcagggctgagtgcatgagtctgcacctccaggcaggctctgtgcagtactcaccccctccgtctgctccctccaaggtgtgggggtgggcagtgctcagggcctcctcggagccaaaggacagcatggtcggcacagaggaaggggtacctgggctgggtgcagggccatcccactgcccttgagctgtggctctggcaggaaggaggggcagcccatccctcttctccctcctggggattctggggaatgggatgcaacttaagacttctgcctgagaagcctcctccctgctgcctccagggggcaccaaggctctccagggaatcaggaggaaaagcccaggtgctcttgacaataatgtggtgcctgctgccctgtgggctccctaatccccagaggggcctgttcagcaaaaggagcacaagcaggtgagcctgcatcctagtcttgaccatgcactgtgaggctgggaacaacccaccaggccacctcacccaaaaaatgcagctacgttggtcacagggtgaggatttgtaagaaagccaacaatagaatttgctgagtgccccatgcagagcaaccagacaaggggatgaagagggtgaggaggttggctgctgggaccagggtcatgactgcaggggcaaaccagggcctcacctttccaggcctccatcctccaggtatcggaattccgtattggtccaggtggaaaacttctctagaatataggcagccagacccacaggagagtcattcagagcagagcctacggtgtcaggcttggtgcactggatgtgcatgtagccgctctccctcatcaggctgtagaataccttctccttgacggggtacagcagctccacatccctctcagtgaggccaagaaacctcccgaaacgctgtcccaggaggagggtcagggtagagaagttgcttaaaaccaaagccatgttcaagtgcaggcctttcacgtggctgggcaccagctgggccatattagtgcagatcagggacccccagtcccctccttgaatgtagaattcctggaagcccagccgcagcatcagcttgtaaaagatcctggcggtggccaccgagttgaaccccttcttggaggatgcctctgagaagccatagccagggatggaagggcagatgacttcaaaaacgtgctcatcgctcaggccatggttcttggggtcagtcaggagtgggatgatcttataaaactcgtagaaagagccgggccagccgtgcaccatcagcaagggcttcggggtatggcctgcgggcagctgggggggcttcacgtggatgaagtggatgtccagcccttcaatcttagtcttgaagtgagggtatctgttgagaatctccacctgcttcttccagtcaaattcattccgccagtaggagatgactttcttcaggtagttggagttgaagccatagtggaagcagctgtcctccaaaggtggggtgaaacggaacttatcgatcctctggtgtaagtcgtggatctcctcatctgacgtttccaccttgaaagggcggatgctgtcgtcctccctggctgcggacctcgtgcctggcccccaccacccatcttcaagtggcaaagtttcctctttgtcccgggagatgaaccagtagatggcaaagcccagcactgaagtgaggaggatttctagccacatggctcggtctcggctcgcaggctccggcggcggcaggcgcgcgatctctccggctcctggctc

SEQ ID NO: 440380 - DNA, 1679 bp, Homo sapiens
caaggcggccattgaagtgtaatcgactccaataggagagtaaagtcgtttatcatcaaagccatgttgcttaccacacggagttgggggttggggagtgagcttggaggggtgagggggtgagcgtgggctcccagcatgggcaggggacggaggcaaactcattcctcagaaaaggggtatcttccccaagaaaagcctggagggcacttgtggggggaggtggcaggcggggggagaggggtgggtcattgccgctccagcaccgacaggaacttgcggatgtcctgggcgagcagctccggctcctcaaaggccgcaaagtggcccccacgaaccatgtaggaataggagatgagctttgggtacttgaacctcacccacttttcaggcgtgtgcaatagctcaaaagggaaggcagagaagccagtgggcacatagaccttcatccgctcatgcttctgggtcatccagccctgtcccaggttctccttgtagaagcgctgggaggagatgatggtgcctgttgtccagtagagcatgacgttggtcagcaggtcgtccagggagaacttcctttccaggcctccatcctccaggtatcggaattccgtattggtccaggtggaaaacttctctagaatataggcagccagacccacaggagagtcattcagagcagagcctacggtgtcaggcttggtgcactggatgtgcatgtagccgctctccctcatcaggctgtagaataccttctccttgacggggtacagcagctccacatccctctcagtgaggccaagaaacctcccgaaacgctgtcccaggaggagggtcagggtagagaagttgcttaaaaccaaagccatgttcaagtgcaggcctttcacgtggctgggcaccagctgggccatattagtgcagatcagggacccccagtcccctccttgaatgtagaattcctggaagcccagccgcagcatcagcttgtaaaagatcctggcggtggccaccgagttgaaccccttcttggaggatgcctctgagaagccatagccagggatggaagggcagatgacttcaaaaacgtgctcatcgctcaggccatggttcttggggtcagtcaggagtgggatgatcttataaaactcgtagaaagagccgggccagccgtgcaccatcagcaagggcttcggggtatggcctgcgggcagctgggggggcttcacgtggatgaagtggatgtccagcccttcaatcttagtcttgaagtgagggtatctgttgagaatctccacctgcttcttccagtcaaattcattccgccagtaggagatgactttcttcaggtagttggagttgaagccatagtggaagcagctgtcctccaaaggtggggtgaaacggaacttatcgatcctctggtgtaagtcgtggatctcctcatctgacgtttccaccttgaaagggcggatgctgtcgtcctccctggctgcggacctcgtgcctggcccccaccacccatcttcaagtggcaaagtttcctctttgtcccgggagatgaaccagtagatggcaaagcccagcactgaagtgaggaggatttctagccacatggctcggtctcggctcgcaggctccggcggcggcaggcgcgcgatctctccggctcctggctc

SEQ ID NO: 440381 - DNA, 2247 bp, Homo sapiens
ggcctagtgggatagtctggtggggcctcacatcttgctccaggtatccgtgtgcaaggagcaggccagaccccctgccaaggtggtcttgcagaagctccatcaacccctgtgtcctgctgaatgtagggcaggggaaacagatcccagacgaaggccctgctgaggctcttggaggaggtgaggacctgcctgcaggaatgagtttgcttttgatctggccccagtgtacctgcttcagcctctggacaagccaccctttccaagcaccctttccttgcatttttattgcttttctctttgcctaagtttctctcctccatccagcaaactcctacttatcctccaaggcccaaatcagatacattctcctggtcatttcccctctctgccgcttagacaaagaatcctccttccactggactctcacagtcctttgcgcattcattcaacatctatgtactgggctctcccactgttcacccggcattgttctaggtgatggggctacagcatggccaagacagagtccctacccccaaggcaggattcagtctcattttactgtctttcccatccccagcactgtctggtcctgtgtgtcactgaaggaataaagggatgggccctggaaagggtgggtcagagctgaccttggtgaagcctgagtcaggccacagagctgggagtcaggcatgtagaggatacagcctctaaggctctgagagattaacagcctcctgtctttctgcgaccaccctcctggaacacgcagtcacgtgaccctgatgccaggctctccagggaatcaggaggaaaagcccaggtgctcttgacaataatgtggtgcctgctgccctgtgggctccctaatccccagaggggcctgttcagcaaaaggagcacaagcaggtgagcctgcatcctagtcttgaccatgcactgtgaggctgggaacaacccaccaggccacctcacccaaaaaatgcagctacgttggtcacagggtgaggatttgtaagaaagccaacaatagaatttgctgagtgccccatgcagagcaaccagacaaggggatgaagagggtgaggaggttggctgctgggaccagggtcatgactgcaggggcaaaccagggcctcacctttccaggcctccatcctccaggtatcggaattccgtattggtccaggtggaaaacttctctagaatataggcagccagacccacaggagagtcattcagagcagagcctacggtgtcaggcttggtgcactggatgtgcatgtagccgctctccctcatcaggctgtagaataccttctccttgacggggtacagcagctccacatccctctcagtgaggccaagaaacctcccgaaacgctgtcccaggaggagggtcagggtagagaagttgcttaaaaccaaagccatgttcaagtgcaggcctttcacgtggctgggcaccagctgggccatattagtgcagatcagggacccccagtcccctccttgaatgtagaattcctggaagcccagccgcagcatcagcttgtaaaagatcctggcggtggccaccgagttgaaccccttcttggaggatgcctctgagaagccatagccagggatggaagggcagatgacttcaaaaacgtgctcatcgctcaggccatggttcttggggtcagtcaggagtgggatgatcttataaaactcgtagaaagagccgggccagccgtgcaccatcagcaagggcttcggggtatggcctgcgggcagctgggggggcttcacgtggatgaagtggatgtccagcccttcaatcttagtcttgaagtgagggtatctgttgagaatctccacctgcttcttccagtcaaattcattccgccagtaggagatgactttcttcaggtagttggagttgaagccatagtggaagcagctgtcctccaaaggtggggtgaaacggaacttatcgatcctctggtgtaagtcgtggatctcctcatctgacgtttccaccttgaaagggcggatgctgtcgtcctccctggctgcggacctcgtgcctggcccccaccacccatcttcaagtggcaaagtttcctctttgtcccgggagatgaaccagtagatggcaaagcccagcactgaagtgaggaggatttctagccacatggctcggtctcggctcgcaggctccggcggcggcaggcgcgcgatctctccggctcctggctc

SEQ ID NO: 440382 - DNA, 1660 bp, Homo sapiens
  misc_feature (29)..(29): n is a, c, g, or t
agcgaactagccgaggagagccaggagcnggagagatcgcgcgcctgccgccgccggagcctgcgagccgagaccgagccatgtggctagaaatcctcctcacttcagtgctgggctttgccatctactggttcatctcccgggacaaagaggaaactttgccacttgaagatgggtggtgggggccaggcacgaggtccgcagccagggaggacgacagcatccgccctttcaaggtggaaacgtcagatgaggagatccacgacttacaccagaggatcgataagttccgtttcaccccacctttggaggacagctgcttccactatggcttcaactccaactacctgaagaaagtcatctcctactggcggaatgaatttgactggaagaagcaggtggagattctcaacagacaccctcacttcaagactaagattgaagggctggacatccacttcatccacgtgaagcccccccagctgcccgcaggccataccccgaagcccttgctgatggtgcacggctggcccggctctttctacgagttttataagatcatcccactcctgactgaccccaagaaccatggcctgagcgatgagcacgtttttgaagtcatctgcccttccatccctggctatggcttctcagaggcatcctccaagaaggggttcaactcggtggccaccgccaggatcttttacaagctgatgctgcggctgggcttccaggaattctacattcaaggaggggactgggggtccctgatctgcactaatatggcccagctggtgcccagccacgtgaaaggcctgcacttgaacatggctttggttttaagcaacttctctaccctgaccctcctcctgggacagcgtttcgggaggtttcttggcctcactgagagggatgtggagctgctgtaccccgtcaaggagaaggtattctacagcctgatgagggagagcggctacatgcacatccagtgcaccaagcctgacaccgtaggctctgctctgaatgactctcctgtgggtctggctgcctatattctagagaagttttccacctggaccaatacggaattccgatacctggaggatggaggcctggaaaggaagttctccctggacgacctgctgaccaacgtcatgctctactggacaacaggcaccatcatctcctcccagcgcttctacaaggagaacctgggacagggctggatgacccagaagcatgagcggatgaaggtctatgtgcccactggcttctctgccttcccttttgagctattgcacacgcctgaaaagtgggtgaggttcaagtacccaaagctcatctcctattcctacatggttcgtgggggccactttgcggcctttgaggagccggagctgctcgcccaggacatccgcaagttcctgtcggtgctggagcggcaatgacccacccctctccccccgcctgccacctccccccacaagtgccctccaggcttttcttggggaagataccccttttctgaggaatgagtttgcctccgtcccctgcccatgctgggagcccacgctcaccccctcacccctccaagctcactccccaacccccaactcctgtaaccgagtgtatatacgtcgctgcaggtgggggagcggga

SEQ ID NO: 440383 - DNA, 1958 bp, Homo sapiens
  misc_feature (29)..(29): n is a, c, g, or t
  misc_feature (1822)..(1822): n is a, c, g, or t
agcgaactagccgaggagagccaggagcnggagagatcgcgcgcctgccgccgccggagcctgcgagccgagaccgagccatgtggctagaaatcctcctcacttcagtgctgggctttgccatctactggttcatctcccgggacaaagaggaaactttgccacttgaagatgggtggtgggggccaggcacgaggtccgcagccagggaggacgacagcatccgccctttcaaggtggaaacgtcagatgaggagatccacgacttacaccagaggatcgataagttccgtttcaccccacctttggaggacagctgcttccactatggcttcaactccaactacctgaagaaagtcatctcctactggcggaatgaatttgactggaagaagcaggtggagattctcaacagacaccctcacttcaagactaagattgaagggctggacatccacttcatccacgtgaagcccccccagctgcccgcaggccataccccgaagcccttgctgatggtgcacggctggcccggctctttctacgagttttataagatcatcccactcctgactgaccccaagaaccatggcctgagcgatgagcacgtttttgaagtcatctgcccttccatccctggctatggcttctcagaggcatcctccaagaaggggttcaactcggtggccaccgccaggatcttttacaagctgatgctgcggctgggcttccaggaattctacattcaaggaggggactgggggtccctgatctgcactaatatggcccagctggtgcccagccacgtgaaaggcctgcacttgaacatggctttggttttaagcaacttctctaccctgaccctcctcctgggacagcgtttcgggaggtttcttggcctcactgagagggatgtggagctgctgtaccccgtcaaggagaaggtattctacagcctgatgagggagagcggctacatgcacatccagtgcaccaagcctgacaccgtaggctctgctctgaatgactctcctgtgggtctggctgcctatattctagagaagttttccacctggaccaatacggaattccgatacctggaggatggaggcctggaaaggaagttctccctggacgacctgctgaccaacgtcatgctctactggacaacaggcaccatcatctcctcccagcgcttctacaaggagaacctgggacagggctggatgacccagaagcatgagcggatgaaggtctatgtgcccactggcttctctgccttcccttttgagctattgcacacgcctgaaaagtgggtgaggttcaagtacccaaagctcatctcctattcctacatggttcgtgggggccactttgcggcctttgaggagccggagctgctcgcccaggacatccgcaagttcctgtcggtgctggagcggcaatgacccaaccccctcacccctccaagctcactccccaacccccaactccgtgtggtaagcaacatggctttgatgataaacgactttactctaaaagcggctggaactcagtgacatgagcgtgcgctgaccccacatgggccccctgtgcaagcagagctggccggcccctccttgctggcagaggcacgggaggcctgctggggatgaggccactggccagggctatgctgcaccagaccaatggcaccgccccacccctcccagcgcaggggcagcttggagcagaggcagcactggccaccgctgcgggggcaagtcagcgtcaagagagtccctgagtgagaaggcccagataagcccaggccccccaggcnagcggacaggcacaggcaggggctacagaggtgccaaggccccaggccagttgtgctaggagcctggacctgctcttccacatcctcccattacccacccctactgcatcaggcttataccttggtgccccctgga

SEQ ID NO: 440384 - DNA, 1537 bp, Homo sapiens
  misc_feature (29)..(29): n is a, c, g, or t
agcgaactagccgaggagagccaggagcnggagagatcgcgcgcctgccgccgccggagcctgcgagccgagaccgagccatgtggctagaaatcctcctcacttcagtgctgggctttgccatctactggttcatctcccgggacaaagaggaaactttgccacttgaagatgggtggtgggggccaggcacgaggtccgcagccagggaggacgacagcatccgccctttcaaggtggaaacgtcagatgaggagatccacgacttacaccagaggatcgataagttccgtttcaccccacctttggaggacagctgcttccactatggcttcaactccaactacctgaagaaagtcatctcctactggcggaatgaatttgactggaagaagcaggtggagattctcaacagacaccctcacttcaagactaagattgaagggctggacatccacttcatccacgtgaagcccccccagctgcccgcaggccataccccgaagcccttgctgatggtgcacggctggcccggctctttctacgagttttataagatcatcccactcctgactgaccccaagaaccatggcctgagcgatgagcacgtttttgaagtcatctgcccttccatccctggctatggcttctcagaggcatcctccaagaaggggttcaactcggtggccaccgccaggatcttttacaagctgatgctgcggctgggcttccaggaattctacattcaaggaggggactgggggtccctgatctgcactaatatggcccagctggtgcccagccacgtgaaaggcctgcacttgaacatggctttggttttaagcaacttctctaccctgaccctcctcctgggacagcgtttcgggaggtttcttggcctcactgagagggatgtggagctgctgtaccccgtcaaggagaaggtattctacagcctgatgagggagagcggctacatgcacatccagtgcaccaagcctgacaccgtaggctctgctctgaatgactctcctgtgggtctggctgcctatattctagagaagttttccacctggaccaatacggaattccgatacctggaggatggaggcctggaaaggaagttctccctggacgacctgctgaccaacgtcatgctctactggacaacaggcaccatcatctcctcccagcgcttctacaaggagaacctgggacagggctggatgacccagaagcatgagcggatgaaggtctatgtgcccactggcttctctgccttcccttttgagctattgcacacgcctgaaaagtgggtgaggttcaagtacccaaagctcatctcctattcctacatggttcgtgggggccactttgcggcctttgaggagccggagctgctcgcccaggacatccgcaagttcctgtcggtgctggagcggcaatgacccaaccccctcacccctccaagctcactccccaacccccaactccgtgtggtaagcaacatggctttgatgataaacgactttactct

SEQ ID NO: 440385 - DNA, 1517 bp, Homo sapiens
  misc_feature (29)..(29): n is a, c, g, or t
  misc_feature (1381)..(1381): n is a, c, g, or t
agcgaactagccgaggagagccaggagcnggagagatcgcgcgcctgccgccgccggagcctgcgagccgagaccgagccatgtggctagaaatcctcctcacttcagtgctgggctttgccatctactggttcatctcccgggacaaagaggaaactttgccacttgaagatgggtggtgggggccaggcacgaggtccgcagccagggaggacgacagcatccgccctttcaaggtggaaacgtcagatgaggagatccacgacttacaccagaggatcgataagttccgtttcaccccacctttggaggacagctgcttccactatggcttcaactccaactacctgaagaaagtcatctcctactggcggaatgaatttgactggaagaagcaggtggagattctcaacagacaccctcacttcaagactaagattgaagggctggacatccacttcatccacgtgaagcccccccagctgcccgcaggccataccccgaagcccttgctgatggtgcacggctggcccggctctttctacgagttttataagatcatcccactcctgactgaccccaagaaccatggcctgagcgatgagcacgtttttgaagtcatctgcccttccatccctggctatggcttctcagaggcatcctccaagaaggggttcaactcggtggccaccgccaggatcttttacaagctgatgctgcggctgggcttccaggaattctacattcaaggaggggactgggggtccctgatctgcactaatatggcccagctggtgcccagccacgtgaaaggcctgcacttgaacatggctttggttttaagcaacttctctaccctgaccctcctcctgggacagcgtttcgggaggtttcttggcctcactgagagggatgtggagctgctgtaccccgtcaaggagaaggtattctacagcctgatgagggagagcggctacatgcacatccagtgcaccaagcctgacaccgtagaccccctcacccctccaagctcactccccaacccccaactccgtgtggtaagcaacatggctttgatgataaacgactttactctaaaagcggctggaactcagtgacatgagcgtgcgctgaccccacatgggccccctgtgcaagcagagctggccggcccctccttgctggcagaggcacgggaggcctgctggggatgaggccactggccagggctatgctgcaccagaccaatggcaccgccccacccctcccagcgcaggggcagcttggagcagaggcagcactggccaccgctgcgggggcaagtcagcgtcaagagagtccctgagtgagaaggcccagataagcccaggccccccaggcnagcggacaggcacaggcaggggctacagaggtgccaaggccccaggccagttgtgctaggagcctggacctgctcttccacatcctcccattacccacccctactgcatcaggcttataccttggtgccccctgga

SEQ ID NO: 440386 - DNA, 1311 bp, Homo sapiens
  misc_feature (29)..(29): n is a, c, g, or t
agcgaactagccgaggagagccaggagcnggagagatcgcgcgcctgccgccgccggagcctgcgagccgagaccgagccatgtggctagaaatcctcctcacttcagtgctgggctttgccatctactggttcatctcccgggacaaagaggaaactttgccacttgaagatgggtggtgggggccaggcacgaggtccgcagccagggaggacgacagcatccgccctttcaaggtggaaacgtcagatgaggagatccacgacttacaccagaggatcgataagttccgtttcaccccacctttggaggacagctgcttccactatggcttcaactccaactacctgaagaaagtcatctcctactggcggaatgaatttgactggaagaagcaggtggagattctcaacagacaccctcacttcaagactaagattgaagggctggacatccacttcatccacgtgaagcccccccagctgcccgcaggccataccccgaagcccttgctgatggtgcacggctggcccggctctttctacgagttttataagatcatcccactcctgactgaccccaagaaccatggcctgagcgatgagcacgtttttgaagtcatctgcccttccatccctggctatggcttctcagaggcatcctccaagaaggggttcaactcggtggccaccgccaggatcttttacaagctgatgctgcggctgggcttccaggaattctacattcaaggaggggactgggggtccctgatctgcactaatatggcccagctggtgcccagccacgtgaaaggcctgcacttgaacatggctttggttttaagcaacttctctaccctgaccctcctcctgggacagcgtttcgggaggtttcttggcctcactgagagggatgtggagctgctgtaccccgtcaaggagaaggtattctacagcctgatgagggagagcggctacatgcacatccagtgcaccaagcctgacaccgtagctctgctctgatcatttcttaccgtggtataaaaggactcttggtggctcctcgtcttcctcgtcttcctccaggatagaacgcatggaattagaccccatggactcttcggaagactggcactctgccaataatgtgatattagactttcatggtcattgcattgtcttgatgactcatcccaagaaaacatttcatgacacatgaccatcgatgcataaagaaaaggttccatgctatacacaactccacactgccaaattcaaacagagtgcgcttctaataaactacattttaaag

SEQ ID NO: 440387 - DNA, 823 bp, Homo sapiens
ggcctagtgggatagtctggtggggcctcacatcttgctccaggtatccgtgtgcaaggagcaggccagaccccctgccaaggtggtcttgcagaagctccatcaacccctgtgtcctgctgaatgtagggcaggggaaacagatcccagacgaaggccctgctgaggctcttggaggaggtgaggacctgcctgcaggaatgagtttgcttttgatctggccccagtgtacctgcttcagcctctggacaagccaccctttccaagcaccctttccttgcatttttattgcttttctctttgcctaagtttctctcctccatccagcaaactcctacttatcctccaaggcccaaatcagatacattctcctggtcatttcccctctctgccgcttagacaaagaatcctccttccactggactctcacagtcctttgcgcattcattcaacatctatgtactgggctctcccactgttcacccggcattgttctaggtgatggggctacagcatggccaagacagagtccctacccccaaggcaggattcagtctcattttactgtctttcccatccccagcactgtctggtcctgtgtgtcactgaaggaataaagggatgggccctggaaagggtgggtcagagctgaccttggtgaagcctgagtcaggccacagagctgggagtcaggcatgtagaggatacagcctctaaggctctgagagattaacagcctcctgtcaggctgacgcacatcgtactcgaaataggcattgagtggtcacttacgattcgacatctatggaatggggtgtaccag

SEQ ID NO: 440388 - DNA, 453 bp, Homo sapiens
ttgctccttgggccctctggtgttctatgaaatttctcaggcccgcctacccccaggtggaggtcagaaaagctcacagaggcaagaaggaatcctggagcccaaatataggggtggcatctccagccccggagggcggtgtgtctggggccggcctctcaggcccctcctttcccagcttcctcgggccaactccctgctcaccccgccggaaggagagcctggtgggaacaccgggcccacccttggcgaggacggggcagttatggaacctctagcagccccgtacccttcttggaggatgcctctgagaagccatagccagggatggaagggcagatgacttcaaaaacgtgctcatcgctcaggccatggttcttggggtcagtcaggagtgggatgatcttataaaactcgtagaaagagccgggccagccgtgcaccatcagcaag

SEQ ID NO: 440389 - DNA, 1131 bp, Homo sapiens
agaatcacttgaacctgggaggcagaggttgcaatgagctgagattgtgccactgcactccactgggcaacagggagagactccatctcaacaacaaaaacaacaacaacaacaaaaaggcaaaaacaaacccctggaaattaactggtaataaagagggggaaaggaactggttggaaactttccttaaaaaaaaaagtcaaaaccctgatttgccaacatgtagacctcagcttaatgtagacttgcagaaagccattaatttagggtagtattgatttatatttgactggtaattaagagcatacatgctgcttctttattatctgggtgacacaaattcatgtggcctgaggaagggtggaaatagtaggggggaaatgtttgtaagctttgagaaagattttttttctgtctgcaagactgcattgaaagcactgtacctaatcaccaccacaccaccaccaccactcctaaaaaaagaaaaaaagagatgctttcacattcacctttccagagcaaattctctgtcactaagcctgcattgcactgaaggtatctttaactcctgcttctgtacaagaggctcatgaacacagctaaaattgagaccatgagcaaagtgcaccaaaccacacacgaggtttgtaaacacacgaggagtgccacatcatgctagatttcagtgagcgcaatggcaggcacacgagaagatgttggggtgggaagaaaatatcccaccttgctgtttagaaccactgtgctgtgagcgctgagacggcagaagagaagccatcccacgcagcacttgcaaggcgatccgagcaccctgtcactcttgtaaactagaaagggcttcttttacttgtgtgaccttaccattcttgaaaataaaaagggagaagagaagggaactaaagtgcaagctaaaagagaaaagctccaagaagacaagcctaccttcaaaaaagaagaggtaaatatgattgaaaagtaatgatcgtaaagcaacagaaaaagcagtcagtgttccaagatatctcaggtctgatgatctcaaaattgtaacctcatatccagtgtatttcaagccatgactcacagtccactgaatagtgagatcagcttaga

SEQ ID NO: 440390 - DNA, 1278 bp, Homo sapiens
tgtgctttctttttattgctgcatttgtgttctacaagacagcctctttctccaagattaacatttcttatgattgttcctgacaatggattcacttccagaggccctgctaaggataaccaaaaaagggcatggagcaggctggttttggcagcgtgcacgcagtttcagagctttttaggtcttgggttttctgatgagtgatttcctgagcatgcctagggaatgacaggcatctccacaggcaggctgcatccaccttggctggggtgtcgtcattggctgcctattagaaaaacgacaggacaatgcataccaccgcctcccgactgtaaacataggggatatgtgttcacttagcatggacttctgggaggggccaaggaagggcggtctggagttttattgaatagagcagtgtgtattcggctgcctgcctgcccgcctgcttgctctctggctgtgctcctgcttaaagaaatcagtccttcctttccgacttagtcctcgggaagaagtttcagactacaaggtatcattggaacatttcaagatcatcaaatcaaattccacagggattggtgaccaaccagaaggctcagacatctgattgctgacctgtccagacatcatctggtctccctgaacctgaaatcacaccatggatgattttgagcgtcgcagagaacttagaaggcaaaagagggaggagatgcgactcgaagcagaaagagacgaggtctcactatgctgcccaggctgctctcaaactcctggactcaagagatcctcctgcctcgggatcccaaagtgtagagattacagacatgagtcaccacacccagtctgtttgctgatctgttttaaaggaatgtctacattcaccttttctaggagtcagttctccaaatcactctacctttcactttgtaagtaacggtggggaagaataaaataacaataaaataaaataaaaacaaaactatattcactccaaagagaagaaaataattcccttttgtcctttaaagagtgaaaatattcattacacaaatcagcaatgtccaccaaaggccactgctcatcagcacttagtgtagtttccagagaaaacatctaaaatgcataaaagttaagcagtttttgtatacctagcttttagctgatttcatgactgctgtatagcttctttgtagatagtttctgcagctgtttcatgaatgttatggtatgcctgcgaattgaattgaaaaagactgagttcacacggcttttgaa

SEQ ID NO: 440391 - DNA, 3177 bp, Homo sapiens
tgagatggagtttcgctcttgttgcccaagctagagtgcaatggtgcaatctcggctcactgcaacctctgcattccaggttcaagcgattctcctgcctcagcctcccaaccgtcttgttttgagcacgactgtatccccagagcctagcaaagtgcccttcatacagtaggcatttaagaagtattgttgaggccaagtgtggtgactcatgcctgtcgtcacagcacttcaggaggccgaggcaggaggatcccttgagcccaggaatttgaaaccagcctgggcaacatagggactatgcctggctaattttttcatttttttctctacaaaatagagagaggcctatggttccagctactcgggaagctgaagtgggaggatcacttgagccctggaggtcgtggctgtagtgagccttgattgtgccactgcactccagcctgggtgacagagcaagaccctgtctcaaaaaaaaacaaaaaagtatctgttgaagaaacgaagtagaatatcaatttcacaacaaatggtgtcccaacaaaaagcatatttcatttttgaaagatcctctgatctagctgtgatggtttattttgagggacatatgtcatcagcatacagttttacaacagaaattatcactctcatttttggtggaggtgtttacacaatgaatttttaagatgataatgttgaggaagacaaactcactataattttatgagaacaaacttcccagcaccaatcctaaaaataactcacaaatttcagggaacaaaaagcgcaaaacctacaaagccggcagcctcggatcttcctgttcctgctgaaggtgtacgcaacatcaagagtatgtgggagaaagggaatgtgttttcatcccccactgcagcaggcacaccaaataaggtgagcatctgatttttgtctcttaagtgtagaggggcatatttttttgcatgtcgattttgatttaggaatcacactagtaaataataaaagcagtgaagaaggtgcaatttgtactttgttttgcaatgaccacaaaagcaagctcagagagaatgtgtttgtgaggttgcatgaggtactaagcccgggccatcttactccaaataaagtgcctgggctgaaatgtccacccttggagttggagtggggtgagttaccagggaaagaaaaccagataacatattctgtaaatatcaagtgttaaggtttatggttatgtgaaatcatacttaatgatattttgaatttgctttgaaaattccttcccaggtaaagtttacttcattctttaatattttggatgattgcccctttgtaggaaactgctggcttgaaggtaggggtttctagccgcatcaatgaatggctaactaaaaccccagatggaaacaagtcacctgctcccaaaccttctgtaagtacctttaggtttttctgagtttctttgatctcccagcttctaccagcagaagaaaacaagcagttggtctgtttacctaggaatggcagtgcccctgttctttgctttccctgatgaatagcaaacaggaaagtgttcagatttacaacagttctaagaagctgcatctcagttactcagagggtaaaatggaaccaaataatcacctctacaccctaactgagaggaggaatcagctagaatactgaggcagttcaaatttagatcctttactcgtctatttgtttagcttctattctataaattctggatagaaatttgaaaatgaaaggtcacatcattttggctacttctttgtcaagagcacccctaaacttattcccaaaagaatatgtatgttgcctattgggaacccatatgttccaatttgcctcatttttataacttggcacaaaaatgcagttattgggtagctgttgaaataattggtctaattgtgttgtcagcacctcctgaggaaagtcataaaactggaaactagaaaaactggttatgaatgatgtttttgagaatctaaaattttcttaatttattaagtgcagctatcttactaaaaagtacatttcttttcacctttttgttgaatgtatacgacaattgcttgcatttgtcattataataagaaaacgtatcaagctccccactgtatattgctgagctttccctgttaagtttgcttttatagctttgttggtgcccaagggagctgagagtccactgtcataatcctacattctagaggaagaagaaaaagtttccaatcctaggcctctgtgcatttaattgcatccattggctccatgccatttaattgcatttgttggctccatatataatctccaaagtcattaaattttgtcactttccaatttaaaaaggaagaaatggaaatgttcacaaatccttcttgggcacaactccttgaaccgtttaattaatctacaccccgagattctttgcataaaggctcacaggaggtatacactaatgtcaacccaatttacaattggaaaatctttatacattgaaaaaagcaacttttcctccccctctcaataggtacaagaatgcgggtttataaaaggacacagttgaggcaagagaccggacccaaaagttatgtgctctttagtgcctcaagttttccaagcatctctggtaacataaggagtagaaattattttcaaaaacaaaataatcactggttccagaccagtgattattaaccctttttgaattatgaacccctttaaaacctaatgaaatttaaggaccctctcccccaaaatatacatataaaaaaacaaggcagtctatggacctactgagtaactctcaagatagtaagtaaggagagaaagatctatgtttccctctttgataagtatgaaatatttggaggagatgctaatttttgcacgtttatgatatttgcaatctttcatttttgtagcagattatactcaaaaatttgatccagaacttggcccctattcttttatcagcactttaacttgtaaactgaaaagtttaccatcatctgtatgacatcctaatgaggttaaaaagataaaatgcagttatgattatgataggtataactgtatccaggtttccacagcaaaaacaaaacaaaacatacaccatgttctggggttattgacagcctcctaaaaaaa

SEQ ID NO: 440392 - DNA, 877 bp, Homo sapiens
caaacaatagtactaccactgctcttgaaaataaaaacctcagtgagatcagggatgatcttaccttcttaaaattgtggtaaaggtgtttgttcacaggctaaaggaccatagctcattctctaagaatttcacctgattccaactctaccacatctgagtggtttctttctgagttttctgccttcctaacaattttgggtcttacttgatgataccaaccaaaacctaataagatttttcttgttctgtttcttcctgatatgtactgttggttagaatcaaagatgaaaagattaaaaaggacaaagaacccaaagaagaagttaagagcttcatggatcgaaagaagggatttacagaagttaagtcgcagaatggagaattcatgacccacaaacttaaacatactgagaatactttcaggtaagaagtagcaactagttaatagaaactgtgttcacatgcaaagaaaaaaaaaaaaaagtcagtcttcccatcctgtgcttccagacagaaacgtgctaagcaggcagcatgcttttgttgtgaggtcattagccattgtcttagagatactcagtcagcaggtccagttcttatatcactaacagaagaccagcagtcatcgctcagacagggcttagtctgcttttcccattattttgaaaggcagatcatgcttggcatccatgtttttgttcactgaccttttgtgagattagtgtattagaaaacattataactgggattcatgtcattcaatgattctctatatggtctgaccaccttcctaagagacctttctcagtaccattttcaagaatgcattttctaaaggttgtaaataaatattgcataagactaagattgtttt

SEQ ID NO: 440393 - DNA, 1043 bp, Homo sapiens
tgtgctttctttttattgctgcatttgtgttctacaagacagcctctttctccaagattaacatttcttatgattgttcctgacaatggattcacttccagaggccctgctaaggataaccaaaaaagggcatggagcaggctggttttggcagcgtgcacgcagtttcagagctttttaggtcttgggttttctgatgagtgatttcctgagcatgcctagggaatgacaggcatctccacaggcaggctgcatccaccttggctggggtgtcgtcattggctgcctattagaaaaacgacaggacaatgcataccaccgcctcccgactgtaaacataggggatatgtgttcacttagcatggacttctgggaggggccaaggaagggcggtctggagttttattgaatagagcagtgtgtattcggctgcctgcctgcccgcctgcttgctctctggctgtgctcctgcttaaagaaatcagtccttcctttccgacttagtcctcgggaagaagtttcagactacaaggtatcattggaacatttcaagatcatcaaatcaaattccacagggattggtgaccaaccagaaggctcagacatctgattgctgacctgtccagacatcatctggtctccctgaacctgaaatcacaccatggatgattttgagcgtcgcagagaacttagaaggcaaaagagggaggagatgcgactcgaagcagaaaggtaaggatctagggtgaaaaatacttgtattcccttattaacaaccttggtttcaggcctcaaagaccatccttttgagaggccaaatgtggtcatatcgcacaccaaactgttcgcaaaagtagttatggaaaatttttctgctaagactctaaattaagcatttaaaaaaggaaaacaaacaagaatcaagaaaaagagagatttgagaggaatcaattgataactgcatattgataattgcatttaatcaatacctttcacattggaatgttttaaatgacaaaagtaatgtgtgaatgaaggtttaa

SEQ ID NO: 440394 - DNA, 2345 bp, Homo sapiens
  misc_feature (1163)..(1163): n is a, c, g, or t
tgagatggagtctcactctgtcactcaggttggagtgcagtggcgccatctcagctcactgcaacctccgcctcctgggttcaagcaattctcctgccgcagcctcccaagtagctgggactacaggcacctgccaccaagcccgggtaatttttgtatttttagtagagacggggtttcaccatgttggccaggctggtctcaaactcctgaccttgatccacctgcctcagcctccccgagtgctgggattacaggcatgagccacctcgcctggcctataaactacgactctgatgaccgcatagtatttaagcaagaaaacaaccaaaatgttctagctaaagtggagaccacttaacctaacccaattaaactttaagttgaacacaagagtagtagatgcagttcagctccatgacattgggtgagttgtctaaatgctctgtgctttggtgtccttgtctgcgtgtgacatgaagccgcagatctcaaagatctctttcattccgtgaaagcgctctcaatgtgtgaagttgactgcttctcctgctgtttaccaagagaataatcttaaccctacattgtggagatcggatttgttctcacttgacagaaagccagtcccacgagcagcttggtacccaaataccagtctgtttagtgctcattagagatgaagaaccatattcataagtcaagctgagacggagtgtcatctccagacagaatcaacaccaccccctcctcaggaactgggatttggctgctttccaagccgctgctgaccaggttccattgcccagcttggctgatgagatcactggcagagtaccatgggtgcagacggggcctgctgtttcaacatgttctcaggagggctcttgcccacatttcttggagaggtgtgagcaccaaacatgctgaaccatccagcccatcactgagcagggccatctctcttcatcccttttcatttggtttgcatttttatgtcatgctccttccctggataaaagggataagaggagtttctcagatttgatttctcagtgggaactgtttgctttggaagccacctacaccaatgctaattgagaacagagctcagaatgggagcctgagaactgcacccggatgaactttttggtgggctgatttcngttgatcttgtcagaattaggttgtatatgcatgtaataccatgatcaactattttccaaaaggctgagcaaatgcatcagtgtctttttcctttgaccagttacttaccttggaaaaattatttgtagttaagcatataaagtcttcatcaggaaaactactggagatcctggccctgactacccagcaataacatttctggaactcccgaagcaatcagtgctctctgatcgctaaacatgatgggcttctattagagagattacagtaaaaaataacaatcagctctctgatgatcctgtgaggagggaacgggttgggaggagtagatttggctgaggacaagcccagactttcgtcacagggacagaccaacgtgttaacacaaagggagaacacgggagcatcctgcaccgtgcatttcagccacagatcacatggcccctccgcgggcccagcccacgccctgaccgcccggcctggccaggtctccgtatctctctgccccgccgccccttcccaactgcggacatgctgggtggatccggatcgcatggaagacgcagcctggccgcgctctcccaaatcgcctaccagaggaatgacgatgatgaagaggaggcagcccgggaacggcgccgccgagcccgacaggaacggctgcggcagaagcaggaggaagaatccttgggacaggtgaccgaccaggtggaggtgaatgcccagaacagtgtgcctgacgaggaggccaagacaaccaccacaaacactcaagtggaaggggatgatgaggccgcattcctggagcgcctggctcggcgtgaggaaagacgccaaaaacgccttcaggaggctctggagcggcagaaggagttcgacccaacaataacagatgcaagtctgtcgctcccaagcagaagaatgcaaaatgacacagcagaaaatgaaactaccgagaaggaagaaaaaagtgaaagtcgccaagaaagatacgagatagaggaacgaacgtcccagtctaccgagatgtggcggtgctgagaaacacgaagagccaggaagggggggagaggaaccagggggctggaatccagccaaaaaaaaaaaagtggcggcccgaattaattgggggccaaaaaagttcaaaggcaaggtcaaacggcgggacagtgtggaacagt

SEQ ID NO: 440395 - DNA, 393 bp, Homo sapiens
  misc_feature (352)..(352): n is a, c, g, or t
tattggaataaaagtcagcagtgatacattctcttctgaactttagattttctagaaaaatatgtaatagtgatcaggaggagctcttgttcaaaagtacaacaaagcaatgttaccttaccataggcctaattcaaaacttttgaaaagtaaattccttgtttactggtttgactataattctctgttatctttacgaggtaaaactgcaagctgactagcatgttctgtgaatctgccattcctaaaaattttataaacacttgatacttttcactgataatggatcgctccaataaacatatattgtgaaaatgcatccacaataaatggaattccttcctgcaaaaanaagtcgacgcggccgcgaatttagtagtagtaggcggccgc

SEQ ID NO: 440396 - DNA, 3707 bp, Homo sapiens
ggtcgcctactactactaaattcgcggccgcgtcgacagggcagcagaggagaggcagaggataaaggaggaagagaaaagggcagcagaggagaggcagaggataaaagaggaagagaaaagggcagcagaggagaggcaaagggccagggcagaggaggaagagaaggctaaggtagaagagcagaaacgtaacaagcagctagaagagaaaaaacatgccatgcaagagacaaagataaaaggggaaaaggtagaacagaaaatagaagggaaatgggtaaatgaaaagaaagcacaagaagataaacttcagacagctgtcctaaagaaacagggagaagagaagggaactaaagtgcaagctaaaagagaaaagctccaagaagacaagcctaccttcaaaaaagaagagatcaaagatgaaaagattaaaaaggacaaagaacccaaagaagaagttaagagcttcatggatcgaaagaagggatttacagaagttaagtcgcagaatggagaattcatgacccacaaacttaaacatactgagaatactttcagccgccctggagggagggccagcgtggacaccaaggaggctgagggcgccccccaggtggaagccggcaaaaggctggaggagcttcgtcgtcgtcgcggggagaccgagagcgaagagttcgagaagctcaaacagaagcagcaggaggcggctttggagctggaggaactcaagaaaaagagggaggagagaaggaaggtcctggaggaggaagagcagaggaggaagcaggaggaagccgatcgaaaactcagagaggaggaagagaagaggaggctaaaggaagagattgaaaggcgaagagcagaagctgctgagaaacgccagaagatgccagaagatggcttgtcagatgacaagaaaccattcaagtgtttcactcctaaaggttcatctctcaagatagaagagcgagcagaatttttgaataagtctgtgcagaaaagcagtggtgtcaaatcgacccatcaagcagcaatagtctccaagattgacagcagactggagcagtataccagtgcaattgagggaacaaaaagcgcaaaacctacaaagccggcagcctcggatcttcctgttcctgctgaaggtgtacgcaacatcaagagtatgtgggagaaagggaatgtgttttcatcccccactgcagcaggcacaccaaataaggaaactgctggcttgaaggtaggggtttctagccgcatcaatgaatggctaactaaaaccccagatggaaacaagtcacctgctcccaaaccttctgacttgagaccaggagacgtatccagcaagcggaacctctgggaaaagcaatctgtggataaggtcacttcccccactaaggtttgagacagttccagaaagaacccaagctcaagacgcaggacgagctcagttgtagagggctaattcgctctgttttgtatttatgttgatttactaaattgggttcattatcttttatttttcaatatcccagtaaacccatgtatattatcactatatttaataatcacagtctagagatgttcatggtaaaagtactgcctttgcacaggagcctgtttctaaagaaacccatgctgtgaaatagagacttttctactgatcatcataactctgtatctgagcagtgataccaaccacatctgaagtcaacagaagatccaagtttaaaattgcctgcggaatgtgtgcagtatctagaaaaatgaaccgtagtttttgtttttttaaatacagaagtcatgttgtttctgcactttataataaagcatggaagaaattatcttagtaggcaattgtaacactttttgaaagtaacccatttcagatttgaaatactgcaataatggttgtctttaaaaaaaaaaaagaaatgtactgttaaggtattactttttttcatgctgatgattcatatctaaattacattattatgttagctgacagtggtactgattttttaggttggttgttttgtggatttctttagtagtgatagtagcctgaaccacattttagataactcaattatgtatgtatgtgcatacacatatacaaacacactaatggtagaatgcttttttatgtgctagactattatatttagtagtatgtcattgtaactagccaatatcacagcttttgaaaaattaaaaaatcacactatattaatatttcatatttgccaacagaaacatggcagataggtatcaatatgttttcaatgcctgatgacctataagaagaaagtattgaaaagaagagagattagaactgttagaaggagttgaaattttctaaaagacatagtatttagtttataattaaatgcattcttgaagtccagtgtgaattttattaatgctatcatctcgaccaagctcaaagcctacttattagaaacaatgaagttcacaataggtcataaggtctcttccttttctaaaattgaaagacaagaaatttagtgccaatattgtacagacagaaattccatgtatgagtctcaacaaagactacctttggctaaatgtctagaagcagagaagtaaagtgagcaaaatccagtgttgaggagtcatgacagtactttgatctttatatactctgaagcatttcttcaaacttttctacttttatttgtcattgatacctgtagtaagttgacaatgtggtgaaatttcaaaattatatgtaacttctactagttttactttctcccccaagtcttttttaactcatgatttttacacacacaatccagaacttattatatagcctctaagtctttattcttcacagtagataatgaaagagtcctccagtgtcttggcaaaatgttctagtatagctggatacatacagtggagttctataaactcatacctcagtggacttaaccaaaattgtgttagtctcaattcctaccacactgagggagcctcccaaataactattttcttatctgcagtattcctccagaagagctaaccagggcagggctggcatgagaagtgacatctgcgttacaaagtctatcttcctcataagtctgtaaagagcaattgaatcttctagctttagcaaacctaagccaaaggaaggaaagccacgaagaatgcagaagtcaaaccctcatgacaaagtaggcacaagtctacaataagctaaatcagaatttacaaatacaagtgtcccaggtagcattgactcccgtcattggagtgaaatggatcaaagtttgaattaaggcctatggtaaggtaacattgctttgttgtacttttgaacaagagctcctcctgatcactattacatatttttctagaaaatctaaagttcagaagagaatgtatcactgctgacttttattccaatatttggatggagtaagttttagggtagaattttgttcagtttggatttaatcttttgaaaagtaaattccttgtttactggtttgactataattctctgttatctttacgaggtaaaactgcaagctgactagcatgttctgtgaatctgccattcctaaaaattttataaacacttgatacttttcactgataatggatcgctccaataaacatatattgtgaaaatgcatccacaataaatggaattccttcctgcaaaa

SEQ ID NO: 440397 - DNA, 3640 bp, Homo sapiens
ggtcgcctactactactaaattcgcggccgcgtcgacagggcagcagaggagaggcagaggataaaggaggaagagaaaagggcagcagaggagaggcagaggataaaagaggaagagaaaagggcagcagaggagaggcaaagggccagggcagaggaggaagagaaggctaaggtagaagagcagaaacgtaacaagcagctagaagagaaaaaacatgccatgcaagagacaaagataaaaggggaaaaggtagaacagaaaatagaagggaaatgggtaaatgaaaagaaagcacaagaagataaacttcagacagctgtcctaaagaaacagggagaagagaagggaactaaagtgcaagctaaaagagaaaagctccaagaagacaagcctaccttcaaaaaagaagagatcaaagatgaaaagattaaaaaggacaaagaacccaaagaagaagttaagagcttcatggatcgaaagaagggatttacagaagttaagtcgcagaatggagaattcatgacccacaaacttaaacatactgagaatactttcagccgccctggagggagggccagcgtggacaccaaggaggctgagggcgccccccaggtggaagccggcaaaaggctggaggagcttcgtcgtcgtcgcggggagaccgagagcgaagagttcgagaagctcaaacagaagcagcaggaggcggctttggagctggaggaactcaagaaaaagagggaggagagaaggaaggtcctggaggaggaagagcagaggaggaagcaggaggaagccgatcgaaaactcagagaggaggaagagaagaggaggctaaaggaagagattgaaaggcgaagagcagaagctgctgagaaacgccagaagatgccagaagatggcttgtcagatgacaagaaaccattcaagtgtttcactcctaaaggttcatctctcaagatagaagagcgagcagaatttttgaataagtctgtgcagaaaagcagtggtgtcaaatcgacccatcaagcagcaatagtctccaagattgacagcagactggagcagtataccagtgcaattgaggcaacatcaagagtatgtgggagaaagggaatgtgttttcatcccccactgcagcaggcacaccaaataaggaaactgctggcttgaaggtaggggtttctagccgcatcaatgaatggctaactaaaaccccagatggaaacaagtcacctgctcccaaaccttctgacttgagaccaggagacgtatccagcaagcggaacctctgggaaaagcaatctgtggataaggtcacttcccccactaaggtttgagacagttccagaaagaacccaagctcaagacgcaggacgagctcagttgtagagggctaattcgctctgttttgtatttatgttgatttactaaattgggttcattatcttttatttttcaatatcccagtaaacccatgtatattatcactatatttaataatcacagtctagagatgttcatggtaaaagtactgcctttgcacaggagcctgtttctaaagaaacccatgctgtgaaatagagacttttctactgatcatcataactctgtatctgagcagtgataccaaccacatctgaagtcaacagaagatccaagtttaaaattgcctgcggaatgtgtgcagtatctagaaaaatgaaccgtagtttttgtttttttaaatacagaagtcatgttgtttctgcactttataataaagcatggaagaaattatcttagtaggcaattgtaacactttttgaaagtaacccatttcagatttgaaatactgcaataatggttgtctttaaaaaaaaaaaagaaatgtactgttaaggtattactttttttcatgctgatgattcatatctaaattacattattatgttagctgacagtggtactgattttttaggttggttgttttgtggatttctttagtagtgatagtagcctgaaccacattttagataactcaattatgtatgtatgtgcatacacatatacaaacacactaatggtagaatgcttttttatgtgctagactattatatttagtagtatgtcattgtaactagccaatatcacagcttttgaaaaattaaaaaatcacactatattaatatttcatatttgccaacagaaacatggcagataggtatcaatatgttttcaatgcctgatgacctataagaagaaagtattgaaaagaagagagattagaactgttagaaggagttgaaattttctaaaagacatagtatttagtttataattaaatgcattcttgaagtccagtgtgaattttattaatgctatcatctcgaccaagctcaaagcctacttattagaaacaatgaagttcacaataggtcataaggtctcttccttttctaaaattgaaagacaagaaatttagtgccaatattgtacagacagaaattccatgtatgagtctcaacaaagactacctttggctaaatgtctagaagcagagaagtaaagtgagcaaaatccagtgttgaggagtcatgacagtactttgatctttatatactctgaagcatttcttcaaacttttctacttttatttgtcattgatacctgtagtaagttgacaatgtggtgaaatttcaaaattatatgtaacttctactagttttactttctcccccaagtcttttttaactcatgatttttacacacacaatccagaacttattatatagcctctaagtctttattcttcacagtagataatgaaagagtcctccagtgtcttggcaaaatgttctagtatagctggatacatacagtggagttctataaactcatacctcagtggacttaaccaaaattgtgttagtctcaattcctaccacactgagggagcctcccaaataactattttcttatctgcagtattcctccagaagagctaaccagggcagggctggcatgagaagtgacatctgcgttacaaagtctatcttcctcataagtctgtaaagagcaattgaatcttctagctttagcaaacctaagccaaaggaaggaaagccacgaagaatgcagaagtcaaaccctcatgacaaagtaggcacaagtctacaataagctaaatcagaatttacaaatacaagtgtcccaggtagcattgactcccgtcattggagtgaaatggatcaaagtttgaattaaggcctatggtaaggtaacattgctttgttgtacttttgaacaagagctcctcctgatcactattacatatttttctagaaaatctaaagttcagaagagaatgtatcactgctgacttttattccaatatttggatggagtaagttttagggtagaattttgttcagtttggatttaatcttttgaaaagtaaattccttgtttactggtttgactataattctctgttatctttacgaggtaaaactgcaagctgactagcatgttctgtgaatctgccattcctaaaaattttataaacacttgatacttttcactgataatggatcgctccaataaacatatattgtgaaaatgcatccacaataaatggaattccttcctgcaaaa

SEQ ID NO: 440398 - DNA, 3516 bp, Homo sapiens
ggtcgcctactactactaaattcgcggccgcgtcgacagggcagcagaggagaggcagaggataaaggaggaagagaaaagggcagcagaggagaggcagaggataaaagaggaagagaaaagggcagcagaggagaggcaaagggccagggcagaggaggaagagaaggctaaggtagaagagcagaaacgtaacaagcagctagaagagaaaaaacatgccatgcaagagacaaagataaaaggggaaaaggtagaacagaaaatagaagggaaatgggtaaatgaaaagaaagcacaagaagataaacttcagacagctgtcctaaagaaacagggagaagagaagggaactaaagtgcaagctaaaagagaaaagctccaagaagacaagcctaccttcaaaaaagaagagatcaaagatgaaaagattaaaaaggacaaagaacccaaagaagaagttaagagcttcatggatcgaaagaagggatttacagaagttaagtcgcagaatggagaattcatgacccacaaacttaaacatactgagaatactttcagccgccctggagggagggccagcgtggacaccaaggaggctgagggcgccccccaggtggaagccggcaaaaggctggaggagcttcgtcgtcgtcgcggggagaccgagagcgaagagttcgagaagctcaaacagaagcagcaggaggcggctttggagctggaggaactcaagaaaaagagggaggagagaaggaaggtcctggaggaggaagagcagaggaggaagcaggaggaagccgatcgaaaactcagagaggaggaagagaagaggaggctaaaggaagagattgaaaggcgaagagcagaagctgctgagaaacgccagaagatgccagaagatggcttgtcagatgacaagaaaccattcaagtgtttcactcctaaaggttcatctctcaagatagaagagcgagcagaatttttgaataagtctgtgcagaaaagcagtggtgtcaaatcgacccatcaagcagcaatagtctccaagattgacagcagactggagcagtataccagtgcaattgagtaaaaccccagatggaaacaagtcacctgctcccaaaccttctgacttgagaccaggagacgtatccagcaagcggaacctctgggaaaagcaatctgtggataaggtcacttcccccactaaggtttgagacagttccagaaagaacccaagctcaagacgcaggacgagctcagttgtagagggctaattcgctctgttttgtatttatgttgatttactaaattgggttcattatcttttatttttcaatatcccagtaaacccatgtatattatcactatatttaataatcacagtctagagatgttcatggtaaaagtactgcctttgcacaggagcctgtttctaaagaaacccatgctgtgaaatagagacttttctactgatcatcataactctgtatctgagcagtgataccaaccacatctgaagtcaacagaagatccaagtttaaaattgcctgcggaatgtgtgcagtatctagaaaaatgaaccgtagtttttgtttttttaaatacagaagtcatgttgtttctgcactttataataaagcatggaagaaattatcttagtaggcaattgtaacactttttgaaagtaacccatttcagatttgaaatactgcaataatggttgtctttaaaaaaaaaaaagaaatgtactgttaaggtattactttttttcatgctgatgattcatatctaaattacattattatgttagctgacagtggtactgattttttaggttggttgttttgtggatttctttagtagtgatagtagcctgaaccacattttagataactcaattatgtatgtatgtgcatacacatatacaaacacactaatggtagaatgcttttttatgtgctagactattatatttagtagtatgtcattgtaactagccaatatcacagcttttgaaaaattaaaaaatcacactatattaatatttcatatttgccaacagaaacatggcagataggtatcaatatgttttcaatgcctgatgacctataagaagaaagtattgaaaagaagagagattagaactgttagaaggagttgaaattttctaaaagacatagtatttagtttataattaaatgcattcttgaagtccagtgtgaattttattaatgctatcatctcgaccaagctcaaagcctacttattagaaacaatgaagttcacaataggtcataaggtctcttccttttctaaaattgaaagacaagaaatttagtgccaatattgtacagacagaaattccatgtatgagtctcaacaaagactacctttggctaaatgtctagaagcagagaagtaaagtgagcaaaatccagtgttgaggagtcatgacagtactttgatctttatatactctgaagcatttcttcaaacttttctacttttatttgtcattgatacctgtagtaagttgacaatgtggtgaaatttcaaaattatatgtaacttctactagttttactttctcccccaagtcttttttaactcatgatttttacacacacaatccagaacttattatatagcctctaagtctttattcttcacagtagataatgaaagagtcctccagtgtcttggcaaaatgttctagtatagctggatacatacagtggagttctataaactcatacctcagtggacttaaccaaaattgtgttagtctcaattcctaccacactgagggagcctcccaaataactattttcttatctgcagtattcctccagaagagctaaccagggcagggctggcatgagaagtgacatctgcgttacaaagtctatcttcctcataagtctgtaaagagcaattgaatcttctagctttagcaaacctaagccaaaggaaggaaagccacgaagaatgcagaagtcaaaccctcatgacaaagtaggcacaagtctacaataagctaaatcagaatttacaaatacaagtgtcccaggtagcattgactcccgtcattggagtgaaatggatcaaagtttgaattaaggcctatggtaaggtaacattgctttgttgtacttttgaacaagagctcctcctgatcactattacatatttttctagaaaatctaaagttcagaagagaatgtatcactgctgacttttattccaatatttggatggagtaagttttagggtagaattttgttcagtttggatttaatcttttgaaaagtaaattccttgtttactggtttgactataattctctgttatctttacgaggtaaaactgcaagctgactagcatgttctgtgaatctgccattcctaaaaattttataaacacttgatacttttcactgataatggatcgctccaataaacatatattgtgaaaatgcatccacaataaatggaattccttcctgcaaaa

SEQ ID NO: 440399 - DNA, 3837 bp, Homo sapiens
  misc_feature (2606)..(2607): n is a, c, g, or t
  misc_feature (2620)..(2620): n is a, c, g, or t
ggtcgcctactactactaaattcgcggccgcgtcgacagggcagcagaggagaggcagaggataaaggaggaagagaaaagggcagcagaggagaggcagaggataaaagaggaagagaaaagggcagcagaggagaggcaaagggccagggcagaggaggaagagaaggctaaggtagaagagcagaaacgtaacaagcagctagaagagaaaaaacatgccatgcaagagacaaagataaaaggggaaaaggtagaacagaaaatagaagggaaatgggtaaatgaaaagaaagcacaagaagataaacttcagacagctgtcctaaagaaacagggagaagagaagggaactaaagtgcaagctaaaagagaaaagctccaagaagacaagcctaccttcaaaaaagaagagatcaaagatgaaaagattaaaaaggacaaagaacccaaagaagaagttaagagcttcatggatcgaaagaagggatttacagaagttaagtcgcagaatggagaattcatgacccacaaacttaaacatactgagaatactttcagccgccctggagggagggccagcgtggacaccaaggaggctgagggcgccccccaggtggaagccggcaaaaggctggaggagcttcgtcgtcgtcgcggggagaccgagagcgaagagttcgagaagctcaaacagaagcagcaggaggcggctttggagctggaggaactcaagaaaaagagggaggagagaaggaaggtcctggaggaggaagagcagaggaggaagcaggaggaagccgatcgaaaactcagagaggaggaagagaagaggaggctaaaggaagagattgaaaggcgaagagcagaagctgctgagaaacgccagaagatgccagaagatggcttgtcagatgacaagaaaccattcaagtgtttcactcctaaaggttcatctctcaagatagaagagcgagcagaatttttgaataagtctgtgcagaaaagcagtggtgtcaaatcgacccatcaagcagcaatagtctccaagattgacagcagactggagcagtataccagtgcaattgagggaacaaaaagcgcaaaacctacaaagccggcagcctcggatcttcctgttcctgctgaaggtgtacgcaacatcaagagtatgtgggagaaagggaatgtgttttcatcccccactgcagcaggcacaccaaataaggaaactgctggcttgaaggtaggggtttctagccgcatcaatgaatggctaactaaaaccccagatggaaacaagtcacctgctcccaaaccttctgacttgagaccaggagacgtatccagcaagcggaacctctgggaaaagcaatctgtggataaggtcacttcccccactaaggtttgagacagttccagaaagaacccaagctcaagacgcaggacgagctcagttgtagagggctaattcgctctgttttgtatttatgttgatttactaaattgggttcattatcttttatttttcaatatcccagtaaacccatgtatattatcactatatttaataatcacagtctagagatgttcatggtaaaagtactgcctttgcacaggagcctgtttctaaagaaacccatgctgtgaaatagagacttttctactgatcatcataactctgtatctgagcagtgataccaaccacatctgaagtcaacagaagatccaagtttaaaattgcctgcggaatgtgtgcagtatctagaaaaatgaaccgtagtttttgtttttttaaatacagaagtcatgttgtttctgcactttataataaagcatggaagaaattatcttagtaggcaattgtaacactttttgaaagtaacccatttcagatttgaaatactgcaataatggttgtctttaaaaaaaaaaaagaaatgtactgttaaggtattactttttttcatgctgatgattcatatctaaattacattattatgttagctgacagtggtactgattttttaggttggttgttttgtggatttctttagtagtgatagtagcctgaaccacattttagataactcaattatgtatgtatgtgcatacacatatacaaacacactaatggtagaatgcttttttatgtgctagactattatatttagtagtatgtcattgtaactagccaatatcacagcttttgaaaaattaaaaaatcacactatattaatatttcatatttgccaacagaaacatggcagataggtatcaatatgttttcaatgcctgatgacctataagaagaaagtattgaaaagaagagagattagaactgttagaaggagttgaaattttctaaaagacatagtatttagtttataattaaatgcattcttgaagtccagtgtgaattttattaatgctatcatctcgaccaagctcaaagcctacttattagaaacaatgaagttcacaataggtcataaggtctcttccttttctaaaattgaaagacaagaaatttagtgccaatattgtacagacagaaattccatgtatgagtctcaacaaagactacctttgggcgttaaaacaannttgggattttccnttttaacggacaacaaaggcggcccaaaccgccacaccgcgacaacaaacccgcggattttaagccaccaaccgcgttgggcaaccggccccaaaaaggaccaacttcccccaaggggttggcgtttccggaagcgggaacggtccacttgaaccaagttaacttttggaactcttttcataataacctctggaaggccaaacttttctacttttatttgtcattgatacctgtagtaagttgacaatgtggtgaaatttcaaaattatatgtaacttctactagttttactttctcccccaagtcttttttaactcatgatttttacacacacaatccagaacttattatatagcctctaagtctttattcttcacagtagataatgaaagagtcctccagtgtcttggcaaaatgttctagtatagctggatacatacagtggagttctataaactcatacctcagtggacttaaccaaaattgtgttagtctcaattcctaccacactgagggagcctcccaaataactattttcttatctgcagtattcctccagaagagctaaccagggcagggctggcatgagaagtgacatctgcgttacaaagtctatcttcctcataagtctgtaaagagcaattgaatcttctagctttagcaaacctaagccaaaggaaggaaagccacgaagaatgcagaagtcaaaccctcatgacaaagtaggcacaagtctacaataagctaaatcagaatttacaaatacaagtgtcccaggtagcattgactcccgtcattggagtgaaatggatcaaagtttgaattaaggcctatggtaaggtaacattgctttgttgtacttttgaacaagagctcctcctgatcactattacatatttttctagaaaatctaaagttcagaagagaatgtatcactgctgacttttattccaatatttggatggagtaagttttagggtagaattttgttcagtttggatttaatcttttgaaaagtaaattccttgtttactggtttgactataattctctgttatctttacgaggtaaaactgcaagctgactagcatgttctgtgaatctgccattcctaaaaattttataaacacttgatacttttcactgataatggatcgctccaataaacatatattgtgaaaatgcatccacaataaatggaattccttcctgcaaaa

SEQ ID NO: 440400 - DNA, 3493 bp, Homo sapiens
ggtcgcctactactactaaattcgcggccgcgtcgacagggcagcagaggagaggcagaggataaaggaggaagagaaaagggcagcagaggagaggcagaggataaaagaggaagagaaaagggcagcagaggagaggcaaagggccagggcagaggaggaagagaaggctaaggtagaagagcagaaacgtaacaagcagctagaagagaaaaaacatgccatgcaagagacaaagataaaaggggaaaaggtagaacagaaaatagaagggaaatgggtaaatgaaaagaaagcacaagaagataaacttcagacagctgtcctaaagaaacagggagaagagaagggaactaaagtgcaagctaaaagagaaaagctccaagaagacaagcctaccttcaaaaaagaagagatcaaagatgaaaagattaaaaaggacaaagaacccaaagaagaagttaagagcttcatggatcgaaagaagggatttacagaagttaagtcgcagaatggagaattcatgacccacaaacttaaacatactgagaatactttcagccgccctggagggagggccagcgtggacaccaaggaggctgagggcgccccccaggtggaagccggcaaaaggctggaggagcttcgtcgtcgtcgcggggagaccgagagcgaagagttcgagaagctcaaacagaagcagcaggaggcggctttggagctggaggaactcaagaaaaagagggaggagagaaggaaggtcctggaggaggaagagcagaggaggaagcaggaggaagccgatcgaaaactcagagaggaggaagagaagaggaggctaaaggaagagattgaaaggcgaagagcagaagctgctgagaaacgccagaagatgccagaagatggcttgtcagatgacaagaaaccattcaagtgtttcactcctaaaggttcatctctcaagatagaagagcgagcagaatttttgaataagtctgtgcagaaaagcagtggtgtcaaatcgacccatcaagcagcaatagtctccaagattgacagcagactggagcagtataccagtgcaattgagggaacaaaaagcgcaaaacctacaaagccggcagcctcggatcttcctgttcctgctgaaggtgtacgcaacatcaagagtatgtgggagaaagggaatgtgttttcatcccccactgcagcaggcacaccaaataaggaaactgctggcttgaaggtaggggtttctagccgcatcaatgaatggctaactaaaaccccagatggaaacaagtcacctgctcccaaaccttctgacttgagaccaggagacgtatccagcaagcggaacctctgggaaaagcaatctgtggataaggtcacttcccccactaaggagcctgtttctaaagaaacccatgctgtgaaatagagacttttctactgatcatcataactctgtatctgagcagtgataccaaccacatctgaagtcaacagaagatccaagtttaaaattgcctgcggaatgtgtgcagtatctagaaaaatgaaccgtagtttttgtttttttaaatacagaagtcatgttgtttctgcactttataataaagcatggaagaaattatcttagtaggcaattgtaacactttttgaaagtaacccatttcagatttgaaatactgcaataatggttgtctttaaaaaaaaaaaagaaatgtactgttaaggtattactttttttcatgctgatgattcatatctaaattacattattatgttagctgacagtggtactgattttttaggttggttgttttgtggatttctttagtagtgatagtagcctgaaccacattttagataactcaattatgtatgtatgtgcatacacatatacaaacacactaatggtagaatgcttttttatgtgctagactattatatttagtagtatgtcattgtaactagccaatatcacagcttttgaaaaattaaaaaatcacactatattaatatttcatatttgccaacagaaacatggcagataggtatcaatatgttttcaatgcctgatgacctataagaagaaagtattgaaaagaagagagattagaactgttagaaggagttgaaattttctaaaagacatagtatttagtttataattaaatgcattcttgaagtccagtgtgaattttattaatgctatcatctcgaccaagctcaaagcctacttattagaaacaatgaagttcacaataggtcataaggtctcttccttttctaaaattgaaagacaagaaatttagtgccaatattgtacagacagaaattccatgtatgagtctcaacaaagactacctttggctaaatgtctagaagcagagaagtaaagtgagcaaaatccagtgttgaggagtcatgacagtactttgatctttatatactctgaagcatttcttcaaacttttctacttttatttgtcattgatacctgtagtaagttgacaatgtggtgaaatttcaaaattatatgtaacttctactagttttactttctcccccaagtcttttttaactcatgatttttacacacacaatccagaacttattatatagcctctaagtctttattcttcacagtagataatgaaagagtcctccagtgtcttggcaaaatgttctagtatagctggatacatacagtggagttctataaactcatacctcagtggacttaaccaaaattgtgttagtctcaattcctaccacactgagggagcctcccaaataactattttcttatctgcagtattcctccagaagagctaaccagggcagggctggcatgagaagtgacatctgcgttacaaagtctatcttcctcataagtctgtaaagagcaattgaatcttctagctttagcaaacctaagccaaaggaaggaaagccacgaagaatgcagaagtcaaaccctcatgacaaagtaggcacaagtctacaataagctaaatcagaatttacaaatacaagtgtcccaggtagcattgactcccgtcattggagtgaaatggatcaaagtttgaattaaggcctatggtaaggtaacattgctttgttgtacttttgaacaagagctcctcctgatcactattacatatttttctagaaaatctaaagttcagaagagaatgtatcactgctgacttttattccaatatttggatggagtaagttttagggtagaattttgttcagtttggatttaatcttttgaaaagtaaattccttgtttactggtttgactataattctctgttatctttacgaggtaaaactgcaagctgactagcatgttctgtgaatctgccattcctaaaaattttataaacacttgatacttttcactgataatggatcgctccaataaacatatattgtgaaaatgcatccacaataaatggaattccttcctgcaaaa

SEQ ID NO: 440401 - DNA, 3656 bp, Homo sapiens
ggtcgcctactactactaaattcgcggccgcgtcgacagggcagcagaggagaggcagaggataaaggaggaagagaaaagggcagcagaggagaggcagaggataaaagaggaagagaaaagggcagcagaggagaggcaaagggccagggcagaggaggaagagaaggctaaggtagaagagcagaaacgtaacaagcagctagaagagaaaaaacatgccatgcaagagacaaagataaaaggggaaaaggtagaacagaaaatagaagggaaatgggtaaatgaaaagaaagcacaagaagataaacttcagacagctgtcctaaagaaacagggagaagagaagggaactaaagtgcaagctaaaagagaaaagctccaagaagacaagcctaccttcaaaaaagaagagatcaaagatgaaaagattaaaaaggacaaagaacccaaagaagaagttaagagcttcatggatcgaaagaagggatttacagaagttaagtcgcagaatggagaattcatgacccacaaacttaaacatactgagaatactttcagccgccctggagggagggccagcgtggacaccaaggaggctgagggcgccccccaggtggaagccggcaaaaggctggaggagcttcgtcgtcgtcgcggggagaccgagagcgaagagttcgagaagctcaaacagaagcagcaggaggcggctttggagctggaggaactcaagaaaaagagggaggagagaaggaaggtcctggaggaggaagagcagaggaggaagcaggaggaagccgatcgaaaactcagagaggaggaagagaagaggaggctaaaggaagagattgaaaggcgaagagcagaagctgctgagaaacgccagaagatgccagaagatggcttgtcagatgacaagaaaccattcaagtgtttcactcctaaaggttcatctctcaagatagaagagcgagcagaatttttgaataagtctgtgcagaaaagcagtggtgtcaaatcgacccatcaagcagcaatagtctccaagattgacagcagactggagcagtataccagtgcaattgagggaacaaaaagcgcaaaacctacaaagccggcagcctcggatcttcctgttcctgctgaaggtgtacgcaacatcaagagtatgtgggagaaagggaatgtgttttcatcccccactgcagcaggcacaccaaataaggaaactgctggcttgaaggtaggggtttctagccgcatcaatgaatggctaactaaaaccccagatggaaacaagtcacctgctcccaaaccttctgacttgagaccaggagacgtatccagcaagcggaacctctgggaaaagcaatctgtggataaggtcacttcccccactaaggtttgagacagttccagaaagaacccaagctcaagacgcaggacgagctcagttgtagagggctaattcgctctgttttgtatttatgttgatttactaaattgggttcattatcttttatttttcaatatcccagtaaacccatgtatattatcactatatttaataatcacagtctagagatgttcatggtaaaagtactgcctttgcacaggagcctgtttctaaagaaacccatgctgtgaaatagagacttttctactgatcatcataactctgtatctgagcagtgataccaaccacatctgaagtcaacagaagatccaagtttaaaattgcctgcggaatgtgtgcagtatctagaaaaatgtataataaagcatggaagaaattatcttagtaggcaattgtaacactttttgaaagtaacccatttcagatttgaaatactgcaataatggttgtctttaaaaaaaaaaaagaaatgtactgttaaggtattactttttttcatgctgatgattcatatctaaattacattattatgttagctgacagtggtactgattttttaggttggttgttttgtggatttctttagtagtgatagtagcctgaaccacattttagataactcaattatgtatgtatgtgcatacacatatacaaacacactaatggtagaatgcttttttatgtgctagactattatatttagtagtatgtcattgtaactagccaatatcacagcttttgaaaaattaaaaaatcacactatattaatatttcatatttgccaacagaaacatggcagataggtatcaatatgttttcaatgcctgatgacctataagaagaaagtattgaaaagaagagagattagaactgttagaaggagttgaaattttctaaaagacatagtatttagtttataattaaatgcattcttgaagtccagtgtgaattttattaatgctatcatctcgaccaagctcaaagcctacttattagaaacaatgaagttcacaataggtcataaggtctcttccttttctaaaattgaaagacaagaaatttagtgccaatattgtacagacagaaattccatgtatgagtctcaacaaagactacctttggctaaatgtctagaagcagagaagtaaagtgagcaaaatccagtgttgaggagtcatgacagtactttgatctttatatactctgaagcatttcttcaaacttttctacttttatttgtcattgatacctgtagtaagttgacaatgtggtgaaatttcaaaattatatgtaacttctactagttttactttctcccccaagtcttttttaactcatgatttttacacacacaatccagaacttattatatagcctctaagtctttattcttcacagtagataatgaaagagtcctccagtgtcttggcaaaatgttctagtatagctggatacatacagtggagttctataaactcatacctcagtggacttaaccaaaattgtgttagtctcaattcctaccacactgagggagcctcccaaataactattttcttatctgcagtattcctccagaagagctaaccagggcagggctggcatgagaagtgacatctgcgttacaaagtctatcttcctcataagtctgtaaagagcaattgaatcttctagctttagcaaacctaagccaaaggaaggaaagccacgaagaatgcagaagtcaaaccctcatgacaaagtaggcacaagtctacaataagctaaatcagaatttacaaatacaagtgtcccaggtagcattgactcccgtcattggagtgaaatggatcaaagtttgaattaaggcctatggtaaggtaacattgctttgttgtacttttgaacaagagctcctcctgatcactattacatatttttctagaaaatctaaagttcagaagagaatgtatcactgctgacttttattccaatatttggatggagtaagttttagggtagaattttgttcagtttggatttaatcttttgaaaagtaaattccttgtttactggtttgactataattctctgttatctttacgaggtaaaactgcaagctgactagcatgttctgtgaatctgccattcctaaaaattttataaacacttgatacttttcactgataatggatcgctccaataaacatatattgtgaaaatgcatccacaataaatggaattccttcctgcaaaa

SEQ ID NO: 440402 - DNA, 3445 bp, Homo sapiens
ggtcgcctactactactaaattcgcggccgcgtcgacagggcagcagaggagaggcagaggataaaggaggaagagaaaagggcagcagaggagaggcagaggataaaagaggaagagaaaagggcagcagaggagaggcaaagggccagggcagaggaggaagagaaggctaaggtagaagagcagaaacgtaacaagcagctagaagagaaaaaacatgccatgcaagagacaaagataaaaggggaaaaggtagaacagaaaatagaagggaaatgggtaaatgaaaagaaagcacaagaagataaacttcagacagctgtcctaaagaaacagggagaagagaagggaactaaagtgcaagctaaaagagaaaagctccaagaagacaagcctaccttcaaaaaagaagagatcaaagatgaaaagattaaaaaggacaaagaacccaaagaagaagttaagagcttcatggatcgaaagaagggatttacagaagttaagtcgcagaatggagaattcatgacccacaaacttaaacatactgagaatactttcagccgccctggagggagggccagcgtggacaccaaggaggctgagggcgccccccaggtggaagccggcaaaaggctggaggagcttcgtcgtcgtcgcggggagaccgagagcgaagagttcgagaagctcaaacagaagcagcaggaggcggctttggagctggaggaactcaagaaaaagagggaggagagaaggaaggtcctggaggaggaagagcagaggaggaagcaggaggaagccgatcgaaaactcagagaggaggaagagaagaggaggctaaaggaagagattgaaaggcgaagagcagaagctgctgagaaacgccagaagatgccagaagatggcttgtcagatgacaagaaaccattcaagtgtttcactcctaaaggttcatctctcaagatagaagagcgagcagaatttttgaataagtctgtgcagaaaagcagtggtgtcaaatcgacccatcaagcagcaatagtctccaagattgacagcagactggagcagtataccagtgcaattgagggaacaaaaagcgcaaaacctacaaagccggcagcctcggatcttcctgttcctgctgaaggtgtacgcaacatcaagagtatgtgggagaaagggaatgtgttttcatcccccactgcagcaggcacaccaaataaggaaactgctggcttgaaggtaggggtttctagccgcatcaatgaatggctaactaaaaccccagatggaaacaagtcacctgctcccaaaccttctgacttgagaccaggagacgtatccagcaagcggaacctctgggaaaagcaatctgtggataaggtcacttcccccactaaggagcctgtttctaaagaaacccatgctgtgaaatagagacttttctactgatcatcataactctgtatctgagcagtgataccaaccacatctgaagtcaacagaagatccaagtttaaaattgcctgcggaatgtgtgcagtatctagaaaaatgaaccgtagtttttgtttttttaaatacagaagtcatgttgtttctgcactttataataaagcatggaagaaattatcttagtaggcaattgtaacactttttgaaagtaacccatttcagatttgaaatactgcaataatggttgtctttaaaaaaaaaaatctaaattacattattatgttagctgacagtggtactgattttttaggttggttgttttgtggatttctttagtagtgatagtagcctgaaccacattttagataactcaattatgtatgtatgtgcatacacatatacaaacacactaatggtagaatgcttttttatgtgctagactattatatttagtagtatgtcattgtaactagccaatatcacagcttttgaaaaattaaaaaatcacactatattaatatttcatatttgccaacagaaacatggcagataggtatcaatatgttttcaatgcctgatgacctataagaagaaagtattgaaaagaagagagattagaactgttagaaggagttgaaattttctaaaagacatagtatttagtttataattaaatgcattcttgaagtccagtgtgaattttattaatgctatcatctcgaccaagctcaaagcctacttattagaaacaatgaagttcacaataggtcataaggtctcttccttttctaaaattgaaagacaagaaatttagtgccaatattgtacagacagaaattccatgtatgagtctcaacaaagactacctttggctaaatgtctagaagcagagaagtaaagtgagcaaaatccagtgttgaggagtcatgacagtactttgatctttatatactctgaagcatttcttcaaacttttctacttttatttgtcattgatacctgtagtaagttgacaatgtggtgaaatttcaaaattatatgtaacttctactagttttactttctcccccaagtcttttttaactcatgatttttacacacacaatccagaacttattatatagcctctaagtctttattcttcacagtagataatgaaagagtcctccagtgtcttggcaaaatgttctagtatagctggatacatacagtggagttctataaactcatacctcagtggacttaaccaaaattgtgttagtctcaattcctaccacactgagggagcctcccaaataactattttcttatctgcagtattcctccagaagagctaaccagggcagggctggcatgagaagtgacatctgcgttacaaagtctatcttcctcataagtctgtaaagagcaattgaatcttctagctttagcaaacctaagccaaaggaaggaaagccacgaagaatgcagaagtcaaaccctcatgacaaagtaggcacaagtctacaataagctaaatcagaatttacaaatacaagtgtcccaggtagcattgactcccgtcattggagtgaaatggatcaaagtttgaattaaggcctatggtaaggtaacattgctttgttgtacttttgaacaagagctcctcctgatcactattacatatttttctagaaaatctaaagttcagaagagaatgtatcactgctgacttttattccaatatttggatggagtaagttttagggtagaattttgttcagtttggatttaatcttttgaaaagtaaattccttgtttactggtttgactataattctctgttatctttacgaggtaaaactgcaagctgactagcatgttctgtgaatctgccattcctaaaaattttataaacacttgatacttttcactgataatggatcgctccaataaacatatattgtgaaaatgcatccacaataaatggaattccttcctgcaaaa

SEQ ID NO: 440403 - DNA, 4371 bp, Homo sapiens
ggtcgcctactactactaaattcgcggccgcgtcgacagggcagcagaggagaggcagaggataaaggaggaagagaaaagggcagcagaggagaggcagaggataaaagaggaagagaaaagggcagcagaggagaggcaaagggccagggcagaggaggaagagaaggctaaggtagaagagcagaaacgtaacaagcagctagaagagaaaaaacatgccatgcaagagacaaagataaaaggggaaaaggtagaacagaaaatagaagggaaatgggtaaatgaaaagaaagcacaagaagataaacttcagacagctgtcctaaagaaacagggagaagagaagggaactaaagtgcaagctaaaagagaaaagctccaagaagacaagcctaccttcaaaaaagaagagatcaaagatgaaaagattaaaaaggacaaagaacccaaagaagaagttaagagcttcatggatcgaaagaagggatttacagaagttaagtcgcagaatggagaattcatgacccacaaacttaaacatactgagaatactttcagccgccctggagggagggccagcgtggacaccaaggaggctgagggcgccccccaggtggaagccggcaaaaggctggaggagcttcgtcgtcgtcgcggggagaccgagagcgaagagttcgagaagctcaaacagaagcagcaggaggcggctttggagctggaggaactcaagaaaaagagggaggagagaaggaaggtcctggaggaggaagagcagaggaggaagcaggaggaagccgatcgaaaactcagagaggaggaagagaagaggaggctaaaggaagagattgaaaggcgaagagcagaagctgctgagaaacgccagaagatgccagaagatggcttgtcagatgacaagaaaccattcaagtgtttcactcctaaaggttcatctctcaagatagaagagcgagcagaatttttgaataagtctgtgcagaaaagcagtggtgtcaaatcgacccatcaagcagcaatagtctccaagattgacagcagactggagcagtataccagtgcaattgagggaacaaaaagcgcaaaacctacaaagccggcagcctcggatcttcctgttcctgctgaaggtgtacgcaacatcaagagtatgtgggagaaagggaatgtgttttcatcccccactgcagcaggcacaccaaataaggaaactgctggcttgaaggtaggggtttctagccgcatcaatgaatggctaactaaaaccccagatggaaacaagtcacctgctcccaaaccttctgacttgagaccaggagacgtatccagcaagcggaacctctgggaaaagcaatctgtggataaggtcacttcccccactaaggtttgagacagttccagaaagaacccaagctcaagacgcaggacgagctcagttgtagagggctaattcgctctgttttgtatttatgttgatttactaaattgggttcattatcttttatttttcaatatcccagtaaacccatgtatattatcactatatttaataatcacagtctagagatgttcatggtaaaagtactgcctttgcacaggagcctgtttctaaagaaacccatgctgtgaaatagagacttttctactgatcatcataactctgtatctgagcagtgataccaaccacatctgaagtcaacagaagatccaagtttaaaattgcctgcggaatgtgtgcagtatctagaaaaatgaaccgtagtttttgtttttttaaatacagaagtcatgttgtttctgcactttataataaagcatggaagaaattatcttagtaggcaattgtaacactttttgaaagtaacccatttcagatttgaaatactgcaataatggttgtctttaaaaaaaaaaaagaaatgtactgttaaggtattactttttttcatgctgatgattcatatctaaattacattattatgttagctgacagtggtactgattttttaggttggttgttttgtggatttctttagtagtgatagtagcctgaaccacattttagataactcaattatgtatgtatgtgcatacacatatacaaacacactaatggtagaatgcttttttatgtgctagactattatatttagtagtatgtcattgtaactagccaatatcacagcttttgaaaaattaaaaaatcacactatattaatatttcatatttgccaacagaaacatggcagataggtatcaatatgttttcaatgcctgatgacctataagaagaaagtattgaaaagaagagagattagaactgttagaaggagttgaaattttctaaaagacatagtatttagtttataattaaatgcattcttgaagtccagtgtgaattttattaatgctatcatctcgaccaagctcaaagcctacttattagaaacaatgaagttcacaataggtcataaggtctcttccttttctaaaattgaaagacaagaaatttagtgccaatattgtacagacagaaattccatgtatgagtctcaacaaagactacctttggctaaatgtctagaagcagagaagtaaagtgagcaaaatccagtgttgaggagtcatgacagtactttgatctttatatactctgaagcatttcttcaaacttttctacttttatttgtcattgatacctgtagtaagttgacaatgtggtgaaatttcaaaattatatgtaacttctactagttttactttctcccccaagtcttttttaactcatgatttttacacacacaatccagaacttattatatagcctctaagtctttattcttcacagtagataatgaaagagtcctccagtgtcttggcaaaatgttctagtatagctggatacatacagtggagttctataaactcatacctcagtggacttaaccaaaattgtgttagtctcaattcctaccacactgagggagcctcccaaataactattttcttatctgcagtattcctccagaagagctaaccagggcagggctggcatgagaagtgacatctgcgttacaaagtctatcttcctcataagtctgtaaagagcaattgaatcttctagctttagcaaacctaagccaaaggaaggaaagccacgaagaatgcagaagtcaaaccctcatgacaaagtaggcacaagtctacaataagctaaatcagaatttacaaatacaagtgtcccaggtagcattgactcccgtcattggagtgaaatggatcaaagtttgaattaaggcctatggtaaggtaacattgctttgttgtacttttgaacaagagctcctcctgatcactattacatatttttctagaaaatctaaagttcagaagagaatgtatcactgctgacttttattccaatatttggatggagtaagttttagggtagaattttgttcagtttggatttaatcttttgaaaagtaaattccttgtttactggtttgactataattctctgttatctttacgaggtaaaactgcaagctgactagcatgttctgtgaatctgccattcctaaaaattttataaacacttgatacttttcactgataatggatcgctccaataaacatatattgtgaaaatgcatccacaataaatggaattccttcctgcaaaaaaaaaaaagaagaggaaaaagaaaatcttggggggggctgggcccccggaaaagttttcaagagccaatgcgtttggggggggggcccctgggttgtgaccaggggtccatactgggtcccataaaagaaacaccgggccacggagaaggcgtgtgggcattcaactacaccaaaaataaaaacacgcgcgggggggcaacaagacggactttattgtaatacaaagccaagcagggggtcgccgagggggccagacaggggcacatcgaacagggagctcgcaggcagcacccgattcaaaattaccgccccgacctgggattgcaaaaaggaagcgataccgacgaagaggtcgatgaacaaggctcgaagtcaacggaacacgaaagcgatgcaacaagcaaatgttcgagagcaccgagcgcgacaccgcagaaaagaagtagtagctgaaagcaagagggacaaccaggaacaggcgcaaataatgagaaaaacgagtacgcagagagggaaaggagggaatagaaaaagaggattgggggaccaaaaaaagaaaacaatcgacaaatcacataacgggacggacaaaaagaacaaaagtagacaacaaagcgagagaaaaagaaaaaggcaagcgaaaaaaagaaagaacgaataacc

SEQ ID NO: 440404 - DNA, 1971 bp, Homo sapiens
ggtcgcctactactactaaattcgcggccgcgtcgacagaaccgtagtttttgtttttttaaatacagaagtcatgttgtttctgcactttataataaagcatggaagaaattatcttagtaggcaattgtaacactttttgaaagtaacccatttcagatttgaaatactgcaataatggttgtctttaaaaaaaaaaaagaaatgtactgttaaggtattactttttttcatgctgatgattcatatctaaattacattattatgttagctgacagtggtactgattttttaggttggttgttttgtggatttctttagtagtgatagtagcctgaaccacattttagataactcaattatgtatgtatgtgcatacacatatacaaacacactaatggtagaatgcttttttatgtgctagactattatatttagtagtatgtcattgtaactagccaatatcacagcttttgaaaaattaaaaaatcacactatattaatatttcatatttgccaacagaaacatggcagataggtatcaatatgttttcaatgcctgatgacctataagaagaaagtattgaaaagaagagagattagaactgttagaaggagttgaaattttctaaaagacatagtatttagtttataattaaatgcattcttgaagtccagtgtgaattttattaatgctatcatctcgaccaagctcaaagcctacttattagaaacaatgaagttcacaataggtcataaggtctcttccttttctaaaattgaaagacaagaaatttagtgccaatattgtacagacagaaattccatgtatgagtctcaacaaagactacctttggctaaatgtctagaagcagagaagtaaagtgagcaaaatccagtgttgaggagtcatgacagtactttgatctttatatactctgaagcatttcttcaaacttttctacttttatttgtcattgatacctgtagtaagttgacaatgtggtgaaatttcaaaattatatgtaacttctactagttttactttctcccccaagtcttttttaactcatgatttttacacacacaatccagaacttattatatagcctctaagtctttattcttcacagtagataatgaaagagtcctccagtgtcttggcaaaatgttctagtatagctggatacatacagtggagttctataaactcatacctcagtggacttaaccaaaattgtgttagtctcaattcctaccacactgagggagcctcccaaataactattttcttatctgcagtattcctccagaagagctaaccagggcagggctggcatgagaagtgacatctgcgttacaaagtctatcttcctcataagtctgtaaagagcaattgaatcttctagctttagcaaacctaagccaaaggaaggaaagccacgaagaatgcagaagtcaaaccctcatgacaaagtaggcacaagtctacaataagctaaatcagaatttacaaatacaagtgtcccaggtagcattgactcccgtcattggagtgaaatggatcaaagtttgaattaaggcctatggtaaggtaacattgctttgttgtacttttgaacaagagctcctcctgatcactattacatatttttctagaaaatctaaagttcagaagagaatgtatcactgctgacttttattccaatatttggatggagtaagttttagggtagaattttgttcagtttggatttaatcttttgaaaagtaaattccttgtttactggtttgactataattctctgttatctttacgaggtaaaactgcaagctgactagcatgttctgtgaatctgccattcctaaaaattttataaacacttgatacttttcactgataatggatcgctccaataaacatatattgtgaaaatgcatccacaataaatggaattccttcctgcaaaa

SEQ ID NO: 440405 - DNA, 3893 bp, Homo sapiens
  misc_feature (3841)..(3842): n is a, c, g, or t
  misc_feature (3892)..(3892): n is a, c, g, or t
ggtcgcctactactactaaattcgcggccgcgtcgacagggcagcagaggagaggcagaggataaaggaggaagagaaaagggcagcagaggagaggcagaggataaaagaggaagagaaaagggcagcagaggagaggcaaagggccagggcagaggaggaagagaaggctaaggtagaagagcagaaacgtaacaagcagctagaagagaaaaaacatgccatgcaagagacaaagataaaaggggaaaaggtagaacagaaaatagaagggaaatgggtaaatgaaaagaaagcacaagaagataaacttcagacagctgtcctaaagaaacagggagaagagaagggaactaaagtgcaagctaaaagagaaaagctccaagaagacaagcctaccttcaaaaaagaagagatcaaagatgaaaagattaaaaaggacaaagaacccaaagaagaagttaagagcttcatggatcgaaagaagggatttacagaagttaagtcgcagaatggagaattcatgacccacaaacttaaacatactgagaatactttcagccgccctggagggagggccagcgtggacaccaaggaggctgagggcgccccccaggtggaagccggcaaaaggctggaggagcttcgtcgtcgtcgcggggagaccgagagcgaagagttcgagaagctcaaacagaagcagcaggaggcggctttggagctggaggaactcaagaaaaagagggaggagagaaggaaggtcctggaggaggaagagcagaggaggaagcaggaggaagccgatcgaaaactcagagaggaggaagagaagaggaggctaaaggaagagattgaaaggcgaagagcagaagctgctgagaaacgccagaagatgccagaagatggcttgtcagatgacaagaaaccattcaagtgtttcactcctaaaggttcatctctcaagatagaagagcgagcagaatttttgaataagtctgtgcagaaaagcagtggtgtcaaatcgacccatcaagcagcaatagtctccaagattgacagcagactggagcagtataccagtgcaattgagggaacaaaaagcgcaaaacctacaaagccggcagcctcggatcttcctgttcctgctgaaggtgtacgcaacatcaagagtatgtgggagaaagggaatgtgttttcatcccccactgcagcaggcacaccaaataaggaaactgctggcttgaaggtaggggtttctagccgcatcaatgaatggctaactaaaaccccagatggaaacaagtcacctgctcccaaaccttctgacttgagaccaggagacgtatccagcaagcggaacctctgggaaaagcaatctgtggataaggtcacttcccccactaaggtttgagacagttccagaaagaacccaagctcaagacgcaggacgagctcagttgtagagggctaattcgctctgttttgtatttatgttgatttactaaattgggttcattatcttttatttttcaatatcccagtaaacccatgtatattatcactatatttaataatcacagtctagagatgttcatggtaaaagtactgcctttgcacaggagcctgtttctaaagaaacccatgctgtgaaatagagacttttctactgatcatcataactctgtatctgagcagtgataccaaccacatctgaagtcaacagaagatccaagtttaaaattgcctgcggaatgtgtgcagtatctagaaaaatgaaccgtagtttttgtttttttaaatacagaagtcatgttgtttctgcactttataataaagcatggaagaaattatcttagtaggcaattgtaacactttttgaaagtaacccatttcagatttgaaatactgcaataatggttgtctttaaaaaaaaaaaagaaatgtactgttaaggtattactttttttcatgctgatgattcatatctaaattacattattatgttagctgacagtggtactgattttttaggttggttgttttgtggatttctttagtagtgatagtagcctgaaccacattttagataactcaattatgtatgtatgtgcatacacatatacaaacacactaatggtagaatgcttttttatgtgctagactattatatttagtagtatgtcattgtaactagccaatatcacagcttttgaaaaattaaaaaatcacactatattaatatttcatatttgccaacagaaacatggcagataggtatcaatatgttttcaatgcctgatgacctataagaagaaagtattgaaaagaagagagattagaactgttagaaggagttgaaattttctaaaagacatagtatttagtttataattaaatgcattcttgaagtccagtgtgaattttattaatgctatcatctcgaccaagctcaaagcctacttattagaaacaatgaagttcacaataggtcataaggtctcttccttttctaaaattgaaagacaagaaatttagtgccaatattgtacagacagaaattccatgtatgagtctcaacaaagactacctttggctaaatgtctagaagcagagaagtaaagtgagcaaaatccagtgttgaggagtcatgacagtactttgatctttatatactctgaagcatttcttcaaacttttctacttttatttgtcattgatacctgtagtaagttgacaatgtggtgaaatttcaaaattatatgtaacttctactagttttactttctcccccaagtcttttttaactcatgatttttacacacacaatccagaacttattatatagcctctaagtctttattcttcacagtagataatgaaagagtcctccagtgtcttggcaaaatgttctagtatagctggatacatacagtggagttctataaactcatacctcagtggacttaaccaaaattgtgttagtctcaattcctaccacactgagggagcctcccaaataactattttcttatctgcagtattcctccagaagagctaaccagggcagggctggcatgagaagtgacatctgcgttacaaagtctatcttcctcataagtctgtaaagagcaattgaatcttctagctttagcaaacctaagccaaaggaaggaaagccacgaagaatgcagaagtcaaaccctcatgacaaagtaggcacaagtctacaataagctaaatcagaatttacaaatacaagtgtcccaggtagcattgactcccgtcattggagtgaaatggatcaaagtttgaattaaggcctatggtaaggtaacattgctttgttgtacttttgaacaagagctcctcctgatcactattacatatttttctagaaaatctaaagttcagaagagaatgtatcactgctgacttttattccaatatttggatggagtaagttttagggtagaattttgttcagtttggatttaatcttttgaaaagtaaattccttgtttactggtttgactataattctctgttatctttacgaggtaaaactgcaagctgactagcatgttctgtgaatctgccattcctaaaaattttataaacacttgatacttttcactgataatggatcgctccaataaacatatattgtgaaaatgcatccacaataaatggaattccttcctgcaaaaaaaaaaaaaaaaaaaactcgtttgcctatctgtaaaggtaatacattctgattacaaaaaatgaaaatgttacatagaaatgtaccgttatccatctaccagataactattattaataatgtgtattatttttnnaggaattaaaaaacatctatcatataagtattgcaaataaaacttaaaang

SEQ ID NO: 440406 - DNA, 3750 bp, Homo sapiens
  misc_feature (3709)..(3709): n is a, c, g, or t
ggtcgcctactactactaaattcgcggccgcgtcgacagggcagcagaggagaggcagaggataaaggaggaagagaaaagggcagcagaggagaggcagaggataaaagaggaagagaaaagggcagcagaggagaggcaaagggccagggcagaggaggaagagaaggctaaggtagaagagcagaaacgtaacaagcagctagaagagaaaaaacatgccatgcaagagacaaagataaaaggggaaaaggtagaacagaaaatagaagggaaatgggtaaatgaaaagaaagcacaagaagataaacttcagacagctgtcctaaagaaacagggagaagagaagggaactaaagtgcaagctaaaagagaaaagctccaagaagacaagcctaccttcaaaaaagaagagatcaaagatgaaaagattaaaaaggacaaagaacccaaagaagaagttaagagcttcatggatcgaaagaagggatttacagaagttaagtcgcagaatggagaattcatgacccacaaacttaaacatactgagaatactttcagccgccctggagggagggccagcgtggacaccaaggaggctgagggcgccccccaggtggaagccggcaaaaggctggaggagcttcgtcgtcgtcgcggggagaccgagagcgaagagttcgagaagctcaaacagaagcagcaggaggcggctttggagctggaggaactcaagaaaaagagggaggagagaaggaaggtcctggaggaggaagagcagaggaggaagcaggaggaagccgatcgaaaactcagagaggaggaagagaagaggaggctaaaggaagagattgaaaggcgaagagcagaagctgctgagaaacgccagaagatgccagaagatggcttgtcagatgacaagaaaccattcaagtgtttcactcctaaaggttcatctctcaagatagaagagcgagcagaatttttgaataagtctgtgcagaaaagcagtggtgtcaaatcgacccatcaagcagcaatagtctccaagattgacagcagactggagcagtataccagtgcaattgagggaacaaaaagcgcaaaacctacaaagccggcagcctcggatcttcctgttcctgctgaaggtgtacgcaacatcaagagtatgtgggagaaagggaatgtgttttcatcccccactgcagcaggcacaccaaataaggaaactgctggcttgaaggtaggggtttctagccgcatcaatgaatggctaactaaaaccccagatggaaacaagtcacctgctcccaaaccttctgacttgagaccaggagacgtatccagcaagcggaacctctgggaaaagcaatctgtggataaggtcacttcccccactaaggtttgagacagttccagaaagaacccaagctcaagacgcaggacgagctcagttgtagagggctaattcgctctgttttgtatttatgttgatttactaaattgggttcattatcttttatttttcaatatcccagtaaacccatgtatattatcactatatttaataatcacagtctagagatgttcatggtaaaagtactgcctttgcacaggagcctgtttctaaagaaacccatgctgtgaaatagagacttttctactgatcatcataactctgtatctgagcagtgataccaaccacatctgaagtcaacagaagatccaagtttaaaattgcctgcggaatgtgtgcagtatctagaaaaatgaaccgtagtttttgtttttttaaatacagaagtcatgttgtttctgcactttataataaagcatggaagaaattatcttagtaggcaattgtaacactttttgaaagtaacccatttcagatttgaaatactgcaataatggttgtctttaaaaaaaaaaaagaaatgtactgttaaggtattactttttttcatgctgatgattcatatctaaattacattattatgttagctgacagtggtactgattttttaggttggttgttttgtggatttctttagtagtgatagtagcctgaaccacattttagataactcaattatgtatgtatgtgcatacacatatacaaacacactaatggtagaatgcttttttatgtgctagactattatatttagtagtatgtcattgtaactagccaatatcacagcttttgaaaaattaaaaaatcacactatattaatatttcatatttgccaacagaaacatggcagataggtatcaatatgttttcaatgcctgatgacctataagaagaaagtattgaaaagaagagagattagaactgttagaaggagttgaaattttctaaaagacatagtatttagtttataattaaatgcattcttgaagtccagtgtgaattttattaatgctatcatctcgaccaagctcaaagcctacttattagaaacaatgaagttcacaataggtcataaggtctcttccttttctaaaattgaaagacaagaaatttagtgccaatattgtacagacagaaattccatgtatgagtctcaacaaagactacctttggctaaatgtctagaagcagagaagtaaagtgagcaaaatccagtgttgaggagtcatgacagtactttgatctttatatactctgaagcatttcttcaaacttttctacttttatttgtcattgatacctgtagtaagttgacaatgtggtgaaatttcaaaattatatgtaacttctactagttttactttctcccccaagtcttttttaactcatgatttttacacacacaatccagaacttattatatagcctctaagtctttattcttcacagtagataatgaaagagtcctccagtgtcttggcaaaatgttctagtatagctggatacatacagtggagttctataaactcatacctcagtggacttaaccaaaattgtgttagtctcaattcctaccacactgagggagcctcccaaataactattttcttatctgcagtattcctccagaagagctaaccagggcagggctggcatgagaagtgacatctgcgttacaaagtctatcttcctcataagtctgtaaagagcaattgaatcttctagctttagcaaacctaagccaaaggaaggaaagccacgaagaatgcagaagtcaaaccctcatgacaaagtaggcacaagtctacaataagctaaatcagaatttacaaatacaagtgtcccaggtagcattgactcccgtcattggagtgaaatggatcaaagtttgaattaaggcctatggtaaggtaacattgctttgttgtacttttgaacaagagctcctcctgatcactattacatatttttctagaaaatctaaagttcagaagagaatgtatcactgctgacttttattccaatatttggatggagtaagttttagggtagaattttgttcagtttggatttaatcttttgaaaagtaaattccttgtttactggtttgactataattctctgttatctttacgaggtaaaactgcaagctgactagcatgttctgtgaatctgccattcctaaaaattttataaacacttgatacttttcactgataatggatcgctccaataaacatatattgtgaaaatgcatccacaataaatggaattccttcctgcaaaaanaagtcgacgcggccgcgaatttagtagtagtaggcggccgc

SEQ ID NO: 440407 - DNA, 3711 bp, Homo sapiens
ggtcgcctactactactaaattcgcggccgcgtcgacagggcagcagaggagaggcagaggataaaggaggaagagaaaagggcagcagaggagaggcagaggataaaagaggaagagaaaagggcagcagaggagaggcaaagggccagggcagaggaggaagagaaggctaaggtagaagagcagaaacgtaacaagcagctagaagagaaaaaacatgccatgcaagagacaaagataaaaggggaaaaggtagaacagaaaatagaagggaaatgggtaaatgaaaagaaagcacaagaagataaacttcagacagctgtcctaaagaaacagggagaagagaagggaactaaagtgcaagctaaaagagaaaagctccaagaagacaagcctaccttcaaaaaagaagagatcaaagatgaaaagattaaaaaggacaaagaacccaaagaagaagttaagagcttcatggatcgaaagaagggatttacagaagttaagtcgcagaatggagaattcatgacccacaaacttaaacatactgagaatactttcagccgccctggagggagggccagcgtggacaccaaggaggctgagggcgccccccaggtggaagccggcaaaaggctggaggagcttcgtcgtcgtcgcggggagaccgagagcgaagagttcgagaagctcaaacagaagcagcaggaggcggctttggagctggaggaactcaagaaaaagagggaggagagaaggaaggtcctggaggaggaagagcagaggaggaagcaggaggaagccgatcgaaaactcagagaggaggaagagaagaggaggctaaaggaagagattgaaaggcgaagagcagaagctgctgagaaacgccagaagatgccagaagatggcttgtcagatgacaagaaaccattcaagtgtttcactcctaaaggttcatctctcaagatagaagagcgagcagaatttttgaataagtctgtgcagaaaagcagtggtgtcaaatcgacccatcaagcagcaatagtctccaagattgacagcagactggagcagtataccagtgcaattgagggaacaaaaagcgcaaaacctacaaagccggcagcctcggatcttcctgttcctgctgaaggtgtacgcaacatcaagagtatgtgggagaaagggaatgtgttttcatcccccactgcagcaggcacaccaaataaggaaactgctggcttgaaggtaggggtttctagccgcatcaatgaatggctaactaaaaccccagatggaaacaagtcacctgctcccaaaccttctgacttgagaccaggagacgtatccagcaagcggaacctctgggaaaagcaatctgtggataaggtcacttcccccactaaggtttgagacagttccagaaagaacccaagctcaagacgcaggacgagctcagttgtagagggctaattcgctctgttttgtatttatgttgatttactaaattgggttcattatcttttatttttcaatatcccagtaaacccatgtatattatcactatatttaataatcacagtctagagatgttcatggtaaaagtactgcctttgcacaggagcctgtttctaaagaaacccatgctgtgaaatagagacttttctactgatcatcataactctgtatctgagcagtgataccaaccacatctgaagtcaacagaagatccaagtttaaaattgcctgcggaatgtgtgcagtatctagaaaaatgaaccgtagtttttgtttttttaaatacagaagtcatgttgtttctgcactttataataaagcatggaagaaattatcttagtaggcaattgtaacactttttgaaagtaacccatttcagatttgaaatactgcaataatggttgtctttaaaaaaaaaaaagaaatgtactgttaaggtattactttttttcatgctgatgattcatatctaaattacattattatgttagctgacagtggtactgattttttaggttggttgttttgtggatttctttagtagtgatagtagcctgaaccacattttagataactcaattatgtatgtatgtgcatacacatatacaaacacactaatggtagaatgcttttttatgtgctagactattatatttagtagtatgtcattgtaactagccaatatcacagcttttgaaaaattaaaaaatcacactatattaatatttcatatttgccaacagaaacatggcagataggtatcaatatgttttcaatgcctgatgacctataagaagaaagtattgaaaagaagagagattagaactgttagaaggagttgaaattttctaaaagacatagtatttagtttataattaaatgcattcttgaagtccagtgtgaattttattaatgctatcatctcgaccaagctcaaagcctacttattagaaacaatgaagttcacaataggtcataaggtctcttccttttctaaaattgaaagacaagaaatttagtgccaatattgtacagacagaaattccatgtatgagtctcaacaaagactacctttggctaaatgtctagaagcagagaagtaaagtgagcaaaatccagtgttgaggagtcatgacagtactttgatctttatatactctgaagcatttcttcaaacttttctacttttatttgtcattgatacctgtagtaagttgacaatgtggtgaaatttcaaaattatatgtaacttctactagttttactttctcccccaagtcttttttaactcatgatttttacacacacaatccagaacttattatatagcctctaagtctttattcttcacagtagataatgaaagagtcctccagtgtcttggcaaaatgttctagtatagctggatacatacagtggagttctataaactcatacctcagtggacttaaccaaaattgtgttagtctcaattcctaccacactgagggagcctcccaaataactattttcttatctgcagtattcctccagaagagctaaccagggcagggctggcatgagaagtgacatctgcgttacaaagtctatcttcctcataagtctgtaaagagcaattgaatcttctagctttagcaaacctaagccaaaggaaggaaagccacgaagaatgcagaagtcaaaccctcatgacaaagtaggcacaagtctacaataagctaaatcagaatttacaaatacaagtgtcccaggtagcattgactcccgtcattggagtgaaatggatcaaagtttgaattaaggcctatggtaaggtaacattgctttgttgtacttttgaacaagagctcctcctgatcactattacatatttttctagaaaatctaaagttcagaagagaatgtatcactgctgacttttattccaatatttggatggagtaagttttagggtagaattttgttcagtttggatttaatcttttgaaaagtaaattccttgtttactggtttcgcgagaggtgtttccaagtccaacgaccgttggtaaaagatccgacgccatgtagctcagcatgtgtatgtgaagtcatgctagttctctaagaatattatacaacaattgatactggtcagtgataatggctcgtcgtccaaatcatacattgtgggagatcactcttagagtcagacct

SEQ ID NO: 440408 - DNA, 2427 bp, Homo sapiens
ggtcgcctactactactaaattcgcggccgcgtcgacagggcagcagaggagaggcagaggataaaggaggaagagaaaagggcagcagaggagaggcagaggataaaagaggaagagaaaagggcagcagaggagaggcaaagggccagggcagaggaggaagagaaggctaaggtagaagagcagaaacgtaacaagcagctagaagagaaaaaacatgccatgcaagagacaaagataaaaggggaaaaggtagaacagaaaatagaagggaaatgggtaaatgaaaagaaagcacaagaagataaacttcagacagctgtcctaaagaaacagggagaagagaagggaactaaagtgcaagctaaaagagaaaagctccaagaagacaagcctaccttcaaaaaagaagagatcaaagatgaaaagattaaaaaggacaaagaacccaaagaagaagttaagagcttcatggatcgaaagaagggatttacagaagttaagtcgcagaatggagaattcatgacccacaaacttaaacatactgagaatactttcagccgccctggagggagggccagcgtggacaccaaggaggctgagggcgccccccaggtggaagccggcaaaaggctggaggagcttcgtcgtcgtcgcggggagaccgagagcgaagagttcgagaagctcaaacagaagcagcaggaggcggctttggagctggaggaactcaagaaaaagagggaggagagaaggaaggtcctggaggaggaagagcagaggaggaagcaggaggaagccgatcgaaaactcagagaggaggaagagaagaggaggctaaaggaagagattgaaaggcgaagagcagaagctgctgagaaacgccagaagatgccagaagatggcttgtcagatgacaagaaaccattcaagtgtttcactcctaaaggttcatctctcaagatagaagagcgagcagaatttttgaataagtctgtgcagaaaagcagtggtgtcaaatcgacccatcaagcagcaatagtctccaagattgacagcagactggagcagtataccagtgcaattgagggaacaaaaagcgcaaaacctacaaagccggcagcctcggatcttcctgttcctgctgaaggtgtacgcaacatcaagagtatgtgggagaaagggaatgtgttttcatcccccactgcagcaggcacaccaaataaggaaactgctggcttgaaggtaggggtttctagccgcatcaatgaatggctaactaaaaccccagatggaaacaagtcacctgctcccaaaccttctgacttgagaccaggagacgtatccagcaagcggaacctctgggaaaagcaatctgtggataaggtcacttcccccactaaggtttgagacagttccagaaagaacccaagctcaagacgcaggacgagctcagttgtagagggctaattcgctctgttttgtatttatgttgatttactaaattgggttcattatcttttatttttcaatatcccagtaaacccatgtatattatcactatatttaataatcacagtctagagatgttcatggtaaaagtactgcctttgcacaggagcctgtttctaaagaaacccatgctgtgaaatagagacttttctactgatcatcataactctgtatctgagcagtgataccaaccacatctgaagtcaacagaagatccaagtttaaaattgcctgcggaatgtgtgcagtatctagaaaaatgaaccgtagtttttgtttttttaaatacagaagtcatgttgtttctgcactttataataaagcatggaagaaattatcttagtaggcaattgtaacactttttgaaagtaacccatttcagatttgaaatactgcaataatggttgtctttaaaaaaaaaacaacgcacatggtcgcgctcagggacatcacttttgtccaggcgggaagagtccatatcctacaatccatatatcaagtgaagcctgccactgtgcacgagacacccaaggagagagacgaccggacgacaccacacaaacagacaacacgccggcaacacaccttaaataacccaccggcgagcagaggtggccaacccaatgacatagaggcattgtcgcagtagcaacacaatgggtgagcgccagccaagactatacgcaaggaccaggctgacagtcaccaacaatcaactagtagaaacaaaacacaacgatatatacatccactgagccaccagagagagccgcactacacacacagcagccacaacaaaacacgtgcagaaacaggcgagcggacatcaacactatcatcaaacgatccatgcatactagcaaagcacatacactatatgactatatatttgtattgtctttttgatcatatct

SEQ ID NO: 440409 - DNA, 3069 bp, Homo sapiens
ggtcgcctactactactaaattcgcggccgcgtcgacagggcagcagaggagaggcagaggataaaggaggaagagaaaagggcagcagaggagaggcagaggataaaagaggaagagaaaagggcagcagaggagaggcaaagggccagggcagaggaggaagagaaggctaaggtagaagagcagaaacgtaacaagcagctagaagagaaaaaacatgccatgcaagagacaaagataaaaggggaaaaggtagaacagaaaatagaagggaaatgggtaaatgaaaagaaagcacaagaagataaacttcagacagctgtcctaaagaaacagggagaagagaagggaactaaagtgcaagctaaaagagaaaagctccaagaagacaagcctaccttcaaaaaagaagagatcaaagatgaaaagattaaaaaggacaaagaacccaaagaagaagttaagagcttcatggatcgaaagaagggatttacagaagttaagtcgcagaatggagaattcatgacccacaaacttaaacatactgagaatactttcagccgccctggagggagggccagcgtggacaccaaggaggctgagggcgccccccaggtggaagccggcaaaaggctggaggagcttcgtcgtcgtcgcggggagaccgagagcgaagagttcgagaagctcaaacagaagcagcaggaggcggctttggagctggaggaactcaagaaaaagagggaggagagaaggaaggtcctggaggaggaagagcagaggaggaagcaggaggaagccgatcgaaaactcagagaggaggaagagaagaggaggctaaaggaagagattgaaaggcgaagagcagaagctgctgagaaacgccagaagatgccagaagatggcttgtcagatgacaagaaaccattcaagtgtttcactcctaaaggttcatctctcaagatagaagagcgagcagaatttttgaataagtctgtgcagaaaagcagtggtgtcaaatcgacccatcaagcagcaatagtctccaagattgacagcagactggagcagtataccagtgcaattgagggaacaaaaagcgcaaaacctacaaagccggcagcctcggatcttcctgttcctgctgaaggtgtacgcaacatcaagagtatgtgggagaaagggaatgtgttttcatcccccactgcagcaggcacaccaaataaggaaactgctggcttgaaggtaggggtttctagccgcatcaatgaatggctaactaaaaccccagatggaaacaagtcacctgctcccaaaccttctgtaagtacctttaggtttttctgagtttctttgatctcccagcttctaccagcagaagaaaacaagcagttggtctgtttacctaggaatggcagtgcccctgttctttgctttccctgatgaatagcaaacaggaaagtgttcagatttacaacagttctaagaagctgcatctcagttactcagagggtaaaatggaaccaaataatcacctctacaccctaactgagaggaggaatcagctagaatactgaggcagttcaaatttagatcctttactcgtctatttgtttagcttctattctataaattctggatagaaatttgaaaatgaaaggtcacatcattttggctacttctttgtcaagagcacccctaaacttattcccaaaagaatatgtatgttgcctattgggaacccatatgttccaatttgcctcatttttataacttggcacaaaaatgcagttattgggtagctgttgaaataattggtctaattgtgttgtcagcacctcctgaggaaagtcataaaactggaaactagaaaaactggttatgaatgatgtttttgagaatctaaaattttcttaatttattaagtgcagctatcttactaaaaagtacatttcttttcacctttttgttgaatgtatacgacaattgcttgcatttgtcattataataagaaaacgtatcaagctccccactgtatattgctgagctttccctgttaagtttgcttttatagctttgttggtgcccaagggagctgagagtccactgtcataatcctacattctagaggaagaagaaaaagtttccaatcctaggcctctgtgcatttaattgcatccattggctccatgccatttaattgcatttgttggctccatatataatctccaaagtcattaaattttgtcactttccaatttaaaaaggaagaaatggaaatgttcacaaatccttcttgggcacaactccttgaaccgtttaattaatctacaccccgagattctttgcataaaggctcacaggaggtatacactaatgtcaacccaatttacaattggaaaatctttatacattgaaaaaagcaacttttcctccccctctcaataggtacaagaatgcgggtttataaaaggacacagttgaggcaagagaccggacccaaaagttatgtgctctttagtgcctcaagttttccaagcatctctggtaacataaggagtagaaattattttcaaaaacaaaataatcactggttccagaccagtgattattaaccctttttgaattatgaacccctttaaaacctaatgaaatttaaggaccctctcccccaaaatatacatataaaaaaacaaggcagtctatggacctactgagtaactctcaagatagtaagtaaggagagaaagatctatgtttccctctttgataagtatgaaatatttggaggagatgctaatttttgcacgtttatgatatttgcaatctttcatttttgtagcagattatactcaaaaatttgatccagaacttggcccctattcttttatcagcactttaacttgtaaactgaaaagtttaccatcatctgtatgacatcctaatgaggttaaaaagataaaatgcagttatgattatgataggtataactgtatccaggtttccacagcaaaaacaaaacaaaacatacaccatgttctggggttattgacagcctcctaaaaaaa

SEQ ID NO: 440410 - DNA, 1456 bp, Homo sapiens
ggtcgcctactactactaaattcgcggccgcgtcgacagggcagcagaggagaggcagaggataaaggaggaagagaaaagggcagcagaggagaggcagaggataaaagaggaagagaaaagggcagcagaggagaggcaaagggccagggcagaggaggaagagaaggctaaggtagaagagcagaaacgtaacaagcagctagaagagaaaaaacatgccatgcaagagacaaagataaaaggggaaaaggtagaacagaaaatagaagggaaatgggtaaatgaaaagaaagcacaagaagataaacttcagacagctgtcctaaagaaacagggagaagagaagggaactaaagtgcaagctaaaagagaaaagctccaagaagacaagcctaccttcaaaaaagaagagatcaaagatgaaaagattaaaaaggacaaagaacccaaagaagaagttaagagcttcatggatcgaaagaagggatttacagaagttaagtcgcagaatggagaattcatgacccacaaacttaaacatactgagaatactttcagccgccctggagggagggccagcgtggacaccaaggaggctgagggcgccccccaggtggaagccggcaaaaggctggaggagcttcgtcgtcgtcgcggggagaccgagagcgaagagttcgagaagctcaaacagaagcagcaggaggcggctttggagctggaggaactcaagaaaaagagggaggagagaaggaaggtcctggaggaggaagagcagaggaggaagcaggaggaagccgatcgaaaactcagagaggaggaagagaagaggaggctaaaggaagagattgaaaggcgaagagcagaagctgctgagaaacgccagaagatgccagaagatggcttgtcagatgacaagaaaccattcaagtgtttcactcctaaaggttcatctctcaagatagaagagcgagcagaatttttgaataagtctgtgcagaaaagcagtggtgtcaaatcgacccatcaagcagcaatagtctccaagattgacagcagactggagcagtataccagtgcaattgagggaacaaaaagcgcaaaacctacaaagccggcagcctcggatcttcctgttcctgctgaaggtgtacgcaacatcaagagtatgtgggagaaagggaatgtgttttcatcccccactgcagcaggcacaccaaataaggaaactgctggcttgaaggtaggggtttctagccgcatcaatgaatggctaactaaaaccccagatggaaacaagtcacctgctcccaaaccttctgacttgagaccaggagacgtatccagcaagcggaacctctgggaaaagcaatctgtggataaggtcacttcccccactaaggtaatctattgggaagactagtatttcagaggtttgttttcctgatgtatg

SEQ ID NO: 440411 - DNA, 1823 bp, Homo sapiens
  misc_feature (1163)..(1163): n is a, c, g, or t
tgagatggagtctcactctgtcactcaggttggagtgcagtggcgccatctcagctcactgcaacctccgcctcctgggttcaagcaattctcctgccgcagcctcccaagtagctgggactacaggcacctgccaccaagcccgggtaatttttgtatttttagtagagacggggtttcaccatgttggccaggctggtctcaaactcctgaccttgatccacctgcctcagcctccccgagtgctgggattacaggcatgagccacctcgcctggcctataaactacgactctgatgaccgcatagtatttaagcaagaaaacaaccaaaatgttctagctaaagtggagaccacttaacctaacccaattaaactttaagttgaacacaagagtagtagatgcagttcagctccatgacattgggtgagttgtctaaatgctctgtgctttggtgtccttgtctgcgtgtgacatgaagccgcagatctcaaagatctctttcattccgtgaaagcgctctcaatgtgtgaagttgactgcttctcctgctgtttaccaagagaataatcttaaccctacattgtggagatcggatttgttctcacttgacagaaagccagtcccacgagcagcttggtacccaaataccagtctgtttagtgctcattagagatgaagaaccatattcataagtcaagctgagacggagtgtcatctccagacagaatcaacaccaccccctcctcaggaactgggatttggctgctttccaagccgctgctgaccaggttccattgcccagcttggctgatgagatcactggcagagtaccatgggtgcagacggggcctgctgtttcaacatgttctcaggagggctcttgcccacatttcttggagaggtgtgagcaccaaacatgctgaaccatccagcccatcactgagcagggccatctctcttcatcccttttcatttggtttgcatttttatgtcatgctccttccctggataaaagggataagaggagtttctcagatttgatttctcagtgggaactgtttgctttggaagccacctacaccaatgctaattgagaacagagctcagaatgggagcctgagaactgcacccggatgaactttttggtgggctgatttcngttgatcttgtcagaattaggttgtatatgcatgtaataccatgatcaactattttccaaaaggctgagcaaatgcatcagtgtctttttcctttgaccagttacttaccttggaaaaattatttgtagttaagcatataaagtcttcatcaggaaaactactggagatcctggccctgactacccagcaataacatttctggaactcccgaagcaatcagtgctctctgatcgctaaacatgatgggcttctattagagagattacagtaaaaaataacaatcagctctctgatgatcctgtgaggagggaacgggttgggaggagtagatttggctgaggacaagcccagactttcgtcacagggacagaccaacgtgttaacacaaagggagaacacgggagcatcctgcaccgtgcatttcagccacagatcacatggcccctccgcgggcccagcccacgccctgaccgcccggcctggccaggtctccgtatctctctgccccgccgccccttcccaactgcggacatgctgggtggatccggatcgcatggaagacgcagcctggccgcgctctcccagtgagtcctcatttcgcctctttggttttttcctttcttttttttttttataaaaaacaaacgaattgttgtaaa

SEQ ID NO: 440412 - DNA, 4357 bp, Homo sapiens
tgtgctttctttttattgctgcatttgtgttctacaagacagcctctttctccaagattaacatttcttatgattgttcctgacaatggattcacttccagaggccctgctaaggataaccaaaaaagggcatggagcaggctggttttggcagcgtgcacgcagtttcagagctttttaggtcttgggttttctgatgagtgatttcctgagcatgcctagggaatgacaggcatctccacaggcaggctgcatccaccttggctggggtgtcgtcattggctgcctattagaaaaacgacaggacaatgcataccaccgcctcccgactgtaaacataggggatatgtgttcacttagcatggacttctgggaggggccaaggaagggcggtctggagttttattgaatagagcagtgtgtattcggctgcctgcctgcccgcctgcttgctctctggctgtgctcctgcttaaagaaatcagtccttcctttccgacttagtcctcgggaagaagtttcagactacaaggtatcattggaacatttcaagatcatcaaatcaaattccacagggattggtgaccaaccagaaggctcagacatctgattgctgacctgtccagacatcatctggtctccctgaacctgaaatcacaccatggatgattttgagcgtcgcagagaacttagaaggcaaaagagggaggagatgcgactcgaagcagaaagaatcgcctaccagaggaatgacgatgatgaagaggaggcagcccgggaacggcgccgccgagcccgacaggaacggctgcggcagaagcaggaggaagaatccttgggacaggtgaccgaccaggtggaggtgaatgcccagaacagtgtgcctgacgaggaggccaagacaaccaccacaaacactcaagtggaaggggatgatgaggccgcattcctggagcgcctggctcggcgtgaggaaagacgccaaaaacgccttcaggaggctctggagcggcagaaggagttcgacccaacaataacagatgcaagtctgtcgctcccaagcagaagaatgcaaaatgacacagcagaaaatgaaactaccgagaaggaagaaaaaagtgaaagtcgccaagaaagatacgagatagaggaaacagaaacagtcaccaagtcctaccagaagaatgattggagggatgctgaagaaaacaagaaagaagacaaggaaaaggaggaggaggaagaggagaagccaaagcgagggagcattggagaaaatcagatcaaagatgaaaagattaaaaaggacaaagaacccaaagaagaagttaagagcttcatggatcgaaagaagggatttacagaagttaagtcgcagaatggagaattcatgacccacaaacttaaacatactgagaatactttcagccgccctggagggagggccagcgtggacaccaaggaggctgagggcgccccccaggtggaagccggcaaaaggctggaggagcttcgtcgtcgtcgcggggagaccgagagcgaagagttcgagaagctcaaacagaagcagcaggaggcggctttggagctggaggaactcaagaaaaagagggaggagagaaggaaggtcctggaggaggaagagcagaggaggaagcaggaggaagccgatcgaaaactcagagaggaggaagagaagaggaggctaaaggaagagattgaaaggcgaagagcagaagctgctgagaaacgccagaagatgccagaagatggcttgtcagatgacaagaaaccattcaagtgtttcactcctaaaggttcatctctcaagatagaagagcgagcagaatttttgaataagtctgtgcagaaaagcagtggtgtcaaatcgacccatcaagcagcaatagtctccaagattgacagcagactggagcagtataccagtgcaattgagggaacaaaaagcgcaaaacctacaaagccggcagcctcggatcttcctgttcctgctgaaggtgtacgcaacatcaagagtatgtgggagaaagggaatgtgttttcatcccccactgcagcaggcacaccaaataaggtgagcatctgatttttgtctcttaagtgtagaggggcatatttttttgcatgtcgattttgatttaggaatcacactagtaaataataaaagcagtgaagaaggtgcaatttgtactttgttttgcaatgaccacaaaagcaagctcagagagaatgtgtttgtgaggttgcatgaggtactaagcccgggccatcttactccaaataaagtgcctgggctgaaatgtccacccttggagttggagtggggtgagttaccagggaaagaaaaccagataacatattctgtaaatatcaagtgttaaggtttatggttatgtgaaatcatacttaatgatattttgaatttgctttgaaaattccttcccaggtaaagtttacttcattctttaatattttggatgattgcccctttgtaggaaactgctggcttgaaggtaggggtttctagccgcatcaatgaatggctaactaaaaccccagatggaaacaagtcacctgctcccaaaccttctgtaagtacctttaggtttttctgagtttctttgatctcccagcttctaccagcagaagaaaacaagcagttggtctgtttacctaggaatggcagtgcccctgttctttgctttccctgatgaatagcaaacaggaaagtgttcagatttacaacagttctaagaagctgcatctcagttactcagagggtaaaatggaaccaaataatcacctctacaccctaactgagaggaggaatcagctagaatactgaggcagttcaaatttagatcctttactcgtctatttgtttagcttctattctataaattctggatagaaatttgaaaatgaaaggtcacatcattttggctacttctttgtcaagagcacccctaaacttattcccaaaagaatatgtatgttgcctattgggaacccatatgttccaatttgcctcatttttataacttggcacaaaaatgcagttattgggtagctgttgaaataattggtctaattgtgttgtcagcacctcctgaggaaagtcataaaactggaaactagaaaaactggttatgaatgatgtttttgagaatctaaaattttcttaatttattaagtgcagctatcttactaaaaagtacatttcttttcacctttttgttgaatgtatacgacaattgcttgcatttgtcattataataagaaaacgtatcaagctccccactgtatattgctgagctttccctgttaagtttgcttttatagctttgttggtgcccaagggagctgagagtccactgtcataatcctacattctagaggaagaagaaaaagtttccaatcctaggcctctgtgcatttaattgcatccattggctccatgccatttaattgcatttgttggctccatatataatctccaaagtcattaaattttgtcactttccaatttaaaaaggaagaaatggaaatgttcacaaatccttcttgggcacaactccttgaaccgtttaattaatctacaccccgagattctttgcataaaggctcacaggaggtatacactaatgtcaacccaatttacaattggaaaatctttatacattgaaaaaagcaacttttcctccccctctcaataggtacaagaatgcgggtttataaaaggacacagttgaggcaagagaccggacccaaaagttatgtgctctttagtgcctcaagttttccaagcatctctggtaacataaggagtagaaattattttcaaaaacaaaataatcactggttccagaccagtgattattaaccctttttgaattatgaacccctttaaaacctaatgaaatttaaggaccctctcccccaaaatatacatataaaaaaacaaggcagtctatggacctactgagtaactctcaagatagtaagtaaggagagaaagatctatgtttccctctttgataagtatgaaatatttggaggagatgctaatttttgcacgtttatgatatttgcaatctttcatttttgtagcagattatactcaaaaatttgatccagaacttggcccctattcttttatcagcactttaacttgtaaactgaaaagtttaccatcatctgtatgacatcctaatgaggttaaaaagataaaatgcagttatgattatgataggtataactgtatccaggtttccacagcaaaaacaaaacaaaacatacaccatgttctggggttattgacagcctcctaaaaaaa

SEQ ID NO: 440413 - DNA, 3653 bp, Homo sapiens
ggtcgcctactactactaaattcgcggccgcgtcgacagggcagcagaggagaggcagaggataaaggaggaagagaaaagggcagcagaggagaggcagaggataaaagaggaagagaaaagggcagcagaggagaggcaaagggccagggcagaggaggaagagaaggctaaggtagaagagcagaaacgtaacaagcagctagaagagaaaaaacatgccatgcaagagacaaagataaaaggggaaaaggtagaacagaaaatagaagggaaatgggtaaatgaaaagaaagcacaagaagataaacttcagacagctgtcctaaagaaacagggagaagagaagggaactaaagtgcaagctaaaagagaaaagctccaagaagacaagcctaccttcaaaaaagaagagatcaaagatgaaaagattaaaaaggacaaagaacccaaagaagaagttaagagcttcatggatcgaaagaagggatttacagaagttaagtcgcagaatggagaattcatgacccacaaacttaaacatactgagaatactttcagccgccctggagggagggccagcgtggacaccaaggaggctgagggcgccccccaggtggaagccggcaaaaggctggaggagcttcgtcgtcgtcgcggggagaccgagagcgaagagttcgagaagctcaaacagaagcagcaggaggcggctttggagctggaggaactcaagaaaaagagggaggagagaaggaaggtcctggaggaggaagagcagaggaggaagcaggaggaagccgatcgaaaactcagagaggaggaagagaagaggaggctaaaggaagagattgaaaggcgaagagcagaagctgctgagaaacgccagaagatgccagaagatggcttgtcagatgacaagaaaccattcaagtgtttcactcctaaaggttcatctctcaagatagaagagcgagcagaatttttgaataagtctgtgcagaaaagcagtggtgtcaaatcgacccatcaagcagcaatagtctccaagattgacagcagactggagcagtataccagtgcaattgagggaacaaaaagcgcaaaacctacaaagccggcagcctcggatcttcctgttcctgctgaaggtgtacgcaacatcaagagtatgtgggagaaagggaatgtgttttcatcccccactgcagcaggcacaccaaataaggaaactgctggcttgaaggtaggggtttctagccgcatcaatgaatggctaactaaaaccccagatggaaacaagtcacctgctcccaaaccttctgacttgagaccaggagacgtatccagcaagcggaacctctgggaaaagcaatctgtggataaggtcacttcccccactaaggtttgagacagttccagaaagaacccaagctcaagacgcaggacgagctcagttgtagagggctaattcgctctgttttgtatttatgttgatttactaaattgggttcattatcttttatttttcaatatcccagtaaacccatgtatattatcactatatttaataatcacagtctagagatgttcatggtaaaagtactgcctttgcacaggagcctgtttctaaagaaacccatgctgtgaaatagagacttttctactgatcatcataactctgtatctgagcagtgataccaaccacatctgaagtcaacagaagatccaagtttaaaattgcctgcggaatgtgtgcagtatctagaaaaatgaaccgtagtttttgtttttttaaatacagaagtcatgttgtttctgcactttataataaagcatggaagaaattatcttagtaggcaattgtaacactttttgaaagtaacccatttcagatttgaaatactgcaataatggttgtctttaaaaaaaaaaaagaaatgtactgttaaggtattactttttttcatgctgatgattcatatctaaattacattattatgttagctgacagtggtactgattttttaggttggttgttttgtggatttctttagtagtgatagtagcctgaaccacattttagataactcaattatgtatgtatgtgcatacacatatacaaacacactaatggtagaatgcttttttatgtgctagactattatatttagtagtatgtcattgtaactagccaatatcacagcttttgaaaaattaaaaaatcacactatattaatatttcatatttgccaacagaaacatggcagataggtatcaatatgttttcaatgcctgatgacctataagaagaaagtattgaaaagaagagagattagaactgttagaaggagttgaaattttctttttattaatgctatcatctcgaccaagctcaaagcctacttattagaaacaatgaagttcacaataggtcataaggtctcttccttttctaaaattgaaagacaagaaatttagtgccaatattgtacagacagaaattccatgtatgagtctcaacaaagactacctttggctaaatgtctagaagcagagaagtaaagtgagcaaaatccagtgttgaggagtcatgacagtactttgatctttatatactctgaagcatttcttcaaacttttctacttttatttgtcattgatacctgtagtaagttgacaatgtggtgaaatttcaaaattatatgtaacttctactagttttactttctcccccaagtcttttttaactcatgatttttacacacacaatccagaacttattatatagcctctaagtctttattcttcacagtagataatgaaagagtcctccagtgtcttggcaaaatgttctagtatagctggatacatacagtggagttctataaactcatacctcagtggacttaaccaaaattgtgttagtctcaattcctaccacactgagggagcctcccaaataactattttcttatctgcagtattcctccagaagagctaaccagggcagggctggcatgagaagtgacatctgcgttacaaagtctatcttcctcataagtctgtaaagagcaattgaatcttctagctttagcaaacctaagccaaaggaaggaaagccacgaagaatgcagaagtcaaaccctcatgacaaagtaggcacaagtctacaataagctaaatcagaatttacaaatacaagtgtcccaggtagcattgactcccgtcattggagtgaaatggatcaaagtttgaattaaggcctatggtaaggtaacattgctttgttgtacttttgaacaagagctcctcctgatcactattacatatttttctagaaaatctaaagttcagaagagaatgtatcactgctgacttttattccaatatttggatggagtaagttttagggtagaattttgttcagtttggatttaatcttttgaaaagtaaattccttgtttactggtttgactataattctctgttatctttacgaggtaaaactgcaagctgactagcatgttctgtgaatctgccattcctaaaaattttataaacacttgatacttttcactgataatggatcgctccaataaacatatattgtgaaaatgcatccacaataaatggaattccttcctgcaaaa

SEQ ID NO: 440414 - DNA, 3653 bp, Homo sapiens
ggtcgcctactactactaaattcgcggccgcgtcgacagggcagcagaggagaggcagaggataaaggaggaagagaaaagggcagcagaggagaggcagaggataaaagaggaagagaaaagggcagcagaggagaggcaaagggccagggcagaggaggaagagaaggctaaggtagaagagcagaaacgtaacaagcagctagaagagaaaaaacatgccatgcaagagacaaagataaaaggggaaaaggtagaacagaaaatagaagggaaatgggtaaatgaaaagaaagcacaagaagataaacttcagacagctgtcctaaagaaacagggagaagagaagggaactaaagtgcaagctaaaagagaaaagctccaagaagacaagcctaccttcaaaaaagaagagatcaaagatgaaaagattaaaaaggacaaagaacccaaagaagaagttaagagcttcatggatcgaaagaagggatttacagaagttaagtcgcagaatggagaattcatgacccacaaacttaaacatactgagaatactttcagccgccctggagggagggccagcgtggacaccaaggaggctgagggcgccccccaggtggaagccggcaaaaggctggaggagcttcgtcgtcgtcgcggggagaccgagagcgaagagttcgagaagctcaaacagaagcagcaggaggcggctttggagctggaggaactcaagaaaaagagggaggagagaaggaaggtcctggaggaggaagagcagaggaggaagcaggaggaagccgatcgaaaactcagagaggaggaagagaagaggaggctaaaggaagagattgaaaggcgaagagcagaagctgctgagaaacgccagaagatgccagaagatggcttgtcagatgacaagaaaccattcaagtgtttcactcctaaaggttcatctctcaagatagaagagcgagcagaatttttgaataagtctgtgcagaaaagcagtggtgtcaaatcgacccatcaagcagcaatagtctccaagattgacagcagactggagcagtataccagtgcaattgagggaacaaaaagcgcaaaacctacaaagccggcagcctcggatcttcctgttcctgctgaaggtgtacgcaacatcaagagtatgtgggagaaagggaatgtgttttcatcccccactgcagcaggcacaccaaataaggaaactgctggcttgaaggtaggggtttctagccgcatcaatgaatggctaactaaaaccccagatggaaacaagtcacctgctcccaaaccttctgacttgagaccaggagacgtatccagcaagcggaacctctgggaaaagcaatctgtggataaggtcacttcccccactaaggtttgagacagttccagaaagaacccaagctcaagacgcaggacgagctcagttgtagagggctaattcgctctgttttgtatttatgttgatttactaaattgggttcattatcttttatttttcaatatcccagtaaacccatgtatattatcactatatttaataatcacagtctagagatgttcatggtaaaagtactgcctttgcacaggagcctgtttctaaagaaacccatgctgtgaaatagagacttttctactgatcatcataactctgtatctgagcagtgataccaaccacatctgaagtcaacagaagatccaagtttaaaattgcctgcggaatgtgtgcagtatctagaaaaatgaaccgtagtttttgtttttttaaatacagaagtcatgttgtttctgcactttataataaagcatggaagaaattatcttagtaggcaattgtaacactttttgaaagtaacccatttcagatttgaaatactgcaataatggttgtctttaaaaaaaaaaaagaaatgtactgttaaggtattactttttttcatgctgatgattcatatctaaattacattattatgttagctgacagtggtactgattttttaggttggttgttttgtggatttctttagtagtgatagtagcctgaaccacattttagataactcaattatgtatgtatgtgcatacacatatacaaacacactaatggtagaatgcttttttatgtgctagactattatatttagtagtatgtcattgtaactagccaatatcacagcttttgaaaaattaaaaaatcacactatattaatatttcatatttgccaacagaaacatggcagataggtatcaatatgttttcaatgcctgatgacctataagaagaaagtattgaaaagaagagagattagaactgttagaaggagttgaaattttctaaaagacatagtatttagtttataattaaatgcattcttgaagtccagtgtgaattttattaatgctatcatctcgaccaagctcaaagcctacttattagaaacaatgaagttcacaataggtcataaggtctcttccttttcttatgagtctcaacaaagactacctttggctaaatgtctagaagcagagaagtaaagtgagcaaaatccagtgttgaggagtcatgacagtactttgatctttatatactctgaagcatttcttcaaacttttctacttttatttgtcattgatacctgtagtaagttgacaatgtggtgaaatttcaaaattatatgtaacttctactagttttactttctcccccaagtcttttttaactcatgatttttacacacacaatccagaacttattatatagcctctaagtctttattcttcacagtagataatgaaagagtcctccagtgtcttggcaaaatgttctagtatagctggatacatacagtggagttctataaactcatacctcagtggacttaaccaaaattgtgttagtctcaattcctaccacactgagggagcctcccaaataactattttcttatctgcagtattcctccagaagagctaaccagggcagggctggcatgagaagtgacatctgcgttacaaagtctatcttcctcataagtctgtaaagagcaattgaatcttctagctttagcaaacctaagccaaaggaaggaaagccacgaagaatgcagaagtcaaaccctcatgacaaagtaggcacaagtctacaataagctaaatcagaatttacaaatacaagtgtcccaggtagcattgactcccgtcattggagtgaaatggatcaaagtttgaattaaggcctatggtaaggtaacattgctttgttgtacttttgaacaagagctcctcctgatcactattacatatttttctagaaaatctaaagttcagaagagaatgtatcactgctgacttttattccaatatttggatggagtaagttttagggtagaattttgttcagtttggatttaatcttttgaaaagtaaattccttgtttactggtttgactataattctctgttatctttacgaggtaaaactgcaagctgactagcatgttctgtgaatctgccattcctaaaaattttataaacacttgatacttttcactgataatggatcgctccaataaacatatattgtgaaaatgcatccacaataaatggaattccttcctgcaaaa

SEQ ID NO: 440415 - DNA, 3653 bp, Homo sapiens
ggtcgcctactactactaaattcgcggccgcgtcgacagggcagcagaggagaggcagaggataaaggaggaagagaaaagggcagcagaggagaggcagaggataaaagaggaagagaaaagggcagcagaggagaggcaaagggccagggcagaggaggaagagaaggctaaggtagaagagcagaaacgtaacaagcagctagaagagaaaaaacatgccatgcaagagacaaagataaaaggggaaaaggtagaacagaaaatagaagggaaatgggtaaatgaaaagaaagcacaagaagataaacttcagacagctgtcctaaagaaacagggagaagagaagggaactaaagtgcaagctaaaagagaaaagctccaagaagacaagcctaccttcaaaaaagaagagatcaaagatgaaaagattaaaaaggacaaagaacccaaagaagaagttaagagcttcatggatcgaaagaagggatttacagaagttaagtcgcagaatggagaattcatgacccacaaacttaaacatactgagaatactttcagccgccctggagggagggccagcgtggacaccaaggaggctgagggcgccccccaggtggaagccggcaaaaggctggaggagcttcgtcgtcgtcgcggggagaccgagagcgaagagttcgagaagctcaaacagaagcagcaggaggcggctttggagctggaggaactcaagaaaaagagggaggagagaaggaaggtcctggaggaggaagagcagaggaggaagcaggaggaagccgatcgaaaactcagagaggaggaagagaagaggaggctaaaggaagagattgaaaggcgaagagcagaagctgctgagaaacgccagaagatgccagaagatggcttgtcagatgacaagaaaccattcaagtgtttcactcctaaaggttcatctctcaagatagaagagcgagcagaatttttgaataagtctgtgcagaaaagcagtggtgtcaaatcgacccatcaagcagcaatagtctccaagattgacagcagactggagcagtataccagtgcaattgagggaacaaaaagcgcaaaacctacaaagccggcagcctcggatcttcctgttcctgctgaaggtgtacgcaacatcaagagtatgtgggagaaagggaatgtgttttcatcccccactgcagcaggcacaccaaataaggaaactgctggcttgaaggtaggggtttctagccgcatcaatgaatggctaactaaaaccccagatggaaacaagtcacctgctcccaaaccttctgacttgagaccaggagacgtatccagcaagcggaacctctgggaaaagcaatctgtggataaggtcacttcccccactaaggtttgagacagttccagaaagaacccaagctcaagacgcaggacgagctcagttgtagagggctaattcgctctgttttgtatttatgttgatttactaaattgggttcattatcttttatttttcaatatcccagtaaacccatgtatattatcactatatttaataatcacagtctagagatgttcatggtaaaagtactgcctttgcacaggagcctgtttctaaagaaacccatgctgtgaaatagagacttttctactgatcatcataactctgtatctgagcagtgataccaaccacatctgaagtcaacagaagatccaagtttaaaattgcctgcggaatgtgtgcagtatctagaaaaatgaaccgtagtttttgtttttttaaatacagaagtcatgttgtttctgcactttataataaagcatggaagaaattatcttagtaggcaattgtaacactttttgaaagtaacccatttcagatttgaaatactgcaataatggttgtctttaaaaaaaaaaaagaaatgtactgttaaggtattactttttttcatgctgatgattcatatctaaattacattattatgttagctgacagtggtactgattttttaggttggttgttttgtggatttctttagtagtgatagtagcctgaaccacattttagataactcaattatgtatgtatgtgcatacacatatacaaacacactaatggtagaatgcttttttatgtgctagactattatatttagtagtatgtcattgtaactagccaatatcacagcttttgaaaaattaaaaaatcacactatattaatatttcatatttgccaacagaaacatggcagataggtatcaatatgttttcaatgcctgatgacctataagaagaaagtattgaaaagaagagagattagaactgttagaaggagttgaaattttctaaaagacatagtatttagtttataattaaatgcattcttgaagtccagtgtgaattttattaatgctatcatctcgaccaagctcaaagcctacttattagaaacaatgaagttcacaataggtcataaggtctcttccttttctaaaattgaaagacaagaaatttagtgccaatattgtacagacagaaattccatgtatgagtctcaacaaagactacctttggctaaatgtctagaagcagagaagtaaagtgagcaaaatccagtgttgaggagtcatgacagtactttgatctttatatactctgaagcatttcttcaaacttttctacttttatttgtcattgatacctgtagtaagttgacaatgtggtgaaatttcaaaattatatgtaacttctactagttttactttctcccccaagtcttttttaactcatgatttttacacacacaatccagaacttattatatagcctctaagtctttattcttcacagtagataatgaaagagtcctccagtgtcttggcaaaatgttctagtatagctggatacatacagtggagttctataaactcatacctcagtggacttaaccttttcttatctgcagtattcctccagaagagctaaccagggcagggctggcatgagaagtgacatctgcgttacaaagtctatcttcctcataagtctgtaaagagcaattgaatcttctagctttagcaaacctaagccaaaggaaggaaagccacgaagaatgcagaagtcaaaccctcatgacaaagtaggcacaagtctacaataagctaaatcagaatttacaaatacaagtgtcccaggtagcattgactcccgtcattggagtgaaatggatcaaagtttgaattaaggcctatggtaaggtaacattgctttgttgtacttttgaacaagagctcctcctgatcactattacatatttttctagaaaatctaaagttcagaagagaatgtatcactgctgacttttattccaatatttggatggagtaagttttagggtagaattttgttcagtttggatttaatcttttgaaaagtaaattccttgtttactggtttgactataattctctgttatctttacgaggtaaaactgcaagctgactagcatgttctgtgaatctgccattcctaaaaattttataaacacttgatacttttcactgataatggatcgctccaataaacatatattgtgaaaatgcatccacaataaatggaattccttcctgcaaaa

SEQ ID NO: 440416 - DNA, 3550 bp, Homo sapiens
ggtcgcctactactactaaattcgcggccgcgtcgacagggcagcagaggagaggcagaggataaaggaggaagagaaaagggcagcagaggagaggcagaggataaaagaggaagagaaaagggcagcagaggagaggcaaagggccagggcagaggaggaagagaaggctaaggtagaagagcagaaacgtaacaagcagctagaagagaaaaaacatgccatgcaagagacaaagataaaaggggaaaaggtagaacagaaaatagaagggaaatgggtaaatgaaaagaaagcacaagaagataaacttcagacagctgtcctaaagaaacagggagaagagaagggaactaaagtgcaagctaaaagagaaaagctccaagaagacaagcctaccttcaaaaaagaagagatcaaagatgaaaagattaaaaaggacaaagaacccaaagaagaagttaagagcttcatggatcgaaagaagggatttacagaagttaagtcgcagaatggagaattcatgacccacaaacttaaacatactgagaatactttcagccgccctggagggagggccagcgtggacaccaaggaggctgagggcgccccccaggtggaagccggcaaaaggctggaggagcttcgtcgtcgtcgcggggagaccgagagcgaagagttcgagaagctcaaacagaagcagcaggaggcggctttggagctggaggaactcaagaaaaagagggaggagagaaggaaggtcctggaggaggaagagcagaggaggaagcaggaggaagccgatcgaaaactcagagaggaggaagagaagaggaggctaaaggaagagattgaaaggcgaagagcagaagctgctgagaaacgccagaagatgccagaagatggcttgtcagatgacaagaaaccattcaagtgtttcactcctaaaggttcatctctcaagatagaagagcgagcagaatttttgaataagtctgtgcagaaaagcagtggtgtcaaatcgacccatcaagcagcaatagtctccaagattgacagcagactggagcagtataccagtgcaattgagggaacaaaaagcgcaaaacctacaaagccggcagcctcggatcttcctgttcctgctgaaggtgtacgcaacatcaagagtatgtgggagaaagggaatgtgttttcatcccccactgcagcaggcacaccaaataaggaaactgctggcttgaaggtaggggtttctagccgcatcaatgaatggctaactaaaaccccagatggaaacaagtcacctgctcccaaaccttctgacttgagaccaggagacgtatccagcaagcggaacctctgggaaaagcaatctgtggataaggtcacttcccccactaaggtttgagacagttccagaaagaacccaagctcaagacgcaggacgagctcagttgtagagggctaattcgctctgttttgtatttatgttgatttactaaattgggttcattatcttttatttttcaatatcccagtaaacccatgtatattatcactatatttaataatcacagtctagagatgttcatggtaaaagtactgcctttgcacaggagcctgtttctaaagaaacccatgctgtgaaatagagacttttctactgatcatcataactctgtatctgagcagtgataccaaccacatctgaagtcaacagaagatccaagtttaaaattgcctgcggaatgtgtgcagtatctagaaaaatgaaccgtagtttttgtttttttaaatacagaagtcatgttgtttctgcacttatctaaattacattattatgttagctgacagtggtactgattttttaggttggttgttttgtggatttctttagtagtgatagtagcctgaaccacattttagataactcaattatgtatgtatgtgcatacacatatacaaacacactaatggtagaatgcttttttatgtgctagactattatatttagtagtatgtcattgtaactagccaatatcacagcttttgaaaaattaaaaaatcacactatattaatatttcatatttgccaacagaaacatggcagataggtatcaatatgttttcaatgcctgatgacctataagaagaaagtattgaaaagaagagagattagaactgttagaaggagttgaaattttctaaaagacatagtatttagtttataattaaatgcattcttgaagtccagtgtgaattttattaatgctatcatctcgaccaagctcaaagcctacttattagaaacaatgaagttcacaataggtcataaggtctcttccttttctaaaattgaaagacaagaaatttagtgccaatattgtacagacagaaattccatgtatgagtctcaacaaagactacctttggctaaatgtctagaagcagagaagtaaagtgagcaaaatccagtgttgaggagtcatgacagtactttgatctttatatactctgaagcatttcttcaaacttttctacttttatttgtcattgatacctgtagtaagttgacaatgtggtgaaatttcaaaattatatgtaacttctactagttttactttctcccccaagtcttttttaactcatgatttttacacacacaatccagaacttattatatagcctctaagtctttattcttcacagtagataatgaaagagtcctccagtgtcttggcaaaatgttctagtatagctggatacatacagtggagttctataaactcatacctcagtggacttaaccaaaattgtgttagtctcaattcctaccacactgagggagcctcccaaataactattttcttatctgcagtattcctccagaagagctaaccagggcagggctggcatgagaagtgacatctgcgttacaaagtctatcttcctcataagtctgtaaagagcaattgaatcttctagctttagcaaacctaagccaaaggaaggaaagccacgaagaatgcagaagtcaaaccctcatgacaaagtaggcacaagtctacaataagctaaatcagaatttacaaatacaagtgtcccaggtagcattgactcccgtcattggagtgaaatggatcaaagtttgaattaaggcctatggtaaggtaacattgctttgttgtacttttgaacaagagctcctcctgatcactattacatatttttctagaaaatctaaagttcagaagagaatgtatcactgctgacttttattccaatatttggatggagtaagttttagggtagaattttgttcagtttggatttaatcttttgaaaagtaaattccttgtttactggtttgactataattctctgttatctttacgaggtaaaactgcaagctgactagcatgttctgtgaatctgccattcctaaaaattttataaacacttgatacttttcactgataatggatcgctccaataaacatatattgtgaaaatgcatccacaataaatggaattccttcctgcaaaa

SEQ ID NO: 440417 - DNA, 2282 bp, Homo sapiens
ggtcgcctactactactaaattcgcggccgcgtcgacaggggtttctagccgcatcaatgaatggctaactaaaaccccagatggaaacaagtcacctgctcccaaaccttctgacttgagaccaggagacgtatccagcaagcggaacctctgggaaaagcaatctgtggataaggtcacttcccccactaaggagcctgtttctaaagaaacccatgctgtgaaatagagacttttctactgatcatcataactctgtatctgagcagtgataccaaccacatctgaagtcaacagaagatccaagtttaaaattgcctgcggaatgtgtgcagtatctagaaaaatgaaccgtagtttttgtttttttaaatacagaagtcatgttgtttctgcactttataataaagcatggaagaaattatcttagtaggcaattgtaacactttttgaaagtaacccatttcagatttgaaatactgcaataatggttgtctttaaaaaaaaaaaagaaatgtactgttaaggtattactttttttcatgctgatgattcatatctaaattacattattatgttagctgacagtggtactgattttttaggttggttgttttgtggatttctttagtagtgatagtagcctgaaccacattttagataactcaattatgtatgtatgtgcatacacatatacaaacacactaatggtagaatgcttttttatgtgctagactattatatttagtagtatgtcattgtaactagccaatatcacagcttttgaaaaattaaaaaatcacactatattaatatttcatatttgccaacagaaacatggcagataggtatcaatatgttttcaatgcctgatgacctataagaagaaagtattgaaaagaagagagattagaactgttagaaggagttgaaattttctaaaagacatagtatttagtttataattaaatgcattcttgaagtccagtgtgaattttattaatgctatcatctcgaccaagctcaaagcctacttattagaaacaatgaagttcacaataggtcataaggtctcttccttttctaaaattgaaagacaagaaatttagtgccaatattgtacagacagaaattccatgtatgagtctcaacaaagactacctttggctaaatgtctagaagcagagaagtaaagtgagcaaaatccagtgttgaggagtcatgacagtactttgatctttatatactctgaagcatttcttcaaacttttctacttttatttgtcattgatacctgtagtaagttgacaatgtggtgaaatttcaaaattatatgtaacttctactagttttactttctcccccaagtcttttttaactcatgatttttacacacacaatccagaacttattatatagcctctaagtctttattcttcacagtagataatgaaagagtcctccagtgtcttggcaaaatgttctagtatagctggatacatacagtggagttctataaactcatacctcagtggacttaaccaaaattgtgttagtctcaattcctaccacactgagggagcctcccaaataactattttcttatctgcagtattcctccagaagagctaaccagggcagggctggcatgagaagtgacatctgcgttacaaagtctatcttcctcataagtctgtaaagagcaattgaatcttctagctttagcaaacctaagccaaaggaaggaaagccacgaagaatgcagaagtcaaaccctcatgacaaagtaggcacaagtctacaataagctaaatcagaatttacaaatacaagtgtcccaggtagcattgactcccgtcattggagtgaaatggatcaaagtttgaattaaggcctatggtaaggtaacattgctttgttgtacttttgaacaagagctcctcctgatcactattacatatttttctagaaaatctaaagttcagaagagaatgtatcactgctgacttttattccaatatttggatggagtaagttttagggtagaattttgttcagtttggatttaatcttttgaaaagtaaattccttgtttactggtttgactataattctctgttatctttacgaggtaaaactgcaagctgactagcatgttctgtgaatctgccattcctaaaaattttataaacacttgatacttttcactgataatggatcgctccaataaacatatattgtgaaaatgcatccacaataaatggaattccttcctgcaaaa

SEQ ID NO: 440418 - DNA, 4396 bp, Homo sapiens
ggtcgcctactactactaaattcgcggccgcgtcgacagggcagcagaggagaggcagaggataaaggaggaagagaaaagggcagcagaggagaggcagaggataaaagaggaagagaaaagggcagcagaggagaggcaaagggccagggcagaggaggaagagaaggctaaggtagaagagcagaaacgtaacaagcagctagaagagaaaaaacatgccatgcaagagacaaagataaaaggggaaaaggtagaacagaaaatagaagggaaatgggtaaatgaaaagaaagcacaagaagataaacttcagacagctgtcctaaagaaacagggagaagagaagggaactaaagtgcaagctaaaagagaaaagctccaagaagacaagcctaccttcaaaaaagaagagatcaaagatgaaaagattaaaaaggacaaagaacccaaagaagaagttaagagcttcatggatcgaaagaagggatttacagaagttaagtcgcagaatggagaattcatgacccacaaacttaaacatactgagaatactttcagccgccctggagggagggccagcgtggacaccaaggaggctgagggcgccccccaggtggaagccggcaaaaggctggaggagcttcgtcgtcgtcgcggggagaccgagagcgaagagttcgagaagctcaaacagaagcagcaggaggcggctttggagctggaggaactcaagaaaaagagggaggagagaaggaaggtcctggaggaggaagagcagaggaggaagcaggaggaagccgatcgaaaactcagagaggaggaagagaagaggaggctaaaggaagagattgaaaggcgaagagcagaagctgctgagaaacgccagaagatgccagaagatggcttgtcagatgacaagaaaccattcaagtgtttcactcctaaaggttcatctctcaagatagaagagcgagcagaatttttgaataagtctgtgcagaaaagcagtggtgtcaaatcgacccatcaagcagcaatagtctccaagattgacagcagactggagcagtataccagtgcaattgagggaacaaaaagcgcaaaacctacaaagccggcagcctcggatcttcctgttcctgctgaaggtgtacgcaacatcaagagtatgtgggagaaagggaatgtgttttcatcccccactgcagcaggcacaccaaataaggaaactgctggcttgaaggtaggggtttctagccgcatcaatgaatggctaactaaaaccccagatggaaacaagtcacctgctcccaaaccttctgacttgagaccaggagacgtatccagcaagcggaacctctgggaaaagcaatctgtggataaggtcacttcccccactaaggtttgagacagttccagaaagaacccaagctcaagacgcaggacgagctcagttgtagagggctaattcgctctgttttgtatttatgttgatttactaaattgggttcattatcttttatttttcaatatcccagtaaacccatgtatattatcactatatttaataatcacagtctagagatgttcatggtaaaagtactgcctttgcacaggagcctgtttctaaagaaacccatgctgtgaaatagagacttttctactgatcatcataactctgtatctgagcagtgataccaaccacatctgaagtcaacagaagatccaagtttaaaattgcctgcggaatgtgtgcagtatctagaaaaatgaaccgtagtttttgtttttttaaatacagaagtcatgttgtttctgcactttataataaagcatggaagaaattatcttagtaggcaattgtaacactttttgaaagtaacccatttcagatttgaaatactgcaataatggttgtctttaaaaaaaaaaaagaaatgtactgttaaggtattactttttttcatgctgatgattcatatctaaattacattattatgttagctgacagtggtactgattttttaggttggttgttttgtggatttctttagtagtgatagtagcctgaaccacattttagataactcaattatgtatgtatgtgcatacacatatacaaacacactaatggtagaatgcttttttatgtgctagactattatatttagtagtatgtcattgtaactagccaatatcacagcttttgaaaaattaaaaaatcacactatattaatatttcatatttgccaacagaaacatggcagataggtatcaatatgttttcaatgcctgatgacctataagaagaaagtattgaaaagaagagagattagaactgttagaaggagttgaaattttctaaaagacatagtatttagtttataattaaatgcattcttgaagtccagtgtgaattttattaatgctatcatctcgaccaagctcaaagcctacttattagaaacaatgaagttcacaataggtcataaggtctcttccttttctaaaattgaaagacaagaaatttagtgccaatattgtacagacagaaattccatgtatgagtctcaacaaagactacctttggctaaatgtctagaagcagagaagtaaagtgagcaaaatccagtgttgaggagtcatgacagtactttgatctttatatactctgaagcatttcttcaaacttttctacttttatttgtcattgatacctgtagtaagttgacaatgtggtgaaatttcaaaattatatgtaacttctactagttttactttctcccccaagtcttttttaactcatgatttttacacacacaatccagaacttattatatagcctctaagtctttattcttcacagtagataatgaaagagtcctccagtgtcttggcaaaatgttctagtatagctggatacatacagtggagttctataaactcatacctcagtggacttaaccaaaattgtgttagtctcaattcctaccacactgagggagcctcccaaataactattttcttatctgcagtattcctccagaagagctaaccagggcagggctggcatgagaagtgacatctgcgttacaaagtctatcttcctcataagtctgtaaagagcaattgaatcttctagctttagcaaacctaagccaaaggaaggaaagccacgaagaatgcagaagtcaaaccctcatgacaaagtaggcacaagtctacaataagctaaatcagaatttacaaatacaagtgtcccaggtagcattgactcccgtcattggagtgaaatggatcaaagtttgaattaaggcctatggtaaggtaacattgctttgttgtacttttgaacaagagctcctcctgatcactattacatatttttctagaaaatctaaagttcagaagagaatgtatcactgctgacttttattccaatatttggatggagtaagttttagggtagaattttgttcagtttggatttaatcttttgaaaagtaaattccttgtttactggtttgactataattctctgttatctttacgaggtaaaactgcaagctgactagcatgttctgtgaatctgccattcctaaaaattttataaacacttgatacttttcactgataatggatcgctccaataaacatatattgtgaaaatgcatccacaataaatggaattccttcctgcaaaatgtctttttctcacttatttttatgtacaatattgatagtgagaggtatgtctattataataaagattatggcacagtaaaacctgtaaaaaaaaaaaaaaaaaaaaaaaagaacaagaaaacgaaagaaaaacagaagagaagcagaaagaagaggaagcgaaaaggacgacagcccaaggcaagaaaaaagggagaacacaaaagacgcaggcgggtgggcgggggggcggggggcggaggaagaactaggagcgagcaagaaggcgggacgcggacggggggcgacgacaaaaggaggaaggagagcgaggagagtgacgaacagaaaaggaaagcggcggggtaggagagaaaggggagggacgacaccaaaagaaagagacgggcgggggagaaaagaggagggagagaaaagcgaaacacgaagaaggcgagaggcgagacagagagaaaagagagaagccaatacacagcgaacaaaaagaaagagaggaaaaataaagacagcacggcgagaggcgggcgcaaacaaggaggagaaagaaacagacagcagaagaacacacaacaacaaaaagggaggacagagacagaagagcgagaaaaccgacaaacacgagacaagcacaaaacaaaagaagaaacaaagagagaagagaagcacaggcgaaggcgacacaagacag

SEQ ID NO: 440419 - DNA, 3915 bp, Homo sapiens
  misc_feature (3900)..(3900): n is a, c, g, or t
ggtcgcctactactactaaattcgcggccgcgtcgacagggcagcagaggagaggcagaggataaaggaggaagagaaaagggcagcagaggagaggcagaggataaaagaggaagagaaaagggcagcagaggagaggcaaagggccagggcagaggaggaagagaaggctaaggtagaagagcagaaacgtaacaagcagctagaagagaaaaaacatgccatgcaagagacaaagataaaaggggaaaaggtagaacagaaaatagaagggaaatgggtaaatgaaaagaaagcacaagaagataaacttcagacagctgtcctaaagaaacagggagaagagaagggaactaaagtgcaagctaaaagagaaaagctccaagaagacaagcctaccttcaaaaaagaagagatcaaagatgaaaagattaaaaaggacaaagaacccaaagaagaagttaagagcttcatggatcgaaagaagggatttacagaagttaagtcgcagaatggagaattcatgacccacaaacttaaacatactgagaatactttcagccgccctggagggagggccagcgtggacaccaaggaggctgagggcgccccccaggtggaagccggcaaaaggctggaggagcttcgtcgtcgtcgcggggagaccgagagcgaagagttcgagaagctcaaacagaagcagcaggaggcggctttggagctggaggaactcaagaaaaagagggaggagagaaggaaggtcctggaggaggaagagcagaggaggaagcaggaggaagccgatcgaaaactcagagaggaggaagagaagaggaggctaaaggaagagattgaaaggcgaagagcagaagctgctgagaaacgccagaagatgccagaagatggcttgtcagatgacaagaaaccattcaagtgtttcactcctaaaggttcatctctcaagatagaagagcgagcagaatttttgaataagtctgtgcagaaaagcagtggtgtcaaatcgacccatcaagcagcaatagtctccaagattgacagcagactggagcagtataccagtgcaattgagggaacaaaaagcgcaaaacctacaaagccggcagcctcggatcttcctgttcctgctgaaggtgtacgcaacatcaagagtatgtgggagaaagggaatgtgttttcatcccccactgcagcaggcacaccaaataaggaaactgctggcttgaaggtaggggtttctagccgcatcaatgaatggctaactaaaaccccagatggaaacaagtcacctgctcccaaaccttctgacttgagaccaggagacgtatccagcaagcggaacctctgggaaaagcaatctgtggataaggtcacttcccccactaaggtttgagacagttccagaaagaacccaagctcaagacgcaggacgagctcagttgtagagggctaattcgctctgttttgtatttatgttgatttactaaattgggttcattatcttttatttttcaatatcccagtaaacccatgtatattatcactatatttaataatcacagtctagagatgttcatggtaaaagtactgcctttgcacaggagcctgtttctaaagaaacccatgctgtgaaatagagacttttctactgatcatcataactctgtatctgagcagtgataccaaccacatctgaagtcaacagaagatccaagtttaaaattgcctgcggaatgtgtgcagtatctagaaaaatgaaccgtagtttttgtttttttaaatacagaagtcatgttgtttctgcactttataataaagcatggaagaaattatcttagtaggcaattgtaacactttttgaaagtaacccatttcagatttgaaatactgcaataatggttgtctttaaaaaaaaaaaagaaatgtactgttaaggtattactttttttcatgctgatgattcatatctaaattacattattatgttagctgacagtggtactgattttttaggttggttgttttgtggatttctttagtagtgatagtagcctgaaccacattttagataactcaattatgtatgtatgtgcatacacatatacaaacacactaatggtagaatgcttttttatgtgctagactattatatttagtagtatgtcattgtaactagccaatatcacagcttttgaaaaattaaaaaatcacactatattaatatttcatatttgccaacagaaacatggcagataggtatcaatatgttttcaatgcctgatgacctataagaagaaagtattgaaaagaagagagattagaactgttagaaggagttgaaattttctaaaagacatagtatttagtttataattaaatgcattcttgaagtccagtgtgaattttattaatgctatcatctcgaccaagctcaaagcctacttattagaaacaatgaagttcacaataggtcataaggtctcttccttttctaaaattgaaagacaagaaatttagtgccaatattgtacagacagaaattccatgtatgagtctcaacaaagactacctttggctaaatgtctagaagcagagaagtaaagtgagcaaaatccagtgttgaggagtcatgacagtactttgatctttatatactctgaagcatttcttcaaacttttctacttttatttgtcattgatacctgtagtaagttgacaatgtggtgaaatttcaaaattatatgtaacttctactagttttactttctcccccaagtcttttttaactcatgatttttacacacacaatccagaacttattatatagcctctaagtctttattcttcacagtagataatgaaagagtcctccagtgtcttggcaaaatgttctagtatagctggatacatacagtggagttctataaactcatacctcagtggacttaaccaaaattgtgttagtctcaattcctaccacactgagggagcctcccaaataactattttcttatctgcagtattcctccagaagagctaaccagggcagggctggcatgagaagtgacatctgcgttacaaagtctatcttcctcataagtctgtaaagagcaattgaatcttctagctttagcaaacctaagccaaaggaaggaaagccacgaagaatgcagaagtcaaaccctcatgacaaagtaggcacaagtctacaataagctaaatcagaatttacaaatacaagtgtcccaggtagcattgactcccgtcattggagtgaaatggatcaaagtttgaattaaggcctatggtaaggtaacattgctttgttgtacttttgaacaagagctcctcctgatcactattacatatttttctagaaaatctaaagttcagaagagaatgtatcactgctgacttttattccaatatttggatggagtaagttttagggtagaattttgttcagtttggatttaatcttttgaaaagtaaattccttgtttactggtttgactataattctctgttatctttacgaggtaaaactgcaagctgactagcatgttctgtgaatctgccattcctaaaaattttataaaccgtttgatatcacgatatgatcgcataatttgtgaatgctcaataagatctctgcaaaaaaaaataagcggcaattctgggcagtgtcgtttgcaggctagaataaagcgcgttaatagaagctacctgggatcttgggaagaccctactcgtgttgcatatggacaactccctacgaattaagcctaggtaatatacatttcgtgttacgtgtaactagcgcatatgctggtgaagtcgctacggagtatgatttgaacattatcccggactattaaaagnaaaaccaaaaaaggc

SEQ ID NO: 440420 - DNA, 3627 bp, Homo sapiens
ggtcgcctactactactaaattcgcggccgcgtcgacagggcagcagaggagaggcagaggataaaggaggaagagaaaagggcagcagaggagaggcagaggataaaagaggaagagaaaagggcagcagaggagaggcaaagggccagggcagaggaggaagagaaggctaaggtagaagagcagaaacgtaacaagcagctagaagagaaaaaacatgccatgcaagagacaaagataaaaggggaaaaggtagaacagaaaatagaagggaaatgggtaaatgaaaagaaagcacaagaagataaacttcagacagctgtcctaaagaaacagggagaagagaagggaactaaagtgcaagctaaaagagaaaagctccaagaagacaagcctaccttcaaaaaagaagagatcaaagatgaaaagattaaaaaggacaaagaacccaaagaagaagttaagagcttcatggatcgaaagaagggatttacagaagttaagtcgcagaatggagaattcatgacccacaaacttaaacatactgagaatactttcagccgccctggagggagggccagcgtggacaccaaggaggctgagggcgccccccaggtggaagccggcaaaaggctggaggagcttcgtcgtcgtcgcggggagaccgagagcgaagagttcgagaagctcaaacagaagcagcaggaggcggctttggagctggaggaactcaagaaaaagagggaggagagaaggaaggtcctggaggaggaagagcagaggaggaagcaggaggaagccgatcgaaaactcagagaggaggaagagaagaggaggctaaaggaagagattgaaaggcgaagagcagaagctgctgagaaacgccagaagatgccagaagatggcttgtcagatgacaagaaaccattcaagtgtttcactcctaaaggttcatctctcaagatagaagagcgagcagaatttttgaataagtctgtgcagaaaagcagtggtgtcaaatcgacccatcaagcagcaatagtctccaagattgacagcagactggagcagtataccagtgcaattgagggaacaaaaagcgcaaaacctacaaagccggcagcctcggatcttcctgttcctgctgaaggtgtacgcaacatcaagagtatgtgggagaaagggaatgtgttttcatcccccactgcagcaggcacaccaaataaggaaactgctggcttgaaggtaggggtttctagccgcatcaatgaatggctaactaaaaccccagatggaaacaagtcacctgctcccaaaccttctgacttgagaccaggagacgtatccagcaagcggaacctctgggaaaagcaatctgtggataaggtcacttcccccactaaggtttgagacagttccagaaagaacccaagctcaagacgcaggacgagctcagttgtagagggctaattcgctctgttttgtatttatgttgatttactaaattgggttcattatcttttatttttcaatatcccagtaaacccatgtatattatcactatatttaataatcacagtctagagatgttcatggtaaaagtactgcctttgcacaggagcctgtttctaaagaaacccatgctgtgaaatagagacttttctactgatcatcataactctgtatctgagcagtgataccaaccacatctgaagtcaacagaagatccaagtttaaaattgcctgcggaatgtgtgcagtatctagaaaaatgaaccgtagtttttgtttttttaaatacagaagtcatgttgtttctgcactttataataaagcatggaagaaattatcttagtaggcaattgtaacactttttgaaagtaacccatttcagatttgaaatactgcaataatggttgtctttaaaaaaaaaaaagaaatgtactgttaaggtattactttttttcatgctgatgattcatatctaaattacattattatgttagctgacagtggtactgattttttaggttggttgttttgtggatttctttagtagtgatagtagcctgaaccacattttagataactcaattatgtatgtatgtgcatacacatatacaaacacactaatggtagaatgcttttttatgtgctagactattatatttagtagtatgtcattgtaactagccaatatcacagcttttgaaaaattaaaaaatcacactatattaatatttcatatttgccaacagaaacatggcagataggtatcaatatgttttcaatgcctgatgacctataagaagaaagtattgaaaagaagagagattagaactgttagaaggagttgaaattttctaaaagacatagtatttagtttataattaaatgcattcttgaagtccagtgtgaattttattaatgctatcatctcgaccaagctcaaagcctacttattagaaacaatgaagttcacaataggtcataaggtctcttccttttctaaaattgaaagacaagaaatttagtgccaatattgtacagacagaaattccatgtatgagtctcaacaaagactacctttggctaaatgtctagaagcagagaagtaaagtgagcaaaatccagtgttgaggagtcatgacagtactttgatctttatatactctgaagcatttcttcaaacttttctacttttatttgtcattgatacctgtagtaagttgacaatgtggtgaaatttcaaaattatatgtaacttctactagttttactttctcccccaagtcttttttaactcatgatttttacacacacaatccagaacttattatatagcctctaagtctttattcttcacagtagataatgaaagagtcctccagtgtcttggcaaaatgttctagtatagctggatacatacagtggagttctataaactcatacctcagtggacttaaccaaaattgtgttagtctcaattcctaccacactgagggagcctcccaaataactattttcttatctgcagtattcctccagaagagctaaccagggcagggctggcatgagaagtgacatctgcgttacaaagtctatcttcctcataagtctgtaaagagcaattgaatcttctagctttagcaaacctaagccaaaggaaggaaagccacgaagaatgcagaagtcaaaccctcatgacaaagtaggcacaagtctacaataagctaaatcagaatttacaaatacaagtgtcccaggtagcattgactcccgtcattggagtgaaatggatcaaagtttgaattaaggcctatggtaaggtaacattgctttgttgtacttttgaacaagagctcctcctgccccaagtcttatattaactcatgatttctacacacacaatccagaagtttttatatagcctctaagtcttaattcttcatagtagataatgaaagagtcctccagggtcatggcgaaatgtactagtatagctggatacatacaggtggagtgctataaactcatacctcagtggacttaaccaaagattgtgttagtctcaattcctaccacactgagggagcctcccaaataactattttcttatctgcagt

SEQ ID NO: 440421 - DNA, 2340 bp, Homo sapiens
ggtcgcctactactactaaattcgcggccgcgtcgacagggcagcagaggagaggcagaggataaaggaggaagagaaaagggcagcagaggagaggcagaggataaaagaggaagagaaaagggcagcagaggagaggcaaagggccagggcagaggaggaagagaaggctaaggtagaagagcagaaacgtaacaagcagctagaagagaaaaaacatgccatgcaagagacaaagataaaaggggaaaaggtagaacagaaaatagaagggaaatgggtaaatgaaaagaaagcacaagaagataaacttcagacagctgtcctaaagaaacagggagaagagaagggaactaaagtgcaagctaaaagagaaaagctccaagaagacaagcctaccttcaaaaaagaagagatcaaagatgaaaagattaaaaaggacaaagaacccaaagaagaagttaagagcttcatggatcgaaagaagggatttacagaagttaagtcgcagaatggagaattcatgacccacaaacttaaacatactgagaatactttcagccgccctggagggagggccagcgtggacaccaaggaggctgagggcgccccccaggtggaagccggcaaaaggctggaggagcttcgtcgtcgtcgcggggagaccgagagcgaagagttcgagaagctcaaacagaagcagcaggaggcggctttggagctggaggaactcaagaaaaagagggaggagagaaggaaggtcctggaggaggaagagcagaggaggaagcaggaggaagccgatcgaaaactcagagaggaggaagagaagaggaggctaaaggaagagattgaaaggcgaagagcagaagctgctgagaaacgccagaagatgccagaagatggcttgtcagatgacaagaaaccattcaagtgtttcactcctaaaggttcatctctcaagatagaagagcgagcagaatttttgaataagtctgtgcagaaaagcagtggtgtcaaatcgacccatcaagcagcaatagtctccaagattgacagcagactggagcagtataccagtgcaattgagggaacaaaaagcgcaaaacctacaaagccggcagcctcggatcttcctgttcctgctgaaggtgtacgcaacatcaagagtatgtgggagaaagggaatgtgttttcatcccccactgcagcaggcacaccaaataaggaaactgctggcttgaaggtaggggtttctagccgcatcaatgaatggctaactaaaaccccagatggaaacaagtcacctgctcccaaaccttctgacttgagaccaggagacgtatccagcaagcggaacctctgggaaaagcaatctgtggataaggtcacttcccccactaaggtttgagacagttccagaaagaacccaagctcaagacgcaggacgagctcagttgtagagggctaattcgctctgttttgtatttatgttgatttactaaattgggttcattatcttttatttttcaatatcccagtaaacccatgtatattatcactatatttaataatcacagtctagagatgttcatggtaaaagtactgcctttgcacaggagcctgtttctaaagaaacccatgctgtgaaatagagacttttctactgatcatcataactctgtatctgagcagtgataccaaccacatctgaagtcaacagaagatccaagtttaaaattgcctgcggaatgtgtgcagtatctagaaaaatgaaccgtagtttttgtttttttaaatacagaagtcatgttgtttctgcactttataataaagcatggaagaaattatcttagtaggcaattgtaacactttttgaaagtaacccatttcagatttgaaatactgcaataatggttgtctttaaaaaaaaaaatctaaattacattattatgttagctgacagtggtactgattttttaggttggttgttttgtggatttctttagtagtgatagtagcctgaaccacattttagataactcactctcgctgcacgtccactcccctctcccctcccctccaggcccaccgctctctacgttgctcaccactcactcacccctttcccctctccctcgctcccatctcccctttccatcccctcccacccccactctcccactcctccctatctcctccctctcccctcacacccccctccacatcctccctctcctctcgccttctcatccgccctctctccctcctccctgcttccccaccttcccctcccctgcttctccccaccttccccactcgtcccttcctccctccccc

SEQ ID NO: 440422 - DNA, 911 bp, Homo sapiens
ggtcgcctactactactaaattcgcggccgcgtcgacagggcagcagaggagaggcagaggataaaggaggaagagaaaagggcagcagaggagaggcagaggataaaagaggaagagaaaagggcagcagaggagaggcaaagggccagggcagaggaggaagagaaggctaaggtagaagagcagaaacgtaacaagcagctagaagagaaaaaacatgccatgcaagagacaaagataaaaggggaaaaggtagaacagaaaatagaagggaaatgggtaaatgaaaagaaagcacaagaagataaacttcagacagctgtcctaaagaaacaggtacagtaaacattttgcaccaaatgtgtgatgcctgtgacttgtgagaaatgtaatgcacatctgatttgggactgaggccacatgcatatagctcacatgcttgatcatttggcaagctgttcattttttcaggccatagcgatacacaagcatgcagcaattgattgatggctgaatattcaatcaaccaaatttactgggacagccagtaaatttggctgtccagaagacagagagaaattaattgctctgtgcttgattgttatgaatacccaaaaaaagaattaatccaaagatgataaatgtggtggtggtgtgttggcttctgattctgcgcttgcatctaaactcgttcttttaattatctttcctctatccataggtctgcatgaggcaagaggcccataactccttacctcactcatgggtttgacgttgaattaaaaaaatgataaaagctggggtgggaaagagacatgaagaataatggtcagacatttcatcttaagaaggcaaaaacaggctgggtacagtggctcacacctgtaatcccagcactttgggaggctga

SEQ ID NO: 440423 - DNA, 3550 bp, Homo sapiens
gcagagtgttgctgtgtgtgcttgtgatttgtattttatttgatgtaaacgtgaaggcagagtattttctaacactgtaattcaactaggttttgtgtctcctggatctatttttttttcttgttgttctgaggagctgatatacttggaaatattaggtttaagatatgcagatgtccaacttatatacatagtcaagggtttagagtctggagacaggaggctggcaatttcaactagggggcagcaagaagcgaaaccctggccttaaaattccaaaagaagcatttgaacaacctcagaccagttccacaccacctcgagatttagactccaaggcttgcatttctattggaaatcagaactttgaggtgaaggcagatgacctggagcctataatggaactgggacgaggtgcgtacggggtggtggagaagatgcggcacgtgcccagcgggcagatcatggcagtgaagcggatccgagccacagtaaatagccaggaacagaaacggctactgatggatttggatatttccatgaggacggtggactgtccattcactgtcaccttttatggcgcactgtttcgggagggtgatgtgtggatctgcatggagctcatggatacatcactagataaattctacaaacaagttattgataaaggccagacaattccagaggacatcttagggaaaatagcagtttctattgtaaaagcattagaacatttacatagtaagctgtctgtcattcacagagacgtcaagccttctaatgtactcatcaatgctctcggtcaagtgaagatgtgcgattttggaatcagtggctacttggtggactctgttgctaaaacaattgatgcaggttgcaaaccatacatggcccctgaaagaataaacccagagctcaaccagaagggatacagtgtgaagtctgacatttggagtctgggcatcacgatgattgagttggccatccttcgatttccctatgattcatggggaactccatttcagcagctcaaacaggtggtagaggagccatcgccacaactcccagcagacaagttctctgcagagtttgttgactttacctcacagtgcttaaagaagaattccaaagaacggcctacatacccagagctaatgcaacatccatttttcaccctacatgaatccaaaggaacagatgtggcatcttttgtaaaactgattcttggagactaaaaagcagtggacttaatcggttgaccctactgtggattggtgggtttcggggtgaagcaagttcactacagcatcaatagaaagtcatctttgagataatttaaccctgcctctcagagggttttctctcccaattttctttttactccccctcttaagggggccttggaatctatagtatagaatgaactgtctagatggatgaattatgataaaggcttaggacttcaaaaggtgattaaatatttaatgatgtgtcatatgagtcctcaagcttctcagacttctcttattctttacaaaatgaatgcattggccctgacaaaaaggtgctacggtagtgatgaaattataagtagatttgtagtttgtcccatttattattttaatatttatgtttaagtgcttggttgaaaagattccattttatacaagaagggagattcaaaaaaaaaatataaggttgggttagcaatatttatagggcttttattttttaagttcaattgtgtctgtggtccagaagaaattatttaatatgcatctttgagaatattataaaaatatcaaaaaggagctcttcttgtgaaatgtctgttccagctgttgtgactgctgccatttttggaaacatctgcccaatcctgggtgatcaccacatcttttaggggaagtgacaagatgctctggtcatactctttttcccaactttggaaaacataaaaatcactcatataacagctcaaagagtaaaacatttggttcttctgacacttgtggtatagtattagtggaaagtgatttgtaatatgattttatatccacctacctattcatctacctgtgtgtatgtgtgtgtttgtgtgtctatttggcaattcacaagtcctgccaagtggtttctatgagcatctctgtttggtaaggaggacaattgtcagttttgagggggacatgtgttaaatcacagaaaaaaatggtgccttcttctgcgtttgtccctcctgccatgtgtaagttgtaaggattgcctttgtagttaatgtactctttggctttgtttgtttgttttcttcttcagtgaagcagccttactattcatagaagggctagaataggagaaaatgaaaggtagtgagtaattctttgataagatgaggaaataatgggaaaggttgaattaattcctgggcatggactaccagatgaccacaagttgcgttgaggccgcatctttcttcagcagcgtgcaatagctggctcctctataggagatgagcttcattgggagttcctagcaagttgactaaacagcaaaagttctttctcgtgggtaaatatacccacaggttctatgatttgtagctctaggtttcttgatgatcaaggagtgaagtaattgacagggaaaatatagacctatgataaataaccaggaagcattgcttttggacaaggaagaacagagggttttgattttaaaaagaagaaaaaaaaaccttattttttctttcttggcctcaagttcaatatggagaggattgcttccctgaatcctctcttccttccccttttagattttgaagtgcaatcatatgtttttctctgtttgcattttttcctccttgttcttgacaaggaggagttgctcctgcccagaatgagcgtgacacttccgaacacttcttcatattcagttccaagatatatctgcttgattaaacatgagcttcctctgctctgaagctacctctgtcctcattttattctagccagaaaaggagtatcaccctagtgattatggctgttcactttcccatctatcttcctaaatctggaagttcttctcttggagatcaagagaaaaattacaattgtattccttactttattcacccacctatgaaaacaggaagcaataggaaaaaaaatccggttactccattttagcttttggtgaacgatgtagagcaaattgtctctctggtctaggtccgattactcttacctgtttttccactttgagacattctaaacagaatgtgtaacttctcatatgtatgcctctcccatctgtgaacctaggccaaagttgcaaaaacaatcatattaatagtagagtagagaaaaagttagtctatggttctcaaccctcgtgtacattggaaccatctgggagctgtgaacactgtcgctgccaatgttccagccaccagagatttggatttaactggtggggcctaggaattggtgtttttttgttttgttttgttttttacacaccttcatgtgattctgatgtgaagctgggttca

SEQ ID NO: 440424 - DNA, 540 bp, Homo sapiens
agaagaggaaagtccaaagaataggagggctgtgttttcaataccacttttaaaagctgaattatgttttagtgttctacaggttctgaaaatccttgtctaatgaaaatatatatggcttctagattttaatgattatttttttttctttaagcttaaagaagaattccaaagaacggcctacatacccagagctaatgcaacatccatttttcaccctacatgaatccaaaggaacagatgtggcatcttttgtaaaactgattcttggagactaaaaagcagtggacttaatcggttgaccctactgtggattggtgggtttcggggtgaagcaagttcactacagcatcaatagaaagtcatctttgagataatttaaccctgcctctcagagggttttctctcccaattttctttttactccccctcttaagggggccttggaatctatagtatagaatgaactgtctagatggatgaattatgataaaggcttaggacttcaaaaggtgattaaatatttaatgatgtgtcata

SEQ ID NO: 440425 - DNA, 728 bp, Homo sapiens
gacttctgttaggttttcctctgctggtcttccttgcagcctcgaaaacctcaccagagtcgcctctgctggtctcttactgtgctgctctgtcagagatgggcaagcaagaagcgaaaccctggccttaaaattccaaaagaagcatttgaacaacctcagaccagttccacaccacctcgagatttagactccaaggcttgcatttctattggaaatcagaactttgaggtgaaggcagatgacctggagcctataatggaactgggacgaggtgcgtacggggtggtggagaagatgcggcacgtgcccagcgggcagatcatggcagtgaagcggatccgagccacagtaaatagccaggaacagaaacggctactgatggatttggatatttccatgaggacggtggactgtccattcactgtcaccttttatggcgcactgtttcgggagggtgatgtgtggatctgcatggagctcatggatacatcactagataaattctacaaacaagttattgataaaggccagacaattccagaggacatcttagggaaaatagcagtttctattgtaaaagcattagaacatttacatagtaagctgtctgtcattcacagaggtaagcatccatgagctgccttggctgttcctttgataaagttcatctctttcacctggagtccgtctctacccccagtcccccatgggtggaagtagaattg

SEQ ID NO: 440426 - DNA, 1811 bp, Homo sapiens
ttccaagtttggagcttttagctgccagccctggcccatcatgtagctgcagcacagccttccctaacgttgcaactgggggaaaaatcactttccagtctgttttgcaaggtgtgcatttccatcttgattccctgaaagtccatctgctgcatcggtcaagagaaactccacttgcatgaagattgcacgcctgcagcttgcatctttgttgcaaaactagctacagaagagaagcaaggcaaagtcttttgtgctcccctcccccatcaaaggaaaggggaaaatgtctcagtcgaaaggcaagaagcgaaaccctggccttaaaattccaaaagaagcatttgaacaacctcagaccagttccacaccacctcgagatttagactccaaggcttgcatttctattggaaatcagaactttgaggtgaaggcagatgacctggagcctataatggaactgggacgaggtgcgtacggggtggtggagaagatgcggcacgtgcccagcgggcagatcatggcagtgaagcggatccgagccacagtaaatagccaggaacagaaacggctactgatggatttggatatttccatgaggacggtggactgtccattcactgtcaccttttatggcgcactgtttcgggagggtgatgtgtggatctgcatggagctcatggatacatcactagataaattctacaaacaagttattgataaaggccagacaattccagaggacatcttagggaaaatagcagtttctattgtaaaagcattagaacatttacatagtaagctgtctgtcattcacagagacgtcaagccttctaatgtactcatcaatgctctcggtcaagtgaagatgtgcgattttggaatcagtggctacttggtggactctgttgctaaaacaattgatgcaggttgcaaaccatacatggcccctgaaagaataaacccagagctcaaccagaagggatacagtgtgaagtctgacatttggagtctgggcatcacgatgattgagttggccatccttcgatttccctatgattcatggggaactccatttcagcagctcaaacaggtggtagaggagccatcgccacaactcccagcagacaagttctctgcagagtttgttgactttacctcacagtgcttaaagaagaattccaaagaacggcctacatacccagagctaatgcaacatccatttttcaccctacatgaatccaaaggaacagatgtggcatcttttgtaaaactgattcttggagactaaaaagcagtggacttaatcggttgaccctactgtggattggtgggtttcggggtgaagcaagttcactacagcatcaatagaaagtcatctttgagataatttaaccctgcctctcagagggttttctctcccaattttctttttactccccctcttaagggggccttggaatctatagtatagaatgaactgtctagatggatgaattatgataaaggcttaggacttcaaaaggtgattaaatatttaatgatgtgtcataaaaaaaacaaatccaccagcacacaagtgttggggcccctgggcccctgaaaaaagttttgaaaaccctggtgggggccggggccccaggggggcagagcgaacatgtgccaaaacaggccccaagaagaaaccgggcaacgaccacgcgcgggatctctcccgagtaaaaagacgccgggggacaacgggcgctggaacacccagaggagtctgagacacaagggactacacccgggagcacgggaggcgaatagac

SEQ ID NO: 440427 - DNA, 2977 bp, Homo sapiens
cttatctcccaattttctttttactccccctcttaagggggccttggaatctatagtatagaatgaactgtctagatggatgaattattgataaaggccagacaattccagaggacatcttagggaaaatagcagtttctattgtaaaagcattagaacatttacatagtaagctgtctgtcattcacagagacgtcaagccttctaatgtactcatcaatgctctcggtcaagtgaagatgtgcgattttggaatcagtggctacttggtggactctgttgctaaaacaattgatgcaggttgcaaaccatacatggcccctgaaagaataaacccagagctcaaccagaagggatacagtgtgaagtctgacatttggagtctgggcatcacgatgattgagttggccatccttcgatttccctatgattcatggggaactccatttcagcagctcaaacaggtggtagaggagccatcgccacaactcccagcagacaagttctctgcagagtttgttgactttacctcacagtgcttaaagaagaattccaaagaacggcctacatacccagagctaatgcaacatccatttttcaccctacatgaatccaaaggaacagatgtggcatcttttgtaaaactgattcttggagactaaaaagcagtggacttaatcggttgaccctactgtggattggtgggtttcggggtgaagcaagttcactacagcatcaatagaaagtcatctttgagataatttaaccctgcctctcagagggttttctctcccaattttctttttactccccctcttaagggggccttggaatctatagtatagaatgaactgtctagatggatgaattatgataaaggcttaggacttcaaaaggtgattaaatatttaatgatgtgtcatatgagtcctcaagcttctcagacttctcttattctttacaaaatgaatgcattggccctgacaaaaaggtgctacggtagtgatgaaattataagtagatttgtagtttgtcccatttattattttaatatttatgtttaagtgcttggttgaaaagattccattttatacaagaagggagattcaaaaaaaaaatataaggttgggttagcaatatttatagggcttttattttttaagttcaattgtgtctgtggtccagaagaaattatttaatatgcatctttgagaatattataaaaatatcaaaaaggagctcttcttgtgaaatgtctgttccagctgttgtgactgctgccatttttggaaacatctgcccaatcctgggtgatcaccacatcttttaggggaagtgacaagatgctctggtcatactctttttcccaactttggaaaacataaaaatcactcatataacagctcaaagagtaaaacatttggttcttctgacacttgtggtatagtattagtggaaagtgatttgtaatatgattttatatccacctacctattcatctacctgtgtgtatgtgtgtgtttgtgtgtctatttggcaattcacaagtcctgccaagtggtttctatgagcatctctgtttggtaaggaggacaattgtcagttttgagggggacatgtgttaaatcacagaaaaaaatggtgccttcttctgcgtttgtccctcctgccatgtgtaagttgtaaggattgcctttgtagttaatgtactctttggctttgtttgtttgttttcttcttcagtgaagcagccttactattcatagaagggctagaataggagaaaatgaaaggtagtgagtaattctttgataagatgaggaaataatgggaaaggttgaattaattcctgggcatggactaccagatgaccacaagttgcgttgaggccgcatctttcttcagcagcgtgcaatagctggctcctctataggagatgagcttcattgggagttcctagcaagttgactaaacagcaaaagttctttctcgtgggtaaatatacccacaggttctatgatttgtagctctaggtttcttgatgatcaaggagtgaagtaattgacagggaaaatatagacctatgataaataaccaggaagcattgcttttggacaaggaagaacagagggttttgattttaaaaagaagaaaaaaaaaccttattttttctttcttggcctcaagttcaatatggagaggattgcttccctgaatcctctcttccttccccttttagattttgaagtgcaatcatatgtttttctctgtttgcattttttcctccttgttcttgacaaggaggagttgctcctgcccagaatgagcgtgacacttccgaacacttcttcatattcagttccaagatatatctgcttgattaaacatgagcttcctctgctctgaagctacctctgtcctcattttattctagccagaaaaggagtatcaccctagtgattatggctgttcactttcccatctatcttcctaaatctggaagttcttctcttggagatcaagagaaaaattacaattgtattccttactttattcacccacctatgaaaacaggaagcaataggaaaaaaaatccggttactccattttagcttttggtgaacgatgtagagcaaattgtctctctggtctaggtccgattactcttacctgtttttccactttgagacattctaaacagaatgtgtaacttctcatatgtatgcctctcccatctgtgaacctaggccaaagttgcaaaaacaatcatattaatagtagagtagagaaaaagttagtctatggttctcaaccctcgtgtacattggaaccatctgggagctgtgaacactgtcgctgccaatgttccagccaccagagatttggatttaactggtggggcctaggaattggtgtttttttgttttgttttgttttttacacaccttcatgtgattctgatgtgaagctgggttca

SEQ ID NO: 440428 - DNA, 367 bp, Homo sapiens
tggtaacctaaagccaaggataataaaccttgatatacttaacattcaatttctttccagcaatgtgataaataaatctatcttgtgtttctcttgcagattgtaaaagcattagaacatttacatagtaagctgtctgtcattcacagaggtaagcatccatgagctgccttggctgttcctttgataaagttcatctctttcacctggagtccgtctctacccccagtcccccatgggtggaagtagaattgactcaggcaagagaactaaggggctttcctttgagattggatagcaaaccatataagtagtattccttatcatggctgaggacataagaagaagacgtgatctttgtcttaca

SEQ ID NO: 440429 - DNA, 3606 bp, Homo sapiens
ttccaagtttggagcttttagctgccagccctggcccatcatgtagctgcagcacagccttccctaacgttgcaactgggggaaaaatcactttccagtctgttttgcaaggtgtgcatttccatcttgattccctgaaagtccatctgctgcatcggtcaagagaaactccacttgcatgaagattgcacgcctgcagcttgcatctttgttgcaaaactagctacagaagagaagcaaggcaaagtcttttgtgctcccctcccccatcaaaggaaaggggaaaatgtctcagtcgaaaggcaagaagcgaaaccctggccttaaaattccaaaagaagcatttgaacaacctcagaccagttccacaccacctcgagatttagactccaaggcttgcatttctattggaaatcagaactttgaggtgaaggcagatgacctggagcctataatggaactgggacgaggtgcgtacggggtggtggagaagatgcggcacgtgcccagcgggcagatcatggcagtgaagcggatccgagccacagtaaatagccaggaacagaaacggctactgatggatttggatatttccatgaggacggtggactgtccattcactgtcaccttttatggcgcactgtttcgggagggtgatgtgtggatctgcatggagctcatggatacatcactagataaattctacaaacaagttattgataaaggccagacaattccagaggacatcttagggaaaatagcagtttctattgtaaaagcattagaacatttacatagtaagctgtctgtcattcacagagacgtcaagccttctaatgtactcatcaatgctctcggtcaagtgaagatgtgcgattttggaatcagtggctacttggtggactctgttgctaaaacaattgatgcaggttgcaaaccatacatggcccctgaaagaataaacccagagctcaaccagaagggatacagtgtgaagtctgacatttggagtctgggcatcacgatgattgagttggccatccttcgatttccctatgattcatggggaactccatttcagcagctcaaacaggtggtagaggagccatcgccacaactcccagcagacaagttctctgcagagtttgttgactttacctcacagtgcttaaagaagaattccaaagaacggcctacatacccagagctaatgcaacatccatttttcaccctacatgaatccaaaggaacagatgtggcatcttttgtaaaactgattcttggagactaaaaagcagtggacttaatcggttgaccctactgtggattggtgggtttcggggtgaagcaagttcactacagcatcaatagaaagtcatctttgagataatttaaccctgcctctcagagggttttctctcccaattttctttttactccccctcttaagggggccttggaatctatagtatagaatgaactgtctagatggatgaattatgataaaggcttaggacttcaaaaggtgattaaatatttaatgatgtgtcatatgagtcctcaagcttctcagacttctcttattctttacaaaatgaatgcattggccctgacaaaaaggtgctacggtagtgatgaaattataagtagatttgtagtttgtcccatttattattttaatatttatgtttaagtgcttggttgaaaagattccattttatacaagaagggagattcaaaaaaaaaatataaggttgggttagcaatatttatagggcttttattttttaagttcaattgtgtctgtggtccagaagaaattatttaatatgcatctttgagaatattataaaaatatcaaaaaggagctcttcttgtgaaatgtctgttccagctgttgtgactgctgccatttttggaaacatctgcccaatcctgggtgatcaccacatcttttaggggaagtgacaagatgctctggtcatactctttttcccaactttggaaaacataaaaatcactcatataacagctcaaagagtaaaacatttggttcttctgacacttgtggtatagtattagtggaaagtgatttgtaatatgattttatatccacctacctattcatctacctgtgtgtatgtgtgtgtttgtgtgtctatttggcaattcacaagtcctgccaagtggtttctatgagcatctctgtttggtaaggaggacaattgtcagttttgagggggacatgtgttaaatcacagaaaaaaatggtgccttcttctgcgtttgtccctcctgccatgtgtaagttgtaaggattgcctttgtagttaatgtactctttggctttgtttgtttgttttcttcttcagtgaagcagccttactattcatagaagggctagaataggagaaaatgaaaggtagtgagtaattctttgataagatgaggaaataatgggaaaggttgaattaattcctgggcatggactaccagatgaccacaagttgcgttgaggccgcatctttcttcagcagcgtgcaatagctggctcctctataggagatgagcttcattgggagttcctagcaagttgactaaacagcaaaagttctttctcgtgggtaaatatacccacaggttctatgatttgtagctctaggtttcttgatgatcaaggagtgaagtaattgacagggaaaatatagacctatgataaataaccaggaagcattgcttttggacaaggaagaacagagggttttgattttaaaaagaagaaaaaaaaaccttattttttctttcttggcctcaagttcaatatggagaggattgcttccctgaatcctctcttccttccccttttagattttgaagtgcaatcatatgtttttctctgtttgcattttttcctccttgttcttgacaaggaggagttgctcctgcccagaatgagcgtgacacttccgaacacttcttcatattcagttccaagatatatctgcttgattaaacatgagcttcctctgctctgaagctacctctgtcctcattttattctagccagaaaaggagtatcaccctagtgattatggctgttcactttcccatctatcttcctaaatctggaagttcttctcttggagatcaagagaaaaattacaattgtattccttactttattcacccacctatgaaaacaggaagcaataggaaaaaaaatccggttactccattttagcttttggtgaacgatgtagagcaaattgtctctctggtctaggtccgattactcttacctgtttttccactttgagacattctaaacagaatgtgtaacttctcatatgtatgcctctcccatctgtgaacctaggccaaagttgcaaaaacaatcatattaatagtagagtagagaaaaagttagtctatggttctcaaccctcgtgtacattggaaccatctgggagctgtgaacactgtcgctgccaatgttccagccaccagagatttggatttaactggtggggcctaggaattggtgtttttttgttttgttttgttttttacacaccttcatgtgattctgatgtgaagctgggttca

SEQ ID NO: 440430 - DNA, 1512 bp, Homo sapiens
tagaattcagcggccgctgaattctaggttgcaactgggggaaaaatcactttccagtctgttttgcaaggtgtgcatttccatcttgattccctgaaagtccatctgctgcatcggtcaagagaaactccacttgcatgaagattgcacgcctgcagcttgcatctttgttgcaaaactagctacagaagagaagcaaggcaaagtcttttgtgctcccctcccccatcaaaggaaaggggaaaatgtctcagtcgaaaggcaagaagcgaaaccctggccttaaaattccaaaagaagcatttgaacaacctcagaccagttccacaccacctcgagatttagactccaaggcttgcatttctattggaaatcagaactttgaggtgaaggcagatgacctggagcctataatggaactgggacgaggtgcgtacggggtggtggagaagatgcggcacgtgcccagcgggcagatcatggcagtgaagcggatccgagccacagtaaatagccaggaacagaaacggctactgatggatttggatatttccatgaggacggtggactgtccattcactgtcaccttttatggcgcactgtttcgggagggtgatgtgtggatctgcatggagctcatggatacatcactagataaattctacaaacaagttattgataaaggccagacaattccagaggacatcttagggaaaatagcagtttctattgtaaaagcattagaacatttacatagtaagctgtctgtcattcacagagacgtcaagccttctaatgtactcatcaatgctctcggtcaagtgaagatgtgcgattttggaatcagtggctacttggtggactctgttgctaaaacaattgatgcaggttgcaaaccatacatggcccctgaaagaataaacccagagctcaaccagaagggatacagtgtgaagtctgacatttggagtctgggcatcacgatgattgagttggccatccttcgatttccctatgattcatggggaactccatttcagcagctcaaacaggtggtagaggagccatcgccacaactcccagcagacaagttctctgcagagtttgttgactttacctcacagtgcttaaagaagaattccaaagaacggcctacatacccagagctaatgcaacatccatttttcaccctacatgaatccaaaggaacagatgtggcatcttttgtaaaactgattcttggagactaaaaagcagtggacttaatcggttgaccctactgtggattggtgggtttcggggtgaagcaagttcactacagcatcaatagaaagtcatctttgagataatttaaccctgcctctcagagggttttctctcccaattttctttttactccccctcttaagggggccttggaatctatagtatagaatgaactgtctagatggatgaattatgataaaggcttaggacttcaaaaggtgattaaatatttaatgatgtgtcata

SEQ ID NO: 440431 - DNA, 3410 bp, Homo sapiens
gacttctgttaggttttcctctgctggtcttccttgcagcctcgaaaacctcaccagagtcgcctctgctggtctcttactgtgctgctctgtcagagatgggcaagcaagaagcgaaaccctggccttaaaattccaaaagaagcatttgaacaacctcagaccagttccacaccacctcgagatttagactccaaggcttgcatttctattggaaatcagaactttgaggtgaaggcagatgacctggagcctataatggaactgggacgaggtgcgtacggggtggtggagaagatgcggcacgtgcccagcgggcagatcatggcagtgaagcggatccgagccacagtaaatagccaggaacagaaacggctactgatggatttggatatttccatgaggacggtggactgtccattcactgtcaccttttatggcgcactgtttcgggagggtgatgtgtggatctgcatggagctcatggatacatcactagataaattctacaaacaagttattgataaaggccagacaattccagaggacatcttagggaaaatagcagtttctattgtaaaagcattagaacatttacatagtaagctgtctgtcattcacagagacgtcaagccttctaatgtactcatcaatgctctcggtcaagtgaagatgtgcgattttggaatcagtggctacttggtggactctgttgctaaaacaattgatgcaggttgcaaaccatacatggcccctgaaagaataaacccagagctcaaccagaagggatacagtgtgaagtctgacatttggagtctgggcatcacgatgattgagttggccatccttcgatttccctatgattcatggggaactccatttcagcagctcaaacaggtggtagaggagccatcgccacaactcccagcagacaagttctctgcagagtttgttgactttacctcacagtgcttaaagaagaattccaaagaacggcctacatacccagagctaatgcaacatccatttttcaccctacatgaatccaaaggaacagatgtggcatcttttgtaaaactgattcttggagactaaaaagcagtggacttaatcggttgaccctactgtggattggtgggtttcggggtgaagcaagttcactacagcatcaatagaaagtcatctttgagataatttaaccctgcctctcagagggttttctctcccaattttctttttactccccctcttaagggggccttggaatctatagtatagaatgaactgtctagatggatgaattatgataaaggcttaggacttcaaaaggtgattaaatatttaatgatgtgtcatatgagtcctcaagcttctcagacttctcttattctttacaaaatgaatgcattggccctgacaaaaaggtgctacggtagtgatgaaattataagtagatttgtagtttgtcccatttattattttaatatttatgtttaagtgcttggttgaaaagattccattttatacaagaagggagattcaaaaaaaaaatataaggttgggttagcaatatttatagggcttttattttttaagttcaattgtgtctgtggtccagaagaaattatttaatatgcatctttgagaatattataaaaatatcaaaaaggagctcttcttgtgaaatgtctgttccagctgttgtgactgctgccatttttggaaacatctgcccaatcctgggtgatcaccacatcttttaggggaagtgacaagatgctctggtcatactctttttcccaactttggaaaacataaaaatcactcatataacagctcaaagagtaaaacatttggttcttctgacacttgtggtatagtattagtggaaagtgatttgtaatatgattttatatccacctacctattcatctacctgtgtgtatgtgtgtgtttgtgtgtctatttggcaattcacaagtcctgccaagtggtttctatgagcatctctgtttggtaaggaggacaattgtcagttttgagggggacatgtgttaaatcacagaaaaaaatggtgccttcttctgcgtttgtccctcctgccatgtgtaagttgtaaggattgcctttgtagttaatgtactctttggctttgtttgtttgttttcttcttcagtgaagcagccttactattcatagaagggctagaataggagaaaatgaaaggtagtgagtaattctttgataagatgaggaaataatgggaaaggttgaattaattcctgggcatggactaccagatgaccacaagttgcgttgaggccgcatctttcttcagcagcgtgcaatagctggctcctctataggagatgagcttcattgggagttcctagcaagttgactaaacagcaaaagttctttctcgtgggtaaatatacccacaggttctatgatttgtagctctaggtttcttgatgatcaaggagtgaagtaattgacagggaaaatatagacctatgataaataaccaggaagcattgcttttggacaaggaagaacagagggttttgattttaaaaagaagaaaaaaaaaccttattttttctttcttggcctcaagttcaatatggagaggattgcttccctgaatcctctcttccttccccttttagattttgaagtgcaatcatatgtttttctctgtttgcattttttcctccttgttcttgacaaggaggagttgctcctgcccagaatgagcgtgacacttccgaacacttcttcatattcagttccaagatatatctgcttgattaaacatgagcttcctctgctctgaagctacctctgtcctcattttattctagccagaaaaggagtatcaccctagtgattatggctgttcactttcccatctatcttcctaaatctggaagttcttctcttggagatcaagagaaaaattacaattgtattccttactttattcacccacctatgaaaacaggaagcaataggaaaaaaaatccggttactccattttagcttttggtgaacgatgtagagcaaattgtctctctggtctaggtccgattactcttacctgtttttccactttgagacattctaaacagaatgtgtaacttctcatatgtatgcctctcccatctgtgaacctaggccaaagttgcaaaaacaatcatattaatagtagagtagagaaaaagttagtctatggttctcaaccctcgtgtacattggaaccatctgggagctgtgaacactgtcgctgccaatgttccagccaccagagatttggatttaactggtggggcctaggaattggtgtttttttgttttgttttgttttttacacaccttcatgtgattctgatgtgaagctgggttca

SEQ ID NO: 440432 - DNA, 1663 bp, Homo sapiens
ttccaagtttggagcttttagctgccagccctggcccatcatgtagctgcagcacagccttccctaacgttgcaactgggggaaaaatcactttccagtctgttttgcaaggtgtgcatttccatcttgattccctgaaagtccatctgctgcatcggtcaagagaaactccacttgcatgaagattgcacgcctgcagcttgcatctttgttgcaaaactagctacagaagagaagcaaggcaaagtcttttgtgctcccctcccccatcaaaggaaaggggaaaatgtctcagtcgaaaggcaagaagcgaaaccctggccttaaaattccaaaagaagcatttgaacaacctcagaccagttccacaccacctcgagatttagactccaaggcttgcatttctattggaaatcagaactttgaggtgaaggcagatgacctggagcctataatggaactgggacgaggtgcgtacggggtggtggagaagatgcggcacgtgcccagcgggcagatcatggcagtgaagcggatccgagccacagtaaatagccaggaacagaaacggctactgatggatttggatatttccatgaggacggtggactgtccattcactgtcaccttttatggcgcactgtttcgggagggtgatgtgtggatctgcatggagctcatggatacatcactagataaattctacaaacaagttattgataaaggccagacaattccagaggacatcttagggaaaatagcagtttctattgtaaaagcattagaacatttacatagtaagctgtctgtcattcacagagacgtcaagccttctaatgtactcatcaatgctctcggtcaagtgaagatgtgcgattttggaatcagtggctacttggtggactctgttgctaaaacaattgatgcaggttgcaaaccatacatggcccctgaaagaataaacccagagctcaaccagacaagttctctgcagagtttgttgactttacctcacagtgcttaaagaagaattccaaagaacggcctacatacccagagctaatgcaacatccatttttcaccctacatgaatccaaaggaacagatgtggcatcttttgtaaaactgattcttggagactaaaaagcagtggacttaatcggttgaccctactgtggattggtgggtttcggggtgaagcaagttcactacagcatcaatagaaagtcatctttgagataatttaaccctgcctctcagagggttttctctcccaattttctttttactccccctcttaagggggccttggaatctatagtatagaatgaactgtctagatggatgaattatgataaaggcttaggacttcaaaaggtgattaaatatttaatgatgtgtcataaaaaaaacaaatccaccagcacacaagtgttggggcccctgggcccctgaaaaaagttttgaaaaccctggtgggggccggggccccaggggggcagagcgaacatgtgccaaaacaggccccaagaagaaaccgggcaacgaccacgcgcgggatctctcccgagtaaaaagacgccgggggacaacgggcgctggaacacccagaggagtctgagacacaagggactacacccgggagcacgggaggcgaatagac

SEQ ID NO: 440433 - DNA, 1002 bp, Homo sapiens
taggctaggtagaggctggtgttgaatcgggattctgcttcttcaactctgtagccatcaccgcaaaactcctacagcagaagttgaacgtgggcaaggtcctcatcgtggactgggacattcaccatggcaatggcacccagcaggcgttctacaatgacccctctgtgctctacatctctctgcatcgctatgacaacgggaacttctttccaggctctggggctcctgaagaggttggtggaggaccaggcgtggggtacaatgtgaacgtggcatggacaggaggtgtggacccccccattggagacgtggagtaccttacagccttcaggacagtggtgatgcccattgcccacgagttctcacctgatgtggtcctagtctccgccgggtttgatgctgttgaaggacatctgtctcctctgggtggctactctgtcaccgccagatgttttggccacttgaccaggcagctgatgaccctggcagggggccgggtggtgctggccctggagggaggccatgacttgaccgccatctgtgatgcctctgaggcttgtgtctcggctctgctcagtgtagagctgcagcccttggatgaggcagtcttgcagcaaaagcccaacatcaacgcagtggccacgctagagaaagtcatcgagatccagagcaaacactggagctgtgtgcagaagttcgccgctggtctgggccggtccctgcgagaggcccaagcaggtgagaccgaggaggccgagactgtgagcgccatggccttgctgtcggtgggggccgagcaggcccaggctgcggcagcccgggaacacagccccaggccggcagaggagcccatggagcaggagcctgccctgtgacgccccggcccccatccctctgggcttcaccattgtgattttgtttattttttctattaaaaacaaaaagtcacacattcaaaaaataaaaaaaaaaaatcgcttttggggaaaaataaggctt

SEQ ID NO: 440434 - DNA, 529 bp, Homo sapiens
  misc_feature (1)..(1): n is a, c, g, or t
  misc_feature (18)..(18): n is a, c, g, or t
ncagactcaccaacagcnatacaagcaccaaaacgatgtaaatatctcatagagtgtaggcccacaaccaaatccctgaacaacaaatgatctccaaaccctggtgtcattcctcgtgccgaattcggcacgagctcggctctgctcagtgtagagctgcagcccttggatgaggcagtcttgcagcaaaagcccaacatcaacgcagtggccacgctagagaaagtcatcgagatccagagcaaacactggagctgtgtgcagaagttcgccgctggtctgggccggtccctgcgagaggcccaagcaggtgagaccgaggaggccgagactgtgagcgccatggccttgctgtcggtgggggccgagcaggcccaggctgcggcagcccgggaacacagccccaggccggcagaggagcccatggagcaggagcctgccctgtgacgccccggcccccatccctctgggcttcaccattgtgattttgtttattttttctattaaaaacaaaaagtcacacattcaa

SEQ ID NO: 440435 - DNA, 494 bp, Homo sapiens
catgctcatagctgactctagaggataaaaggagtggacagtgacaccgtgtggaatgagatgcactcctccagtgctgtgcgcatggcagtgggctgcctgctggagctggccttcaaggtggctgcaggagagctcaaggtgagcgtgtgcttgtgacctcggtgccccttggcatggccctgctcctcagaggcagaggacaggggcagccttgggatcctttcagtgaggcactgtcctttgcaagctcaactctcaggcaccagggtgggaaggagttgccagctgggaattcaggttatgagggaccaacaaaaagacactaatgcccagtgctctcgtgggtgtctcgaggcagaaatagtgtctgcctgctcaagcctcatggttggcattcaaaatggtccgttgaggctgggcacagtggctcatacctgtaatctcaacactttgggaggccgaggtgggcagatagcttgagcccaggagtt

SEQ ID NO: 440436 - DNA, 3825 bp, Homo sapiens
gctgtcacccagggttgggagggaacacagagcccgcctgcccgctgagctccccttcctgtcccaagtgctcagccataccccagctcccaggaaccagggagaggctggtggtcggatgcccctctagagcagagctgggcctgcagctctagggcctccctgcccctcctgccgccaggagtgcccaggccggatgaggcacttccctacagtgtgggtcccgtcggcagtggcctgagggaacctgtgctctgcgggctgcccgaccaccttcccttcggtctgctccccgcctctggcggccccctccctggcatgctgctggtgcccaaggctcaggggctcgtggagatgctgcagaccatctatgagacagaatcctgtttctcagcgatgggatgtcaggtcgggaaccatccttggaaatcctgccgcggacttctctgcacagcatccctgtgacagtggaggtgaagccggtgctgccaagagccatgcccagttccatggggggtgggggtggaggcagccccagccctgtggagctacggggggctctggtgggctctgtggaccccacactgcgggagcagcaactgcagcaggagctcctggcgctcaagcagcagcagcagctgcagaagcagctcctgttcgctgagttccagaaacagcatgaccacctgacaaggcagcatgaggtccagctgcagaagcacctcaagcagcagcaggagatgctggcagccaagcagcagcaggagatgctggcagccaagcggcagcaggagctggagcagcagcggcagcgggagcagcagcggcaggaagagctggagaagcagcggctggagcagcagctgctcatcctgcggaacaaggagaagagcaaagagagtgccattgccagcactgaggtaaagctgaggctccaggaattcctcttgtcgaagtcaaaggagcccacaccaggcggcctcaaccattccctcccacagcaccccaaatgctggggagcccaccatgcttctttggaccagagttcccctccccagagcggcccccctgggacgcctccctcctacaaactgcctttgcctgggccctacgacagtcgagacgacttccccctccgcaaaacagcctctgaacccaacttgaaagtgcgttcaaggctaaaacagaaggtggctgagcggagaagcagtcccctcctgcgtcgcaaggatgggactgttattagcacctttaagaagagagctgttgagatcacaggtgccgggcctggggcgtcgtccgtgtgtaacagcgcacccggctccggccccagctctcccaacagctcccacagcaccatcgctgagaatggctttactggctcagtccccaacatccccactgagatgctccctcagcaccgagccctccctctggacagctcccccaaccagttcagcctctacacgtctccttctctgcccaacatctccctagggctgcaggccacggtcactgtcaccaactcacacctcactgcctccccgaagctgtcgacacagcaggaggccgagaggcaggccctccagtccctgcggcagggtggcacgctgaccggcaagttcatgagcacatcctctattcctggctgcctgctgggcgtggcactggagggcgacgggagcccccacgggcatgcctccctgctgcagcatgtgctgttgctggagcaggcccggcagcagagcaccctcattgctgtgccactccacgggcagtccccactagtgacgggtgaacgtgtggccaccagcatgcggacggtaggcaagctcccgcggcatcggcccctgagccgcactcagtcctcaccgctgccgcagagtccccaggccctgcagcagctggtcatgcaacaacagcaccagcagttcctggagaagcagaagcagcagcagctacagctgggcaagatcctcaccaagacaggggagctgcccaggcagcccaccacccaccctgaggagacagaggaggagctgacggagcagcaggaggtcttgctgggggagggagccctgaccatgccccgggagggctccacagagagtgagagcacacaggaagacctggaggaggaggacgaggaagaggatggggaggaggaggaggattgcatccaggttaaggacgaggagggcgagagtggtgctgaggaggggcccgacttggaggagcctggtgctggatacaaaaaactgttctcagatgcccagccgctgcagcctttgcaggtgtaccaggcgcccctcagcctggccactgtgccccaccaggccctgggccgtacccagtcctcccctgctgcccctgggggcatgaagagccccccagaccagcccgtcaagcacctcttcaccacaggtgtggtctacgacacgttcatgctaaagcaccagtgcatgtgcgggaacacacacgtgcaccctgagcatgctggccggatccagagcatctggtcccggctgcaggagacaggcctgcttagcaagtgcgagcggatccgaggtcgcaaagccacgctagatgagatccagacagtgcactctgaataccacaccctgctctatgggaccagtcccctcaaccggcagaagctagacagcaagaagttgctcggccccatcagccagaagatgtatgctgtgctgccttgtgggggcatcggggtggacagtgacaccgtgtggaatgagatgcactcctccagtgctgtgcgcatggcagtgggctgcctgctggagctggccttcaaggtggctgcaggagagctcaagaatggatttgccatcatccggcccccaggacaccacgccgaggaatccacagccatgggattctgcttcttcaactctgtagccatcaccgcaaaactcctacagcagaagttgaacgtgggcaaggtcctcatcgtggactgggacattcaccatggcaatggcacccagcaggcgttctacaatgacccctctgtgctctacatctctctgcatcgctatgacaacgggaacttctttccaggctctggggctcctgaagaggttggtggaggaccaggcgtggggtacaatgtgaacgtggcatggacaggaggtgtggacccccccattggagacgtggagtaccttacagccttcaggacagtggtgatgcccattgcccacgagttctcacctgatgtggtcctagtctccgccgggtttgatgctgttgaaggacatctgtctcctctgggtggctactctgtcaccgccagatgttttggccacttgaccaggcagctgatgaccctggcagggggccgggtggtgctggccctggagggaggccatgacttgaccgccatctgtgatgcctctgaggcttgtgtctcggctctgctcagtgtagagctgcagcccttggatgaggcagtcttgcagcaaaagcccaacatcaacgcagtggccacgctagagaaagtcatcgagatccagagcaaacactggagctgtgtgcagaagttcgccgctggtctgggccggtccctgcgagaggcccaagcaggtgagaccgaggaggccgagactgtgagcgccatggccttgctgtcggtgggggccgagcaggcccaggctgcggcagcccgggaacacagccccaggccggcagaggagcccatggagcaggagcctgccctgtgacgccccggcccccatccctctgggcttcaccattgtgattttgtttattttttctattaaaaacaaaaagtcacacattcaa

SEQ ID NO: 440437 - DNA, 5316 bp, Homo sapiens
gcggcgagcggagccggaggagccgccgcgaagatggaggagccgtcgaggaggtgctgccgccgctgccgccgccgctgctgccgccgccgcccgcgaagccggagctcgagccgcagcggggatgccgttctgagtgcctgactgcctcgccccgaaggatggcctcggatgggcattagaggcacggcggccccgggctcccgtcccgtccgtctgtctgttatcgtctgtctctcttgacatcaccgcagctccaccccctcccgtcccagcccccaacgccagcttcctgcaggcccagagccggcatgaactctcccaacgagtcgcgatgggatgtcaggtcgggaaccatccttggaaatcctgccgcggacttctctgcacagcatccctgtgacagtggaggtgaagccggtgctgccaagagccatgcccagttccatggggggtgggggtggaggcagccccagccctgtggagctacggggggctctggtgggctctgtggaccccacactgcgggagcagcaactgcagcaggagctcctggcgctcaagcagcagcagcagctgcagaagcagctcctgttcgctgagttccagaaacagcatgaccacctgacaaggcagcatgaggtccagctgcagaagcacctcaagcagcagcaggagatgctggcagccaagcagcagcaggagatgctggcagccaagcggcagcaggagctggagcagcagcggcagcgggagcagcagcggcaggaagagctggagaagcagcggctggagcagcagctgctcatcctgcggaacaaggagaagagcaaagagagtgccattgccagcactgaggtaaagctgaggctccaggaattcctcttgtcgaagtcaaaggagcccacaccaggcggcctcaaccattccctcccacagcaccccaaatgctggggagcccaccatgcttctttggaccagagttcccctccccagagcggcccccctgggacgcctccctcctacaaactgcctttgcctgggccctacgacagtcgagacgacttccccctccgcaaaacagcctctgaacccaacttgaaagtgcgttcaaggctaaaacagaaggtggctgagcggagaagcagtcccctcctgcgtcgcaaggatgggactgttattagcacctttaagaagagagctgttgagatcacaggtgccgggcctggggcgtcgtccgtgtgtaacagcgcacccggctccggccccagctctcccaacagctcccacagcaccatcgctgagaatggctttactggctcagtccccaacatccccactgagatgctccctcagcaccgagccctccctctggacagctcccccaaccagttcagcctctacacgtctccttctctgcccaacatctccctagggctgcaggccacggtcactgtcaccaactcacacctcactgcctccccgaagctgtcgacacagcaggaggccgagaggcaggccctccagtccctgcggcagggtggcacgctgaccggcaagttcatgagcacatcctctattcctggctgcctgctgggcgtggcactggagggcgacgggagcccccacgggcatgcctccctgctgcagcatgtgctgttgctggagcaggcccggcagcagagcaccctcattgctgtgccactccacgggcagtccccactagtgacgggtgaacgtgtggccaccagcatgcggacggtaggcaagctcccgcggcatcggcccctgagccgcactcagtcctcaccgctgccgcagagtccccaggccctgcagcagctggtcatgcaacaacagcaccagcagttcctggagaagcagaagcagcagcagctacagctgggcaagatcctcaccaagacaggggagctgcccaggcagcccaccacccaccctgaggagacagaggaggagctgacggagcagcaggaggtcttgctgggggagggagccctgaccatgccccgggagggctccacagagagtgagagcacacaggaagacctggaggaggaggacgaggaagaggatggggaggaggaggaggattgcatccaggttaaggacgaggagggcgagagtggtgctgaggaggggcccgacttggaggagcctggtgctggatacaaaaaactgttctcagatgcccagccgctgcagcctttgcaggtgtaccaggcgcccctcagcctggccactgtgccccaccaggccctgggccgtacccagtcctcccctgctgcccctgggggcatgaagagccccccagaccagcccgtcaagcacctcttcaccacaggtgtggtctacgacacgttcatgctaaagcaccagtgcatgtgcgggaacacacacgtgcaccctgagcatgctggccggatccagagcatctggtcccggctgcaggagacaggcctgcttagcaagtgcgagcggatccgaggtcgcaaagccacgctagatgagatccagacagtgcactctgaataccacaccctgctctatgggaccagtcccctcaaccggcagaagctagacagcaagaagttgctcggccccatcagccagaagatgtatgctgtgctgccttgtgggggcatcggggtggacagtgacaccgtgtggaatgagatgcactcctccagtgctgtgcgcatggcagtgggctgcctgctggagctggccttcaaggtggctgcaggagagctcaagaatggatttgccatcatccggcccccaggacaccacgccgaggaatccacagccatgggattctgcttcttcaactctgtagccatcaccgcaaaactcctacagcagaagttgaacgtgggcaaggtcctcatcgtggactgggacattcaccatggcaatggcacccagcaggcgttctacaatgacccctctgtgctctacatctctctgcatcgctatgacaacgggaacttctttccaggctctggggctcctgaagaggttggtggaggaccaggcgtggggtacaatgtgaacgtggcatggacaggaggtgtggacccccccattggagacgtggagtaccttacagccttcaggacagtggtgatgcccattgcccacgagttctcacctgatgtggtcctagtctccgccgggtttgatgctgttgaaggacatctgtctcctctgggtggctactctgtcaccgccagatgttttggccacttgaccaggcagctgatgaccctggcagggggccgggtggtgctggccctggagggaggccatgacttgaccgccatctgtgatgcctctgaggcttgtgtctcggctctgctcagtgtagagctgcagcccttggatgaggcagtcttgcagcaaaagcccaacatcaacgcagtggccacgctagagaaagtcatcgagatccagagcaaacactggagctgtgtgcagaagttcgccgctggtctgggccggtccctgcgagaggcccaagcaggtgagaccgaggaggccgagactgtgagcgccatggccttgctgtcggtgggggccgagcaggcccaggctgcggcagcccgggaacacagccccaggccggcagaggagcccatggagcaggagcctgccctgtgacgccccggcccccatccctctgggcttcaccattgtgattttgtttattttttctattaaaaacaaaaagtcacacattcaacaaggtgtgccgtgtgggtctctcagccttgcccctcctgctcctctacgctgcctcaggcccccagccctgtggcttccacctcagctctagaagcctgctccctctgcagggggtggtggtgtcttcccagccctgtcccatgtgtccctccacccattttcctgcattctgtctgtccttttcctccttggagcctgggccagctcaaggtgggcacgggggcccagacagtactctccagttctggggccccccgagtgaggagggaacgggaagtcggtgccttggtttcagctgatttggggggaaatgccttaatttcactctcctcccttctccagcctcaggggaggatctggaggatccactactgtctttaagatgcagagtggaggggaggtgggcacccaccctgcgattctccaccctttccccttctttcgtcctcaccatctctgcagacccctctcctcctccttcctcttggtctcagcactgatgggaggctggtgcccaagctgtggcctgcagtctgtgaggagggctgtcttgcctcacactcctcacagcctacttccccttccccggggctgagagggtgaaagtgtgtggggaaggagaggactggtttcctgggttctcaggggccaggaggagtaacagaaccaggtctgctccccaccttactcggatggcctccctgcccctctgctggcacagcctgggcaaggggagaaggtggtccctgcagaggggctccaggctggtgagagcccccctgctgtcaggaccagattttcccagccatccagcatgctgcggggagaaggggcagaggctcacctccctcctggggccttttgttttggatcctggggatggtgagaatggaggttctagaaggggtaaggccagaacccagggatccaggagtcggctctcagctggagcttccataccttctgggctccctttgctgaccaccagcccaagggagctaagaccaggagggggctgggcgctgtcccttctctttcccaggagccctgccaggggctgtgggcctacaaggcttccaggggatgccatccagcctgtaggaaaccaaagatgggaagtggctcctagggggctgactcttccttcctcctcctccccagtaccacatatactttctctccttctatctccagggccccaccaatctgtttacatatttattatcctatgggggcctgagcaggattgagggagccaggggaggggcaggagtcccagcaccatcggttcatagtgtgcttgtgtgtttgttttagatcctcctgggggatggggatggggccaggctcagtgtactaggcctctctgtgctgagccccaggctcccggccccttacccactctctccctgtggctggtctggttctcatgtaaacccactccttgctttgtctccctggatatggatttcagttaagtattttgtaacccgttacactgtgtgtccttgtgtaaataaacttgtttctggcagtgccatctggggccaa

SEQ ID NO: 440438 - DNA, 5273 bp, Homo sapiens
gcggcgagcggagccggaggagccgccgcgaagatggaggagccgtcgaggaggtgctgccgccgctgccgccgccgctgctgccgccgccgcccgcgaagccggagctcgagccgcagcggggatgccgttctgagtgcctgactgcctcgccccgaaggatggcctcggatgggcattagaggcacggcggccccgggctcccgtcccgtccgtctgtctgttatcgtctgtctctcttgacatcaccgcagctccaccccctcccgtcccagcccccaacgccagcttcctgcaggcccagagccggcatgaactctcccaacgagtcgcgatgggatgtcaggtcgggaaccatccttggaaatcctgccgcggacttctctgcacagcatccctgtgacagtggaggtgaagccggtgctgccaagagccatgcccagttccatggggggtgggggtggaggcagccccagccctgtggagctacggggggctctggtgggctctgtggaccccacactgcgggagcagcaactgcagcaggagctcctggcgctcaagcagcagcagcagctgcagaagcagctcctgttcgctgagttccagaaacagcatgaccacctgacaaggcagcatgaggtccagctgcagaagcacctcaagcagcagcaggagatgctggcagccaagcagcagcaggagatgctggcagccaagcggcagcaggagctggagcagcagcggcagcgggagcagcagcggcaggaagagctggagaagcagcggctggagcagcagctgctcatcctgcggaacaaggagaagagcaaagagagtgccattgccagcactgaggtaaagctgaggctccaggaattcctcttgtcgaagtcaaaggagcccacaccaggcggcctcaaccattccctcccacagcaccccaaatgctggggagcccaccatgcttctttggaccagagttcccctccccagagcggcccccctgggacgcctccctcctacaaactgcctttgcctgggccctacgacagtcgagacgacttccccctccgcaaaacagcctctgaacccaacttgaaagtgcgttcaaggctaaaacagaaggtggctgagcggagaagcagtcccctcctgcgtcgcaaggatgggactgttattagcacctttaagaagagagctgttgagatcacaggtgccgggcctggggcgtcgtccgtgtgtaacagcgcacccggctccggccccagctctcccaacagctcccacagcaccatcgctgagaatggctttactggctcagtccccaacatccccactgagatgctccctcagcaccgagccctccctctggacagctcccccaaccagttcagcctctacacgtctccttctctgcccaacatctccctagggctgcaggccacggtcactgtcaccaactcacacctcactgcctccccgaagctgtcgacacagcaggaggccgagaggcaggccctccagtccctgcggcagggtggcacgctgaccggcaagttcatgagcacatcctctattcctggctgcctgctgggcgtggcactggagggcgacgggagcccccacgggcatgcctccctgctgcagcatgtgctgttgctggagcaggcccggcagcagagcaccctcattgctgtgccactccacgggcagtccccactagtgacgggtgaacgtgtggccaccagcatgcggacggtaggcaagctcccgcggcatcggcccctgagccgcactcagtcctcaccgctgccgcagagtccccaggccctgcagcagctggtcatgcaacaacagcaccagcagttcctggagaagcagaagcagcagcagctacagctgggcaagatcctcaccaagacaggggagctgcccaggcagcccaccacccaccctgaggagacagaggaggagctgacggagcagcaggaggtcttgctgggggagggagccctgaccatgccccgggagggctccacagagagtgagagcacacaggaagacctggaggaggaggacgaggaagaggatggggaggaggaggaggattgcatccaggttaaggacgaggagggcgagagtggtgctgaggaggggcccgacttggaggagcctggtgctggatacaaaaaactgttctcagatgcccagccgctgcagcctttgcaggtgtaccaggcgcccctcagcctggccactgtgccccaccaggccctgggccgtacccagtcctcccctgctgcccctgggggcatgaagagccccccagaccagcccgtcaagcacctcttcaccacaggtgtggtctacgacacgttcatgctaaagcaccagtgcatgtgcgggaacacacacgtgcaccctgagcatgctggccggatccagagcatctggtcccggctgcaggagacaggcctgcttagcaagtgcgagcggatccgaggtcgcaaagccacgctagatgagatccagacagtgcactctgaataccacaccctgctctatgggaccagtcccctcaaccggcagaagctagacagcaagaagttgctcggccccatcagccagaagatgtatgctgtgctgccttgtgggggcatcggggtggacagtgacaccgtgtggaatgagatgcactcctccagtgctgtgcgcatggcagtgggctgcctgctggagctggccttcaaggtggctgcaggagagctcaagaatggatttgccatcatccggcccccaggacaccacgccgaggaatccacagccatgggattctgcttcttcaactctgtagccatcaccgcaaaactcctacagcagaagttgaacgtgggcaaggtcctcatcgtggactgggacattcaccatggcaatggcacccagcaggcgttctacaatgacccctctgtgctctacatctctctgcatcgctatgacaacgggaacttctttccaggctctggggctcctgaagaggttggtggaggaccaggcgtggggtacaatgtgaacgtggcatggacaggaggtgtggacccccccattggagacgtggagtaccttacagccttcaggacagtggtgatgcccattgcccacgagttctcacctgatgtggtcctagtctccgccgggtttgatgctgttgaaggacatctgtctcctctgggtggctactctgtcaccgccagatgttttggccacttgaccaggcagctgatgaccctggcagggggccgggtggtgctggccctggagggaggccatgacttgaccgccatctgtgatgcctctgaggcttgtgtctcggctctgctcagtgtagagctgcagcccttggatgaggcagtcttgcagcaaaagcccaacatcaacgcagtggccacgctagagaaagtcatcgagatccagagcaaacactggagctgtgtgcagaagttcgccgctggtctgggccggtccctgcgagaggcccaagcaggtgagaccgaggaggccgagactgtgagcgccatggccttgctgtcggtgggggccgagcaggcccaggctgcggcagcccgggaacacagccccaggccggcagaggagcccatggagcaggagcctgccctgtgacgccccggcccccatccctctgggcttcaccattgtgattttgtttattttttctattaaaaacaaaaagtcacacattcaacaaggtgtgccgtgtgggtctctcagccttgcccctcctgctcctctacgctgcctcaggcccccagccctgtggcttccacctcagctctagaagcctgctccctctgcagggggtggtggtgtcttcccagccctgtcccatgtgtccctccacccattttcctgcattctgtctgtccttttcctccttggagcctgggccagctcaaggtgggcacgggggcccagacagtactctccagttctggggccccccgagtgaggagggaacgggaagtcggtgccttggtttcagctgatttggggggaaatgccttaatttcactctcctcccttctccagcctcaggggaggatctggaggatccactactgtctttaagatgcagagtggaggggaggtgggcacccaccctgcgattctccaccctttccccttctttcgtcctcaccatctctgcagacccctctcctcctccttcctcttggtctcagcactgatgggaggctggtgcccaagctgtggcctgcagtctgtgaggagggctgtcttgcctcacactcctcacagcctacttccccttccccggggctgagagggtgaaagtgtgtggggaaggagaggactggtttcctgggttctcaggggccaggaggagtaacagaaccaggtctgctccccaccttactcggatggcctccctgcccctctgctggcacagcctgggcaaggggagaaggtggtccctgcagaggggctccaggctggtgagagcccccctgctgtcaggaccagattttcccagccatccagcatgctgcggggagaaggggcagaggctcacctccctcctggggccttttgttttggatcctggggatggtgagaatggaggttctagaaggggtaaggccagaacccagggatccaggagtcggctctcagctggagcttccataccttctgggctccctttgctgaccaccagcccaagggagctaagaccaggagggggctgggcgctgtcccttctctttcccaggagccctgccaggggctgtgggcctacaaggcttccaggggatgccatccagcctgtaggaaaccaaagatgggaagtggctcctagggggctgactcttccttcctcctcctccccagtaccacatatactttctctccttctatctccagggccccaccaatctgtttacatatttattatcctatgggggcctgagcaggattgagggagccaggggaggggcaggagtcccctcctgggggatggggatggggccaggctcagtgtactaggcctctctgtgctgagccccaggctcccggccccttacccactctctccctgtggctggtctggttctcatgtaaacccactccttgctttgtctccctggatatggatttcagttaagtattttgtaacccgttacactgtgtgtccttgtgtaaataaacttgtttctggcagtgccatctggggccaa

SEQ ID NO: 440439 - DNA, 2209 bp, Homo sapiens
gcgctaggctacgacgcccctggtactcggccgagggctgtgggcgtggcactggagggcgacgggagcccccacgggcatgcctccctgctgcagcatgtgctgttgctggagcaggcccggcagcagagcaccctcattgctgtgccactccacgggcagtccccactagtgacgggtgaacgtgtggccaccagcatgcggacggtaggcaagctcccgcggcatcggcccctgagccgcactcagtcctcaccgctgccgcagagtccccaggccctgcagcagctggtcatgcaacaacagcaccagcagttcctggagaagcagaagcagcagcagctacagctgggcaagatcctcaccaagacaggggagctgcccaggcagcccaccacccaccctgaggagacagaggaggagctgacggagcagcaggaggtcttgctgggggagggagccctgaccatgccccgggagggctccacagagagtgagagcacacaggaagacctggaggaggaggacgaggaagaggatggggaggaggaggaggattgcatccaggttaaggacgaggagggcgagagtggtgctgaggaggggcccgacttggaggagcctggtgctggatacaaaaaactgttctcagatgcccagccgctgcagcctttgcaggtgtaccaggcgcccctcagcctggccactgtgccccaccaggccctgggccgtacccagtcctcccctgctgcccctgggggcatgaagagccccccagaccagcccgtcaagcacctcttcaccacaggtgtggtctacgacacgttcatgctaaagcaccagtgcatgtgcgggaacacacacgtgcaccctgagcatgctggccggatccagagcatctggtcccggctgcaggagacaggcctgcttagcaagtgcgagcggatccgaggtcgcaaagccacgctagatgagatccagacagtgcactctgaataccacaccctgctctatgggaccagtcccctcaaccggcagaagctagacagcaagaagttgctcggccccatcagccagaagatgtatgctgtgctgccttgtgggggcatcggggtggacagtgacaccgtgtggaatgagatgcactcctccagtgctgtgcgcatggcagtgggctgcctgctggagctggccttcaaggtggctgcaggagagctcaagaatggatttgccatcatccggcccccaggacaccacgccgaggaatccacagccatgggattctgcttcttcaactctgtagccatcaccgcaaaactcctacagcagaagttgaacgtgggcaaggtcctcatcgtggactgggacattcaccatggcaatggcacccagcaggcgttctacaatgacccctctgtgctctacatctctctgcatcgctatgacaacgggaacttctttccaggctctggggctcctgaagaggttggtggaggaccaggcgtggggtacaatgtgaacgtggcatggacaggaggtgtggacccccccattggagacgtggagtaccttacagccttcaggacagtggtgatgcccattgcccacgagttctcacctgatgtggtcctagtctccgccgggtttgatgctgttgaaggacatctgtctcctctgggtggctactctgtcaccgccagatgttttggccacttgaccaggcagctgatgaccctggcagggggccgggtggtgctggccctggagggaggccatgacttgaccgccatctgtgatgcctctgaggcttgtgtctcggctctgctcagtgtagagctgcagcccttggatgaggcagtcttgcagcaaaagcccaacatcaacgcagtggccacgctagagaaagtcatcgagatccagagcaaacactggagctgtgtgcagaagttcgccgctggtctgggccggtccctgcgagaggcccaagcaggtgagaccgaggaggccgagactgtgagcgccatggccttgctgtcggtgggggccgagcaggcccaggctgcggcagcccgggaacacagccccaggccggcagaggagcccatggagcaggagcctgccctgtgacgccccggcccccatccctctgggcttcaccattgtgattttgtttattttttctattaaaaacaaaaagtcacacattcaa

SEQ ID NO: 440440 - DNA, 3847 bp, Homo sapiens
gcggcgagcggagccggaggagccgccgcgaagatggaggagccgtcgaggaggtgctgccgccgctgccgccgccgctgctgccgccgccgcccgcgaagccggagctcgagccgcagcggggatgccgttctgagtgcctgactgcctcgccccgaaggatggcctcggatgggcattagaggcacggcggccccgggctcccgtcccgtccgtctgtctgttatcgtctgtctctcttgacatcaccgcagctccaccccctcccgtcccagcccccaacgccagcttcctgcaggcccagagccggcatgaactctcccaacgagtcgcgatgggatgtcaggtcgggaaccatccttggaaatcctgccgcggacttctctgcacagcatccctgtgacagtggaggtgaagccggtgctgccaagagccatgcccagttccatggggggtgggggtggaggcagccccagccctgtggagctacggggggctctggtgggctctgtggaccccacactgcgggagcagcaactgcagcaggagctcctggcgctcaagcagcagcagcagctgcagaagcagctcctgttcgctgagttccagaaacagcatgaccacctgacaaggcagcatgaggtccagctgcagaagcacctcaagcagcagcaggagatgctggcagccaagcagcagcaggagatgctggcagccaagcggcagcaggagctggagcagcagcggcagcgggagcagcagcggcaggaagagctggagaagcagcggctggagcagcagctgctcatcctgcggaacaaggagaagagcaaagagagtgccattgccagcactgaggtaaagctgaggctccaggaattcctcttgtcgaagtcaaaggagcccacaccaggcggcctcaaccattccctcccacagcaccccaaatgctggggagcccaccatgcttctttggaccagagttcccctccccagagcggcccccctgggacgcctccctcctacaaactgcctttgcctgggccctacgacagtcgagacgacttccccctccgcaaaacagcctctgaacccaacttgaaagtgcgttcaaggctaaaacagaaggtggctgagcggagaagcagtcccctcctgcgtcgcaaggatgggactgttattagcacctttaagaagagagctgttgagatcacaggtgccgggcctggggcgtcgtccgtgtgtaacagcgcacccggctccggccccagctctcccaacagctcccacagcaccatcgctgagaatggctttactggctcagtccccaacatccccactgagatgctccctcagcaccgagccctccctctggacagctcccccaaccagttcagcctctacacgtctccttctctgcccaacatctccctagggctgcaggccacggtcactgtcaccaactcacacctcactgcctccccgaagctgtcgacacagcaggaggccgagaggcaggccctccagtccctgcggcagggtggcacgctgaccggcaagttcatgagcacatcctctattcctggctgcctgctgggcgtggcactggagggcgacgggagcccccacgggcatgcctccctgctgcagcatgtgctgttgctggagcaggcccggcagcagagcaccctcattgctgtgccactccacgggcagtccccactagtgacgggtgaacgtgtggccaccagcatgcggacggtaggcaagctcccgcggcatcggcccctgagccgcactcagtcctcaccgctgccgcagagtccccaggccctgcagcagctggtcatgcaacaacagcaccagcagttcctggagaagcagaagcagcagcagctacagctgggcaagatcctcaccaagacaggggagctgcccaggcagcccaccacccaccctgaggagacagaggaggagctgacggagcagcaggaggtcttgctgggggagggagccctgaccatgccccgggagggctccacagagagtgagagcacacaggaagacctggaggaggaggacgaggaagaggatggggaggaggaggaggattgcatccaggttaaggacgaggagggcgagagtggtgctgaggaggggcccgacttggaggagcctggtgctggatacaaaaaactgttctcagatgcccagccgctgcagcctttgcaggtgtaccaggcgcccctcagcctggccactgtgccccaccaggccctgggccgtacccagtcctcccctgctgcccctgggggcatgaagagccccccagaccagcccgtcaagcacctcttcaccacaggtgtggtctacgacacgttcatgctaaagcaccagtgcatgtgcgggaacacacacgtgcaccctgagcatgctggccggatccagagcatctggtcccggctgcaggagacaggcctgcttagcaagtgcgagcggatccgaggtcgcaaagccacgctagatgagatccagacagtgcactctgaataccacaccctgctctatgggaccagtcccctcaaccggcagaagctagacagcaagaagttgctcggccccatcagccagaagatgtatgctgtgctgccttgtgggggcatcggggtggacagtgacaccgtgtggaatgagatgcactcctccagtgctgtgcgcatggcagtgggctgcctgctggagctggccttcaaggtggctgcaggagagctcaagaatggatttgccatcatccggcccccaggacaccacgccgaggaatccacagccatgggattctgcttcttcaactctgtagccatcaccgcaaaactcctacagcagaagttgaacgtgggcaaggtcctcatcgtggactgggacattcaccatggcaatggcacccagcaggcgttctacaatgacccctctgtgctctacatctctctgcatcgctatgacaacgggaacttctttccaggctctggggctcctgaagaggttggtggaggaccaggcgtggggtacaatgtgaacgtggcatggacaggaggtgtggacccccccattggagacgtggagtaccttacagccttcaggacagtggtgatgcccattgcccacgagttctcacctgatgtggtcctagtctccgccgggtttgatgctgttgaaggacatctgtctcctctgggtggctactctgtcaccgccagatgttttggccacttgaccaggcagctgatgaccctggcagggggccgggtggtgctggccctggagggaggccatgacttgaccgccatctgtgatgcctctgaggcttgtgtctcggctctgctcagtgtagagctgcagcccttggatgaggcagtcttgcagcaaaagcccaacatcaacgcagtggccacgctagagaaagtcatcgagatccagagcaaacactggagctgtgtgcagaagttcgccgctggtctgggccggtccctgcgagaggcccaagcaggtgagaccgaggaggccgagactgtgagcgccatggccttgctgtcggtgggggccgagcaggcccaggctgcggcagcccgggaacacagccccaggtaagcagcaacccgcaccacctctctgccctcacccctgctggtgcgccccactcaataccctcccctgtgcttgccccacaggccggcagaggagcccatggagcaggagcctgccctgtgacgccccggcccccatccctctgggcttcaccattgtgattttgtttattttttctattaaaaacaaaaagtcacacattcaa

SEQ ID NO: 440441 - DNA, 3909 bp, Homo sapiens
gcggcgagcggagccggaggagccgccgcgaagatggaggagccgtcgaggaggtgctgccgccgctgccgccgccgctgctgccgccgccgcccgcgaagccggagctcgagccgcagcggggatgccgttctgagtgcctgactgcctcgccccgaaggatggcctcggatgggcattagaggcacggcggccccgggctcccgtcccgtccgtctgtctgttatcgtctgtctctcttgacatcaccgcagctccaccccctcccgtcccagcccccaacgccagcttcctgcaggcccagagccggcatgaactctcccaacgagtcgcgatgggatgtcaggtcgggaaccatccttggaaatcctgccgcggacttctctgcacagcatccctgtgacagtggaggtgaagccggtgctgccaagagccatgcccagttccatggggggtgggggtggaggcagccccagccctgtggagctacggggggctctggtgggctctgtggaccccacactgcgggagcagcaactgcagcaggagctcctggcgctcaagcagcagcagcagctgcagaagcagctcctgttcgctgagttccagaaacagcatgaccacctgacaaggcagcatgaggtccagctgcagaagcacctcaagcagcagcaggagatgctggcagccaagcagcagcaggagatgctggcagccaagcggcagcaggagctggagcagcagcggcagcgggagcagcagcggcaggaagagctggagaagcagcggctggagcagcagctgctcatcctgcggaacaaggagaagagcaaagagagtgccattgccagcactgaggtaaagctgaggctccaggaattcctcttgtcgaagtcaaaggagcccacaccaggcggcctcaaccattccctcccacagcaccccaaatgctggggagcccaccatgcttctttggaccagagttcccctccccagagcggcccccctgggacgcctccctcctacaaactgcctttgcctgggccctacgacagtcgagacgacttccccctccgcaaaacagcctctgaacccaacttgaaagtgcgttcaaggctaaaacagaaggtggctgagcggagaagcagtcccctcctgcgtcgcaaggatgggactgttattagcacctttaagaagagagctgttgagatcacaggtgccgggcctggggcgtcgtccgtgtgtaacagcgcacccggctccggccccagctctcccaacagctcccacagcaccatcgctgagaatggctttactggctcagtccccaacatccccactgagatgctccctcagcaccgagccctccctctggacagctcccccaaccagttcagcctctacacgtctccttctctgcccaacatctccctagggctgcaggccacggtcactgtcaccaactcacacctcactgcctccccgaagctgtcgacacagcaggaggccgagaggcaggccctccagtccctgcggcagggtggcacgctgaccggcaagttcatgagcacatcctctattcctggctgcctgctgggcgtggcactggagggcgacgggagcccccacgggcatgcctccctgctgcagcatgtgctgttgctggagcaggcccggcagcagagcaccctcattgctgtgccactccacgggcagtccccactagtgacgggtgaacgtgtggccaccagcatgcggacggtaggcaagctcccgcggcatcggcccctgagccgcactcagtcctcaccgctgccgcagagtccccaggccctgcagcagctggtcatgcaacaacagcaccagcagttcctggagaagcagaagcagcagcagctacagctgggcaagatcctcaccaagacaggggagctgcccaggcagcccaccacccaccctgaggagacagaggaggagctgacggagcagcaggaggtcttgctgggggagggagccctgaccatgccccgggagggctccacagagagtgagagcacacaggaagacctggaggaggaggacgaggaagaggatggggaggaggaggaggattgcatccaggttaaggacgaggagggcgagagtggtgctgaggaggggcccgacttggaggagcctggtgctggatacaaaaaactgttctcagatgcccagccgctgcagcctttgcaggtgtaccaggcgcccctcagcctggccactgtgccccaccaggccctgggccgtacccagtcctcccctgctgcccctgggggcatgaagagccccccagaccagcccgtcaagcacctcttcaccacaggtgtggtctacgacacgttcatgctaaagcaccagtgcatgtgcgggaacacacacgtgcaccctgagcatgctggccggatccagagcatctggtcccggctgcaggagacaggcctgcttagcaagtgcgagcggatccgaggtcgcaaagccacgctagatgagatccagacagtgcactctgaataccacaccctgctctatgggaccagtcccctcaaccggcagaagctagacagcaagaagttgctcggccccatcagccagaagatgtatgctgtgctgccttgtgggggcatcggggtggacagtgacaccgtgtggaatgagatgcactcctccagtgctgtgcgcatggcagtgggctgcctgctggagctggccttcaaggtggctgcaggagagctcaagaatggatttgccatcatccggcccccaggacaccacgccgaggaatccacagccatgggattctgcttcttcaactctgtagccatcaccgcaaaactcctacagcagaagttgaacgtgggcaaggtcctcatcgtggactgggtaggcagtgagctggtggggctgggcaggggcgggtagagctaggaccagggtcagccttcaggaagtctcctcccccagccccaccttcaagcaccccagtcgtcctcatcctcgggtgctgggtgtgggtgcagaaggaagggcgctggggctcctgccggatgactaacgtcacattccaacagggctccctcctcaactatgaaagacatttagctcctgttccatcttggccctcacgttgcagtttcaagcaacgaaggggatttcctaccttgaacggtagtgacgctgccgccattgctagtagccgatatttcctcccaccccctacaattaggagcagactgtataccaggaacacaatgagtactttatggccacctcgagtagtaagaacgaggatgtccatttctgtgaacaaaggtgttgttgcgtgacttacccaaggccactcagctggggatgtcggcactgggtttcagaccaaggcttttggccccagcactctgctcttgctaccatgggtgcttcccaaaccctgctcctaatggtggaggcagaggcacacaccactctctgtgagctggggaagtagccaggaccaagcctcaggaaggacaaaatctcttggaagcccaattctggcttaaaaattcatgtaaatgttggatcctccttcagaatcttacgtgcttgtggttgggcacaatggctcaaagcctgtaatcccagcattttgggaggccaaggtgggtgaatcacttggggtcaggagttcgagaccaggatggccaacatggtgaaaccctgtctccactgaaaattcaaaaaaattagctaggtgtggtggcgggagcctgtaatcccacctattggggaggctgaggcaggagaattccttgaacctgggaagtggaggttgcagtgagtcaagatcatgccactgcactccagcctcgatgacagagtgagattctgtctcaa

SEQ ID NO: 440442 - DNA, 3128 bp, Homo sapiens
gcggcgagcggagccggaggagccgccgcgaagatggaggagccgtcgaggaggtgctgccgccgctgccgccgccgctgctgccgccgccgcccgcgaagccggagctcgagccgcagcggggatgccgttctgagtgcctgactgcctcgccccgaaggatggcctcggatgggcattagaggcacggcggccccgggctcccgtcccgtccgtctgtctgttatcgtctgtctctcttgacatcaccgcagctccaccccctcccgtcccagcccccaacgccagcttcctgcaggcccagagccggcatgaactctcccaacgagtcgcgatgggatgtcaggtcgggaaccatccttggaaatcctgccgcggacttctctgcacagcatccctgtgacagtggaggtgaagccggtgctgccaagagccatgcccagttccatggggggtgggggtggaggcagccccagccctgtggagctacggggggctctggtgggctctgtggaccccacactgcgggagcagcaactgcagcaggagctcctggcgctcaagcagcagcagcagctgcagaagcagctcctgttcgctgagttccagaaacagcatgaccacctgacaaggcagcatgaggtccagctgcagaagcacctcaagcagcagcaggagatgctggcagccaagcagcagcaggagatgctggcagccaagcggcagcaggagctggagcagcagcggcagcgggagcagcagcggcaggaagagctggagaagcagcggctggagcagcagctgctcatcctgcggaacaaggagaagagcaaagagagtgccattgccagcactgaggtaaagctgaggctccaggaattcctcttgtcgaagtcaaaggagcccacaccaggcggcctcaaccattccctcccacagcaccccaaatgctggggagcccaccatgcttctttggaccagagttcccctccccagagcggcccccctgggacgcctccctcctacaaactgcctttgcctgggccctacgacagtcgagacgacttccccctccgcaaaacagcctctgaacccaacttgaaagtgcgttcaaggctaaaacagaaggtggctgagcggagaagcagtcccctcctgcgtcgcaaggatgggactgttattagcacctttaagaagagagctgttgagatcacaggtgccgggcctggggcgtcgtccgtgtgtaacagcgcacccggctccggccccagctctcccaacagctcccacagcaccatcgctgagaatggctttactggctcagtccccaacatccccactgagatgctccctcagcaccgagccctccctctggacagctcccccaaccagttcagcctctacacgtctccttctctgcccaacatctccctagggctgcaggccacggtcactgtcaccaactcacacctcactgcctccccgaagctgtcgacacagcaggaggccgagaggcaggccctccagtccctgcggcagggtggcacgctgaccggcaagttcatgagcacatcctctattcctggctgcctgctgggcgtggcactggagggcgacgggagcccccacgggcatgcctccctgctgcagcatgtgctgttgctggagcaggcccggcagcagagcaccctcattgctgtgccactccacgggcagtccccactagtgacgggtgaacgtgtggccaccagcatgcggacggtaggcaagctcccgcggcatcggcccctgagccgcactcagtcctcaccgctgccgcagagtccccaggccctgcagcagctggtcatgcaacaacagcaccagcagttcctggagaagcagaagcagcagcagctacagctgggcaagatcctcaccaagacaggggagctgcccaggcagcccaccacccaccctgaggagacagaggaggagctgacggagcagcaggaggtcttgctgggggagggagccctgaccatgccccgggagggctccacagagagtgagagcacacaggaagacctggaggaggaggacgaggaagaggatggggaggaggaggaggattgcatccaggttaaggacgaggagggcgagagtggtgctgaggaggggcccgacttggaggagcctggtgctggatacaaaaaactgttctcagatgcccagccgctgcagcctttgcaggtgtaccaggcgcccctcagcctggccactgtgccccaccaggccctgggccgtacccagtcctcccctgctgcccctgggggcatgaagagccccccagaccagcccgtcaagcacctcttcaccacaggtgtggtctacgacacgttcatgctaaagcaccagtgcatgtgcgggaacacacacgtgcaccctgagcatgctggccggatccagagcatctggtcccggctgcaggagacaggcctgcttagcaagtgcgagcggatccgaggtcgcaaagccacgctagatgagatccagacagtgcactctgaataccacaccctgctctatgggaccagtcccctcaaccggcagaagctagacagcaagaagttgctcggccccatcagccagaagatgtatgctgtgctgccttgtgggggcatcggggtggacagtgacaccgtgtggaatgagatgcactcctccagtgctgtgcgcatggcagtgggctgcctgctggagctggccttcaaggtggctgcaggagagctcaaggtgagcgtgtgcttgtgacctcggtgccccttggcatggccctgctcctcagaggcagaggacaggggcagccttgggatcctttcagtgaggcactgtcctttgcaagctcaactctcaggcaccagggtgggaaggagttgccagctgggaattcaggttatgagggaccaacaaaaagacactaatgcccagtgctctcgtgggtgtctcgaggcagaaatagtgtctgcctgctcaagcctcatggttggcattcaaaatggtccgttgaggctgggcacagtggctcatacctgtaatctcaacactttgggaggccgaggtgggcagatagcttgagcccaggagtt

SEQ ID NO: 440443 - DNA, 613 bp, Homo sapiens
acaacataatctagtttacagaaaaatcttgtgctagaatacttttttctaaatcttgttgaaggacatctgtctcctctgggtggctactctgtcaccgccagatgttttggccacttgaccaggcagctgatgaccctggcagggggccgggtggtgctggccctggagggaggccatgacttgaccgccatctgtgatgcctctgaggcttgtgtctcggctctgctcagtgtagagctgcagcccttggatgaggcagtcttgcagcaaaagcccaacatcaacgcagtggccacgctagagaaagtcatcgagatccagagcaaacactggagctgtgtgcagaagttcgccgctggtctgggccggtccctgcgagaggcccaagcaggtgagaccgaggaggccgagactgtgagcgccatggccttgctgtcggtgggggccgagcaggcccaggctgcggcagcccgggaacacagccccaggccggcagaggagcccatggagcaggagcctgccctgtgacgccccggcccccatccctctgggcttcaccattgtgattttgtttattttttctattaaaaacaaaaagtcacacattcaa

SEQ ID NO: 440444 - DNA, 1288 bp, Homo sapiens
gcggcgagcggagccggaggagccgccgcgaagatggaggagccgtcgaggaggtgctgccgccgctgccgccgccgctgctgccgccgccgcccgcgaagccggagctcgagccgcagcggggatgccgttctgagtgcctgactgcctcgccccgaaggatggcctcggatgggcattagaggcacggcggccccgggctcccgtcccgtccgtctgtctgttatcgtctgtctctcttgacatcaccgcagctccaccccctcccgtcccagcccccaacgccagcttcctgcaggcccagagccggcatgaactctcccaacgagtcgcgatgggatgtcaggtcgggaaccatccttggaaatcctgccgcggacttctctgcacagcatccctgtgacagtggaggtgaagccggtgctgccaagagccatgcccagttccatggggggtgggggtggaggcagccccagccctgtggagctacggggggctctggtgggctctgtggaccccacactgcgggagcagcaactgcagcaggagctcctggcgctcaagcagcagcagcagctgcagaagcagctcctgttcgctgagttccagaaacagcatgaccacctgacaaggcagcatgaggtccagctgcagaagcacctcaagcagcagcaggagatgctggcagccaagcagcagcaggagatgctggcagccaagcggcagcaggagctggagcagcagcggcagcgggagcagcagcggcaggaagagctggagaagcagcggctggagcagcagctgctcatcctgcggaacaaggagaagagcaaagagagtgccattgccagcactgaggtaaagctgaggctccaggaattcctcttgtcgaagtcaaaggagcccacaccaggcggcctcaaccattccctcccacagcaccccaaatgctggggagcccaccatgcttctttggaccagagttcccctccccagagcggcccccctgggacgcctccctcctacaaactgcctttgcctgggccctacgacagtcgagacgacttccccctccgcaaaacagcctctgaacccaacttgaaagtgcgttcaaggctaaaacagaaggtggctgagcggagaagcagtcccctcctgcgtcgcaaggatgggactgttattagcacctttaagaagagagctgttgagatcacaggtgccgggcctgggggtaagggctgctctcatgtacctgttctgagggtctgggaatcaggggtcgggggta

SEQ ID NO: 440445 - DNA, 479 bp, Homo sapiens
gcggcgagcggagccggaggagccgccgcgaagatggaggagccgtcgaggaggtgctgccgccgctgccgccgccgctgctgccgccgccgcccgcgaagccggagctcgagccgcagcggggatgccgttctgagtgcctgactgcctcgccccgaaggatggcctcggatgggcattagaggcacggcggccccgggctcccgtcccgtccgtctgtctgttatcgtctgtctctcttgacatcaccgcagctccaccccctcccgtcccagcccccaacgccagcttcctgcaggcccagagccggcatgaactctcccaacgagtcgcgatgggatgtcaggtcgggaaccatccttggaaatcctgccgcggacttctctgcacagcatccctgtgacagtggggagaagacagagagccagaagagctgggattaagccctgggtcctccatctcctttccaggtgaccttg

SEQ ID NO: 440446 - DNA, 358 bp, Homo sapiens
gtgagcgcgccgccccggcccagatcccatcttccccggaccccgggacgcgaggcggcgccccctcctcctgctgtctctgtccgcgggctcccagcgcgcgcgccgcgctccgcgccccccttccttcctcccggccctgggagccagccggcgccccccgggagcatcggcagcccgtgagcgggacatcggggttgctgcgcgcgcccctccctgcccctcccagacaggggcgccttccctacaggtaagggaggggcccgccttctcgcgccctgcgcccccaaatggctcggagaccggccggggttgtctgatttgccccttccctggcggcgcatgttgcgttgcagag

SEQ ID NO: 440447 - DNA, 388 bp, Homo sapiens
caggccagagggctgaggggccagcaaggggtcagccagcactgggagccccttaggaagcttttccttggtcctaaggaacagctaatggccaggctttctgagtatgcgtttgtccaaaaaggccatgtttgcccctgttgtgagggatatctggggctgagtggggcagttagaggggtatgcatggcaaccctactccccaccctaagccttctcttctttcccctgccagctgcagcccttggatgaggcagtcttgcagcaaaagcccaacatcaacgcagtggccacgctagagaaagtcatcgagatccagagtgcgtgaggacacgtagaggggctcaggctgccaagggggcacggagcttgtgggagcaccaggact

SEQ ID NO: 440448 - DNA, 324 bp, Homo sapiens
ccggatgaggcacttccctacagtgtgggtcccgtcggcagtggcctgagggaacctgtgctctgcgggctgcccgaccaccttcccttcggtctgctccccgcctctggcggccccctccctggcatgctgctggtgcccaaggctcaggggctcgtggagatgctgcagaccatctatgagacagaatcctgtttctcagcgatgggatgtcaggtcgggaaccatccttggaaatcctgccgcggacttctctgcacagcatccctgtgacaggtaagtgccttgatgtccctgcctgccctctgtcatctggcatccttg

SEQ ID NO: 440449 - DNA, 1746 bp, Homo sapiens
gaccctgtttcaaagaaaaaaaaaaaaagctggagaggagagggggcaggtttgtggcagggtggctgcagtggccatggggaggtgtttggacctgggggttggagacagctccatgagccctgctgaggatcatggtagccaggctgggatcctgggcccagagcagtgctggctgacacataggtctgtggcccaggtgtggtctacgacacgttcatgctaaagcaccagtgcatgtgcgggaacacacacgtgcaccctgagcatgctggccggatccagagcatctggtcccggctgcaggagacaggcctgcttagcaagtgcgagcggatccgaggtcgcaaagccacgctagatgagatccagacagtgcactctgaataccacaccctgctctatgggaccagtcccctcaaccggcagaagctagacagcaagaagttgctcggccccatcagccagaagatgtatgctgtgctgccttgtgggggcatcggggtggacagtgacaccgtgtggaatgagatgcactcctccagtgctgtgcgcatggcagtgggctgcctgctggagctggccttcaaggtggctgcaggagagctcaagaatggatttgccatcatccggcccccaggacaccacgccgaggaatccacagccatgggattctgcttcttcaactctgtagccatcaccgcaaaactcctacagcagaagttgaacgtgggcaaggtcctcatcgtggactgggtaggcagtgagctggtggggctgggcaggggcgggtagagctaggaccagggtcagccttcaggaagtctcctcccccagccccaccttcaagcaccccagtcgtcctcatcctcgggtgctgggtgtgggtgcagaaggaagggcgctggggctcctgccggatgactaacgtcacattccaacagggctccctcctcaactatgaaagacatttagctcctgttccatcttggccctcacgttgcagtttcaagcaacgaaggggatttcctaccttgaacggtagtgacgctgccgccattgctagtagccgatatttcctcccaccccctacaattaggagcagactgtataccaggaacacaatgagtactttatggccacctcgagtagtaagaacgaggatgtccatttctgtgaacaaaggtgttgttgcgtgacttacccaaggccactcagctggggatgtcggcactgggtttcagaccaaggcttttggccccagcactctgctcttgctaccatgggtgcttcccaaaccctgctcctaatggtggaggcagaggcacacaccactctctgtgagctggggaagtagccaggaccaagcctcaggaaggacaaaatctcttggaagcccaattctggcttaaaaattcatgtaaatgttggatcctccttcagaatcttacgtgcttgtggttgggcacaatggctcaaagcctgtaatcccagcattttgggaggccaaggtgggtgaatcacttggggtcaggagttcgagaccaggatggccaacatggtgaaaccctgtctccactgaaaattcaaaaaaattagctaggtgtggtggcgggagcctgtaatcccacctattggggaggctgaggcaggagaattccttgaacctgggaagtggaggttgcagtgagtcaagatcatgccactgcactccagcctcgatgacagagtgagattctgtctcaa

SEQ ID NO: 440450 - DNA, 3763 bp, Homo sapiens
gcggcgagcggagccggaggagccgccgcgaagatggaggagccgtcgaggaggtgctgccgccgctgccgccgccgctgctgccgccgccgcccgcgaagccggagctcgagccgcagcggggatgccgttctgagtgcctgactgcctcgccccgaaggatggcctcggatgggcattagaggcacggcggccccgggctcccgtcccgtccgtctgtctgttatcgtctgtctctcttgacatcaccgcagctccaccccctcccgtcccagcccccaacgccagcttcctgcaggcccagagccggcatgaactctcccaacgagtcgcgatgggatgtcaggtcgggaaccatccttggaaatcctgccgcggacttctctgcacagcatccctgtgacagtggaggtgaagccggtgctgccaagagccatgcccagttccatggggggtgggggtggaggcagccccagccctgtggagctacggggggctctggtgggctctgtggaccccacactgcgggagcagcaactgcagcaggagctcctggcgctcaagcagcagcagcagctgcagaagcagctcctgttcgctgagttccagaaacagcatgaccacctgacaaggcagcatgaggtccagctgcagaagcacctcaagcagcagcaggagatgctggcagccaagcagcagcaggagatgctggcagccaagcggcagcaggagctggagcagcagcggcagcgggagcagcagcggcaggaagagctggagaagcagcggctggagcagcagctgctcatcctgcggaacaaggagaagagcaaagagagtgccattgccagcactgaggtaaagctgaggctccaggaattcctcttgtcgaagtcaaaggagcccacaccaggcggcctcaaccattccctcccacagcaccccaaatgctggggagcccaccatgcttctttggaccagagttcccctccccagagcggcccccctgggacgcctccctcctacaaactgcctttgcctgggccctacgacagtcgagacgacttccccctccgcaaaacagcctctgaacccaacttgaaagtgcgttcaaggctaaaacagaaggtggctgagcggagaagcagtcccctcctgcgtcgcaaggatgggactgttattagcacctttaagaagagagctgttgagatcacaggtgccgggcctggggcgtcgtccgtgtgtaacagcgcacccggctccggccccagctctcccaacagctcccacagcaccatcgctgagaatggctttactggctcagtccccaacatccccactgagatgctccctcagcaccgagccctccctctggacagctcccccaaccagttcagcctctacacgtctccttctctgcccaacatctccctagggctgcaggccacggtcactgtcaccaactcacacctcactgcctccccgaagctgtcgacacagcaggaggccgagaggcaggccctccagtccctgcggcagggtggcacgctgaccggcaagttcatgagcacatcctctattcctggctgcctgctgggcgtggcactggagggcgacgggagcccccacgggcatgcctccctgctgcagcatgtgctgttgctggagcaggcccggcagcagagcaccctcattgctgtgccactccacgggcagtccccactagtgacgggtgaacgtgtggccaccagcatgcggacggtaggcaagctcccgcggcatcggcccctgagccgcactcagtcctcaccgctgccgcagagtccccaggccctgcagcagctggtcatgcaacaacagcaccagcagttcctggagaagcagaagcagcagcagctacagctgggcaagatcctcaccaagacaggggagctgcccaggcagcccaccacccaccctgaggagacagaggaggagctgacggagcagcaggaggtcttgctgggggagggagccctgaccatgccccgggagggctccacagagagtgagagcacacaggaagacctggaggaggaggacgaggaagaggatggggaggaggaggaggattgcatccaggttaaggacgaggagggcgagagtggtgctgaggaggggcccgacttggaggagcctggtgctggatacaaaaaactgttctcagatgcccagccgctgcagcctttgcaggtgtaccaggcgcccctcagcctggccactgtgccccaccaggccctgggccgtacccagtcctcccctgctgcccctgggggcatgaagagccccccagaccagcccgtcaagcacctcttcaccacaggtgtggtctacgacacgttcatgctaaagcaccagtgcatgtgcgggaacacacacgtgcaccctgagcatgctggccggatccagagcatctggtcccggctgcaggagacaggcctgcttagcaagtgcgagcggatccgaggtcgcaaagccacgctagatgagatccagacagtgcactctgaataccacaccctgctctatgggaccagtcccctcaaccggcagaagctagacagcaagaagttgctcggccccatcagccagaagatgtatgctgtgctgccttgtgggggcatcggggtggacagtgacaccgtgtggaatgagatgcactcctccagtgctgtgcgcatggcagtgggctgcctgctggagctggccttcaaggtggctgcaggagagctcaagaatggatttgccatcatccggcccccaggacaccacgccgaggaatccacagccatgggattctgcttcttcaactctgtagccatcaccgcaaaactcctacagcagaagttgaacgtgggcaaggtcctcatcgtggactgggacattcaccatggcaatggcacccagcaggcgttctacaatgacccctctgtgctctacatctctctgcatcgctatgacaacgggaacttctttccaggctctggggctcctgaagaggttggtggaggaccaggcgtggggtacaatgtgaacgtggcatggacaggaggtgtggacccccccattggagacgtggagtaccttacagccttcaggacagtggtgatgcccattgcccacgagttctcacctgatgtggtcctagtctccgccgggtttgatgctgttgaaggacatctgtctcctctgggtggctactctgtcaccgccagatgttttggccacttgaccaggcagctgatgaccctggcagggggccgggtggtgctggccctggagggaggccatgacttgaccgccatctgtgatgcctctgaggcttgtgtctcggctctgctcagtgtagagctgcagcccttggatgaggcagtcttgcagcaaaagcccaacatcaacgcagtggccacgctagagaaagtcatcgagatccagagcaaacactggagctgtgtgcagaagttcgccgctggtctgggccggtccctgcgagaggcccaagcaggtgagaccgaggaggccgagactgtgagcgccatggccttgctgtcggtgggggccgagcaggcccaggctgcggcagcccgggaacacagccccaggccggcagaggagcccatggagcaggagcctgccctgtgacgccccggcccccatccctctgggcttcaccattgtgattttgtttattttttctattaaaaacaaaaagtcacacattcaa

SEQ ID NO: 440451 - DNA, 3805 bp, Homo sapiens
gcggcgagcggagccggaggagccgccgcgaagatggaggagccgtcgaggaggtgctgccgccgctgccgccgccgctgctgccgccgccgcccgcgaagccggagctcgagccgcagcggggatgccgttctgagtgcctgactgcctcgccccgaaggatggcctcggatgggcattagaggcacggcggccccgggctcccgtcccgtccgtctgtctgttatcgtctgtctctcttgacatcaccgcagctccaccccctcccgtcccagcccccaacgccagcttcctgcaggcccagagccggcatgaactctcccaacgagtcgcgatgggatgtcaggtcgggaaccatccttggaaatcctgccgcggacttctctgcacagcatccctgtgacagtggaggtgaagccggtgctgccaagagccatgcccagttccatggggggtgggggtggaggcagccccagccctgtggagctacggggggctctggtgggctctgtggaccccacactgcgggagcagcaactgcagcaggagctcctggcgctcaagcagcagcagcagctgcagaagcagctcctgttcgctgagttccagaaacagcatgaccacctgacaaggcagcatgaggtccagctgcagaagcacctcaagcagcagcaggagatgctggcagccaagcagcagcaggagatgctggcagccaagcggcagcaggagctggagcagcagcggcagcgggagcagcagcggcaggaagagctggagaagcagcggctggagcagcagctgctcatcctgcggaacaaggagaagagcaaagagagtgccattgccagcactgaggtaaagctgaggctccaggaattcctcttgtcgaagtcaaaggagcccacaccaggcggcctcaaccattccctcccacagcaccccaaatgctggggagcccaccatgcttctttggaccagagttcccctccccagagcggcccccctgggacgcctccctcctacaaactgcctttgcctgggccctacgacagtcgagacgacttccccctccgcaaaacagcctctgaacccaacttgaaagtgcgttcaaggctaaaacagaaggtggctgagcggagaagcagtcccctcctgcgtcgcaaggatgggactgttattagcacctttaagaagagagctgttgagatcacaggtgccgggcctggggcgtcgtccgtgtgtaacagcgcacccggctccggccccagctctcccaacagctcccacagcaccatcgctgagaatggctttactggctcagtccccaacatccccactgagatgctccctcagcaccgagccctccctctggacagctcccccaaccagttcagcctctacacgtctccttctctgcccaacatctccctagggctgcaggccacggtcactgtcaccaactcacacctcactgcctccccgaagctgtcgacacagcaggaggccgagaggcaggccctccagtccctgcggcagggtggcacgctgaccggcaagttcatgagcacatcctctattcctggctgcctgctgggcgtggcactggagggcgacgggagcccccacgggcatgcctccctgctgcagcatgtgctgttgctggagcaggcccggcagcagagcaccctcattgctgtgccactccacgggcagtccccactagtgacgggtgaacgtgtggccaccagcatgcggacggtaggcaagctcccgcggcatcggcccctgagccgcactcagtcctcaccgctgccgcagagtccccaggccctgcagcagctggtcatgcaacaacagcaccagcagttcctggagaagcagaagcagcagcagctacagctgggcaagatcctcaccaagacaggggagctgcccaggcagcccaccacccaccctgaggagacagaggaggagctgacggagcagcaggaggtcttgctgggggagggagccctgaccatgccccgggagggctccacagagagtgagagcacacaggaagacctggaggaggaggacgaggaagaggatggggaggaggaggaggattgcatccaggttaaggacgaggagggcgagagtggtgctgaggaggggcccgacttggaggagcctggtgctggatacaaaaaactgttctcagatgcccagccgctgcagcctttgcaggtgtaccaggcgcccctcagcctggccactgtgccccaccaggccctgggccgtacccagtcctcccctgctgcccctgggggcatgaagagccccccagaccagcccgtcaagcacctcttcaccacaggtgtggtctacgacacgttcatgctaaagcaccagtgcatgtgcgggaacacacacgtgcaccctgagcatgctggccggatccagagcatctggtcccggctgcaggagacaggcctgcttagcaagtgcgagcggatccgaggtcgcaaagccacgctagatgagatccagacagtgcactctgaataccacaccctgctctatgggaccagtcccctcaaccggcagaagctagacagcaagaagttgctcggccccatcagccagaagatgtatgctgtgctgccttgtgggggcatcggggtggacagtgacaccgtgtggaatgagatgcactcctccagtgctgtgcgcatggcagtgggctgcctgctggagctggccttcaaggtggctgcaggagagctcaagaatggatttgccatcatccggcccccaggacaccacgccgaggaatccacagccatgggattctgcttcttcaactctgtagccatcaccgcaaaactcctacagcagaagttgaacgtgggcaaggtcctcatcgtggactgggacattcaccatggcaatggcacccagcaggcgttctacaatgacccctctgtgctctacatctctctgcatcgctatgacaacgggaacttctttccaggctctggggctcctgaagaggttggtggaggaccaggcgtggggtacaatgtgaacgtggcatggacaggaggtgtggacccccccattggagacgtggagtaccttacagccttcaggacagtggtgatgcccattgcccacgagttctcacctgatgtggtcctagtctccgccgggtttgatgctgttgaaggacatctgtctcctctgggtggctactctgtcaccgccagatgttttggccacttgaccaggcagctgatgaccctggcagggggccgggtggtgctggccctggagggaggccatgacttgaccgccatctgtgatgcctctgaggcttgtgtctcggctctgctcagtgtagagctgcagcccttggatgaggcagtcttgcagcaaaagcccaacatcaacgcagtggccacgctagagaaagtcatcgagatccagagcaaacactggagctgtgtgcagaagttcgccgctggtctgggccggtccctgcgagaggcccaagcaggtgagaccgaggaggccgagactgtgagcgccatggccttgctgtcggtgggggccgagcaggcccaggctgcggcagcccgggaacacagccccaggccggcagaggagcccatggagcaggagcctgccctgtgacgccccggcccccatccctctgggcttcaccattgtgattttgtttattttttctattaaaaacaaaaagtcacacattcaaaaaataaaaaaaaaaaatcgcttttggggaaaaataaggctt

SEQ ID NO: 440452 - DNA, 4608 bp, Homo sapiens
gcggcgagcggagccggaggagccgccgcgaagatggaggagccgtcgaggaggtgctgccgccgctgccgccgccgctgctgccgccgccgcccgcgaagccggagctcgagccgcagcggggatgccgttctgagtgcctgactgcctcgccccgaaggatggcctcggatgggcattagaggcacggcggccccgggctcccgtcccgtccgtctgtctgttatcgtctgtctctcttgacatcaccgcagctccaccccctcccgtcccagcccccaacgccagcttcctgcaggcccagagccggcatgaactctcccaacgagtcgcgatgggatgtcaggtcgggaaccatccttggaaatcctgccgcggacttctctgcacagcatccctgtgacagtggaggtgaagccggtgctgccaagagccatgcccagttccatggggggtgggggtggaggcagccccagccctgtggagctacggggggctctggtgggctctgtggaccccacactgcgggagcagcaactgcagcaggagctcctggcgctcaagcagcagcagcagctgcagaagcagctcctgttcgctgagttccagaaacagcatgaccacctgacaaggcagcatgaggtccagctgcagaagcacctcaagcagcagcaggagatgctggcagccaagcagcagcaggagatgctggcagccaagcggcagcaggagctggagcagcagcggcagcgggagcagcagcggcaggaagagctggagaagcagcggctggagcagcagctgctcatcctgcggaacaaggagaagagcaaagagagtgccattgccagcactgaggtaaagctgaggctccaggaattcctcttgtcgaagtcaaaggagcccacaccaggcggcctcaaccattccctcccacagcaccccaaatgctggggagcccaccatgcttctttggaccagagttcccctccccagagcggcccccctgggacgcctccctcctacaaactgcctttgcctgggccctacgacagtcgagacgacttccccctccgcaaaacagcctctgaacccaacttgaaagtgcgttcaaggctaaaacagaaggtggctgagcggagaagcagtcccctcctgcgtcgcaaggatgggactgttattagcacctttaagaagagagctgttgagatcacaggtgccgggcctggggcgtcgtccgtgtgtaacagcgcacccggctccggccccagctctcccaacagctcccacagcaccatcgctgagaatggctttactggctcagtccccaacatccccactgagatgctccctcagcaccgagccctccctctggacagctcccccaaccagttcagcctctacacgtctccttctctgcccaacatctccctagggctgcaggccacggtcactgtcaccaactcacacctcactgcctccccgaagctgtcgacacagcaggaggccgagaggcaggccctccagtccctgcggcagggtggcacgctgaccggcaagttcatgagcacatcctctattcctggctgcctgctgggcgtggcactggagggcgacgggagcccccacgggcatgcctccctgctgcagcatgtgctgttgctggagcaggcccggcagcagagcaccctcattgctgtgccactccacgggcagtccccactagtgacgggtgaacgtgtggccaccagcatgcggacggtaggcaagctcccgcggcatcggcccctgagccgcactcagtcctcaccgctgccgcagagtccccaggccctgcagcagctggtcatgcaacaacagcaccagcagttcctggagaagcagaagcagcagcagctacagctgggcaagatcctcaccaagacaggggagctgcccaggcagcccaccacccaccctgaggagacagaggaggagctgacggagcagcaggaggtcttgctgggggagggagccctgaccatgccccgggagggctccacagagagtgagagcacacaggaagacctggaggaggaggacgaggaagaggatggggaggaggaggaggattgcatccaggttaaggacgaggagggcgagagtggtgctgaggaggggcccgacttggaggagcctggtgctggatacaaaaaactgttctcagatgcccagccgctgcagcctttgcaggtgtaccaggcgcccctcagcctggccactgtgccccaccaggccctgggccgtacccagtcctcccctgctgcccctgggggcatgaagagccccccagaccagcccgtcaagcacctcttcaccacaggtgtggtctacgacacgttcatgctaaagcaccagtgcatgtgcgggaacacacacgtgcaccctgagcatgctggccggatccagagcatctggtcccggctgcaggagacaggcctgcttagcaagtgcgagcggatccgaggtcgcaaagccacgctagatgagatccagacagtgcactctgaataccacaccctgctctatgggaccagtcccctcaaccggcagaagctagacagcaagaagttgctcggccccatcagccagaagatgtatgctgtgctgccttgtgggggcatcggggtggacagtgacaccgtgtggaatgagatgcactcctccagtgctgtgcgcatggcagtgggctgcctgctggagctggccttcaaggtggctgcaggagagctcaagaatggatttgccatcatccggcccccaggacaccacgccgaggaatccacagccatgggattctgcttcttcaactctgtagccatcaccgcaaaactcctacagcagaagttgaacgtgggcaaggtcctcatcgtggactgggtaggcagtgagctggtggggctgggcaggggcgggtagagctaggaccagggtcagccttcaggaagtctcctcccccagccccaccttcaagcaccccagtcgtcctcatcctcgggtgctgggtgtgggtgcagaaggaagggcgctggggctcctgccggatgactaacgtcacattccaacagggctccctcctcaactatgaaagacatttagctcctgttccatcttggccctcacgttgcagtttcaagcaacgaaggggatttcctaccttgaacggtagtgacgctgccgccattgctagtagccgatatttcctcccaccccctacaattaggagcagactgtataccaggaacacaatgagtactttatggccacctcgagtagtaagaacgaggatgtccatttctgtgaacaaaggtgttgttgcgtgacttacccaaggccactcagctggggatgtcggcactgggtttcagaccaaggcttttggccccagcactctgctcttgctaccatgggtgcttcccaaaccctgctcctaatggtggaggcagaggcacacaccactctctgtgagctggggaagtagccaggaccaagcctcaggaaggacaaaatctcttggaagcccaattctggcttaaaaattcatgtaaatgttggatcctccttcagaatcttacgtgcttgtggttgggcacaatggctcaaagcctgtaatcccaaaatgctaggattacaggcatgagctacagtgctcagctgacaggtggcatttgaccattgggtcagagcgcgggccattttcccgatgcttctacctcccctcataggacattcaccatggcaatggcacccagcaggcgttctacaatgacccctctgtgctctacatctctctgcatcgctatgacaacgggaacttctttccaggctctggggctcctgaagaggttggtggaggaccaggcgtggggtacaatgtgaacgtggcatggacaggaggtgtggacccccccattggagacgtggagtaccttacagccttcaggacagtggtgatgcccattgcccacgagttctcacctgatgtggtcctagtctccgccgggtttgatgctgttgaaggacatctgtctcctctgggtggctactctgtcaccgccagatgttttggccacttgaccaggcagctgatgaccctggcagggggccgggtggtgctggccctggagggaggccatgacttgaccgccatctgtgatgcctctgaggcttgtgtctcggctctgctcagtgtagagctgcagcccttggatgaggcagtcttgcagcaaaagcccaacatcaacgcagtggccacgctagagaaagtcatcgagatccagagcaaacactggagctgtgtgcagaagttcgccgctggtctgggccggtccctgcgagaggcccaagcaggtgagaccgaggaggccgagactgtgagcgccatggccttgctgtcggtgggggccgagcaggcccaggctgcggcagcccgggaacacagccccaggccggcagaggagcccatggagcaggagcctgccctgtgacgccccggcccccatccctctgggcttcaccattgtgattttgtttattttttctattaaaaacaaaaagtcacacattcaa

SEQ ID NO: 440453 - DNA, 3112 bp, Homo sapiens
gcggcgagcggagccggaggagccgccgcgaagatggaggagccgtcgaggaggtgctgccgccgctgccgccgccgctgctgccgccgccgcccgcgaagccggagctcgagccgcagcggggatgccgttctgagtgcctgactgcctcgccccgaaggatggcctcggatgggcattagaggcacggcggccccgggctcccgtcccgtccgtctgtctgttatcgtctgtctctcttgacatcaccgcagctccaccccctcccgtcccagcccccaacgccagcttcctgcaggcccagagccggcatgaactctcccaacgagtcgcgatgggatgtcaggtcgggaaccatccttggaaatcctgccgcggacttctctgcacagcatccctgtgacagtggaggtgaagccggtgctgccaagagccatgcccagttccatggggggtgggggtggaggcagccccagccctgtggagctacggggggctctggtgggctctgtggaccccacactgcgggagcagcaactgcagcaggagctcctggcgctcaagcagcagcagcagctgcagaagcagctcctgttcgctgagttccagaaacagcatgaccacctgacaaggcagcatgaggtccagctgcagaagcacctcaagcagcagcaggagatgctggcagccaagcagcagcaggagatgctggcagccaagcggcagcaggagctggagcagcagcggcagcgggagcagcagcggcaggaagagctggagaagcagcggctggagcagcagctgctcatcctgcggaacaaggagaagagcaaagagagtgccattgccagcactgaggtaaagctgaggctccaggaattcctcttgtcgaagtcaaaggagcccacaccaggcggcctcaaccattccctcccacagcaccccaaatgctggggagcccaccatgcttctttggaccagagttcccctccccagagcggcccccctgggacgcctccctcctacaaactgcctttgcctgggccctacgacagtcgagacgacttccccctccgcaaaacagcctctgaacccaacttgaaagtgcgttcaaggctaaaacagaaggtggctgagcggagaagcagtcccctcctgcgtcgcaaggatgggactgttattagcacctttaagaagagagctgttgagatcacaggtgccgggcctggggcgtcgtccgtgtgtaacagcgcacccggctccggccccagctctcccaacagctcccacagcaccatcgctgagaatggctttactggctcagtccccaacatccccactgaggtcttgctgggggagggagccctgaccatgccccgggagggctccacagagagtgagagcacacaggaagacctggaggaggaggacgaggaagaggatggggaggaggaggaggattgcatccaggttaaggacgaggagggcgagagtggtgctgaggaggggcccgacttggaggagcctggtgctggatacaaaaaactgttctcagatgcccagccgctgcagcctttgcaggtgtaccaggcgcccctcagcctggccactgtgccccaccaggccctgggccgtacccagtcctcccctgctgcccctgggggcatgaagagccccccagaccagcccgtcaagcacctcttcaccacaggtgtggtctacgacacgttcatgctaaagcaccagtgcatgtgcgggaacacacacgtgcaccctgagcatgctggccggatccagagcatctggtcccggctgcaggagacaggcctgcttagcaagtgcgagcggatccgaggtcgcaaagccacgctagatgagatccagacagtgcactctgaataccacaccctgctctatgggaccagtcccctcaaccggcagaagctagacagcaagaagttgctcggccccatcagccagaagatgtatgctgtgctgccttgtgggggcatcggggtggacagtgacaccgtgtggaatgagatgcactcctccagtgctgtgcgcatggcagtgggctgcctgctggagctggccttcaaggtggctgcaggagagctcaagaatggatttgccatcatccggcccccaggacaccacgccgaggaatccacagccatgggattctgcttcttcaactctgtagccatcaccgcaaaactcctacagcagaagttgaacgtgggcaaggtcctcatcgtggactgggacattcaccatggcaatggcacccagcaggcgttctacaatgacccctctgtgctctacatctctctgcatcgctatgacaacgggaacttctttccaggctctggggctcctgaagaggttggtggaggaccaggcgtggggtacaatgtgaacgtggcatggacaggaggtgtggacccccccattggagacgtggagtaccttacagccttcaggacagtggtgatgcccattgcccacgagttctcacctgatgtggtcctagtctccgccgggtttgatgctgttgaaggacatctgtctcctctgggtggctactctgtcaccgccagatgttttggccacttgaccaggcagctgatgaccctggcagggggccgggtggtgctggccctggagggaggccatgacttgaccgccatctgtgatgcctctgaggcttgtgtctcggctctgctcagtgtagagctgcagcccttggatgaggcagtcttgcagcaaaagcccaacatcaacgcagtggccacgctagagaaagtcatcgagatccagagcaaacactggagctgtgtgcagaagttcgccgctggtctgggccggtccctgcgagaggcccaagcaggtgagaccgaggaggccgagactgtgagcgccatggccttgctgtcggtgggggccgagcaggcccaggctgcggcagcccgggaacacagccccaggccggcagaggagcccatggagcaggagcctgccctgtgacgccccggcccccatccctctgggcttcaccattgtgattttgtttattttttctattaaaaacaaaaagtcacacattcaa

SEQ ID NO: 440454 - DNA, 1209 bp, Homo sapiens
tcccatctgcctgttttaaattccctactagccttaatgttttccccaaaactgtgaggtggaatgggttctgtagggagatatgccacatttatcccatggttttgaatatcacctacacagtgccaccccacagaggctcagacctagttagagaagtgtggggtgtgcaataccattgtgaacagaatatggatgccctgtggccaagggtggagtcctgggctcaagcgatcctcccagccctcagcctcccaaaatgctaggattacaggcatgagctacagtgctcagctgacaggtggcatttgaccattgggtcagagcgcgggccattttcccgatgcttctacctcccctcataggacattcaccatggcaatggcacccagcaggcgttctacaatgacccctctgtgctctacatctctctgcatcgctatgacaacgggaacttctttccaggctctggggctcctgaagaggttggtggaggaccaggcgtggggtacaatgtgaacgtggcatggacaggaggtgtggacccccccattggagacgtggagtaccttacagccttcaggacagtggtgatgcccattgcccacgagttctcacctgatgtggtcctagtctccgccgggtttgatgctgttgaaggacatctgtctcctctgggtggctactctgtcaccgccagatgttttggccacttgaccaggcagctgatgaccctggcagggggccgggtggtgctggccctggagggaggccatgacttgaccgccatctgtgatgcctctgaggcttgtgtctcggctctgctcagtgtagagctgcagcccttggatgaggcagtcttgcagcaaaagcccaacatcaacgcagtggccacgctagagaaagtcatcgagatccagagcaaacactggagctgtgtgcagaagttcgccgctggtctgggccggtccctgcgagaggcccaagcaggtgagaccgaggaggccgagactgtgagcgccatggccttgctgtcggtgggggccgagcaggcccaggctgcggcagcccgggaacacagccccaggccggcagaggagcccatggagcaggagcctgccctgtgacgccccggcccccatccctctgggcttcaccattgtgattttgtttattttttctattaaaaacaaaaagtcacacattcaa

SEQ ID NO: 440455 - DNA, 2036 bp, Homo sapiens
gcggcgagcggagccggaggagccgccgcgaagatggaggagccgtcgaggaggtgctgccgccgctgccgccgccgctgctgccgccgccgcccgcgaagccggagctcgagccgcagcggggatgccgttctgagtgcctgactgcctcgccccgaaggatggcctcggatgggcattagaggcacggcggccccgggctcccgtcccgtccgtctgtctgttatcgtctgtctctcttgacatcaccgcagctccaccccctcccgtcccagcccccaacgccagcttcctgcaggcccagagccggcatgaactctcccaacgagtcgcgatgggatgtcaggtcgggaaccatccttggaaatcctgccgcggacttctctgcacagcatccctgtgacagtggaggtgaagccggtgctgccaagagccatgcccagttccatggggggtgggggtggaggcagccccagccctgtggagctacggggggctctggtgggctctgtggaccccacactgcgggagcagcaactgcagcaggagctcctggcgctcaagcagcagcagcagctgcagaagcagctcctgttcgctgagttccagaaacagcatgaccacctgacaaggcagcatgaggtccagctgcagaagcacctcaagcagcagcaggagatgctggcagccaagcagcagcaggagatgctggcagccaagcggcagcaggagctggagcagcagcggcagcgggagcagcagcggcaggaagagctggagaagcagcggctggagcagcagctgctcatcctgcggaacaaggagaagagcaaagagagtgccattgccagcactgaggtaaagctgaggctccaggaattcctcttgtcgaagtcaaaggagcccacaccaggcggcctcaaccattccctcccacagcaccccaaatgctggggagcccaccatgcttctttggaccagagttcccctccccagagcggcccccctgggacgcctccctcctacaaactgcctttgcctgggccctacgacagtcgagacgacttccccctccgcaaaacagcctctgaacccaacttgaaagtgcgttcaaggctaaaacagaaggtggctgagcggagaagcagtcccctcctgcgtcgcaaggatgggactgttattagcacctttaagaagagagctgttgagatcacaggtgccgggcctggggcgtcgtccgtgtgtaacagcgcacccggctccggccccagctctcccaacagctcccacagcaccatcgctgagaatggctttactggctcagtccccaacatccccactgagatgctccctcagcaccgagccctccctctggacagctcccccaaccagttcagcctctacacgtctccttctctgcccaacatctccctagggctgcaggccacggtcactgtcaccaactcacacctcactgcctccccgaagctgtcgacacagcaggaggccgagaggcaggccctccagtccctgcggcagggtggcacgctgaccggcaagttcatgagcacatcctctattcctggctgcctgcggaggccatgacttgaccgccatctgtgatgcctctgaggcttgtgtctcggctctgctcagtgtagagctgcagcccttggatgaggcagtcttgcagcaaaagcccaacatcaacgcagtggccacgctagagaaagtcatcgagatccagagcaaacactggagctgtgtgcagaagttcgccgctggtctgggccggtccctgcgagaggcccaagcaggtgagaccgaggaggccgagactgtgagcgccatggccttgctgtcggtgggggccgagcaggcccaggctgcggcagcccgggaacacagccccaggccggcagaggagcccatggagcaggagcctgccctgtgacgccccggcccccatccctctgggcttcaccattgtgattttgtttattttttctattaaaaacaaaaagtcacacattcaa

SEQ ID NO: 440456 - DNA, 581 bp, Homo sapiens
ctcctcttactggctcttgaattgattgattacctttcgccatttcttcttcctcccttcacccatcctcaaaggttttggccacttgaccaggcagctgatgaccctggcagggggccgggtggtgctggccctggagggaggccatgacttgaccgccatctgtgatgcctctgaggcttgtgtctcggctctgctcagtgtagagctgcagcccttggatgaggcagtcttgcagcaaaagcccaacatcaacgcagtggccacgctagagaaagtcatcgagatccagagcaaacactggagctgtgtgcagaagttcgccgctggtctgggccggtccctgcgagaggcccaagcaggtgagaccgaggaggccgagactgtgagcgccatggccttgctgtcggtgggggccgagcaggcccaggctgcggcagcccgggaacacagccccaggccggcagaggagcccatggagcaggagcctgccctgtgacgccccggcccccatccctctgggcttcaccattgtgattttgtttattttttctattaaaaacaaaaagtcacacattcaa

SEQ ID NO: 440457 - DNA, 2774 bp, Homo sapiens
acgccggtgggcggggggaggaggcggccctagcgccattttgtgggagcgaagcggtggctgggctgcgcttgggtccgtcgctgcttcggtgtccctgtcgggcttcccagcagcggcctagcgggaaaagtaaaagatgtctgaatatattcgggtaaccgaagatgagaacgatgagcccattgaaataccatcggaagacgatgggacggtgctgctctccacggttacagcccagtttccaggggcgtgtgggcttcgctacaggaatccagtgtctcagtgtatgagaggtgtccggctggtagaaggaattctgcatgccccagatgctggctggggaaatctggtgtatgttgtcaactatccaaaagataacaaaagaaaaatggatgagacagatgcttcatcagcagtgaaagtgaaaagagcagtccagaaaacatccgatttaatagtgttgggtctcccatggaaaacaaccgaacaggacctgaaagagtattttagtacctttggagaagttcttatggtgcaggtcaagaaagatcttaagactggtcattcaaaggggtttggctttgttcgttttacggaatatgaaacacaagtgaaagtaatgtcacagcgacatatgatagatggacgatggtgtgactgcaaacttcctaattctaagcaaagccaagatgagcctttgagaagcagaaaagtgtttgtggggcgctgtacagaggacatgactgaggatgagctgcgggagttcttctctcagtacggggatgtgatggatgtcttcatccccaagccattcagggcctttgcctttgttacatttgcagatgatcagattgcgcagtctctttgtggagaggacttgatcattaaaggaatcagcgttcatatatccaatgccgaacctaagcacaatagcaatagacagttagaaagaagtggaagatttggtggtaatccaggtggctttgggaatcagggtggatttggtaatagcagagggggtggagctggtttgggaaacaatcaaggtagtaatatgggtggtgggatgaactttggtgcgttcagcattaatccagccatgatggctgccgcccaggcagcactacagagcagttggggtatgatgggcatgttagccagccagcagaaccagtcaggcccatcgggtaataaccaaaaccaaggcaacatgcagagggagccaaaccaggccttcggttctggaaataactcttatagtggctctaattctggtgcagcaattggttggggatcagcatccaatgcagggtcgggcagtggttttaatggaggctttggctcaagcatggattctaagtcttctggctggggaatgtagacagtggggttgtggttggttggtatagaatggtgggaattcaaatttttctaaactcatggtaagtatattgtaaaatacatatgtactaagaattttcaaaattggtttgttcagtgtggagtatattcagcagtatttttgacatttttctttagaaaaaggaagagctaaaggaattttataagttttgttacatgaaaggttgaaatattgagtggttgaaagtgaactgctgtttgcctgattggtaaaccaacacactacaattgatatcaaaaggtttctcctgtaatattttatccctggacttgtcaagtgaattctttgcatgttcaaaacggaaaccattgattagaactacattctttaccccttgttttaatttgaaccccaccatatggatttttttccttaagaaaatctccttttaggagatcatggtgtcacagtgtttggttcttttgttttgttttttaacacttgtctcccctcatacacaaaagtacaatatgaagccttcatttaatctctgcagttcatctcatttcaaatgtttatggaagaagcacttcattgaaagtagtgctgtaaatattctgccataggaatactgtctacatgctttctcattcaagaattcgtcatcacgcatcacaggccgcgtctttgacggtgggtgtcccatttttatccgctactctttatttcatggagtcgtatcaacgctatgaacgcaaggctgtgatatggaaccagaaggctgtctgaacttttgaaaccttgtgtgggattgatggtggtgccgaggcatgaaaggctagtatgagcgagaaaaggagagagcgcgtgcagagacttggtggtgcataatggatattttttaacttggcgagatgtgtctctcaatcctgtggctttggtgagagagtgtgcagagagcaatgatagcaaataatgtacgaatgttttttgcattcaaaggacatccacatctgttggaagacttttaagtgagtttttgttcttagataacccacattagatgaatgtgttaagtgaaatgatacttgtactccccctacccctttgtcaactgctgtgaatgctgtatggtgtgtgttctcttctgttactgatatgtaagtgtggcaatgtgaactgaagctgatgggctgagaacatggactgagcttgtggtgtgctttgcaggaggacttgaagcagagttcaccagtgagctcaggtgtctcaaagaagggtggaagttctaatgtctgttagctacccataagaatgctgtttgctgcagttctgtgtcctgtgcttggatgctttttataagagttgtcattgttggaaattcttaaataagactgatttaaataat

SEQ ID NO: 440458 - DNA, 2733 bp, Homo sapiens
acgccggtgggcggggggaggaggcggccctagcgccattttgtgggagcgaagcggtggctgggctgcgcttgggtccgtcgctgcttcggtgtccctgtcgggcttcccagcagcggcctagcgggaaaagtaaaagatgtctgaatatattcgggtaaccgaagatgagaacgatgagcccattgaaataccatcggaagacgatgggacggtgctgctctccacggttacagcccagtttccaggggcgtgtgggcttcgctacaggaatccagtgtctcagtgtatgagaggtgtccggctggtagaaggaattctgcatgccccagatgctggctggggaaatctggtgtatgttgtcaactatccaaaagataacaaaagaaaaatggatgagacagatgcttcatcagcagtgaaagtgaaaagagcagtccagaaaacatccgatttaatagtgttgggtctcccatggaaaacaaccgaacaggacctgaaagagtattttagtacctttggagaagttcttatggtgcaggtcaagaaagatcttaagactggtcattcaaaggggtttggctttgttcgttttacggaatatgaaacacaagtgaaagtaatgtcacagcgacatatgatagatggacgatggtgtgactgcaaacttcctaattctaagcaaagccaagatgagcctttgagaagcagaaaagtgtttgtggggcgctgtacagaggacatgactgaggatgagctgcgggagttcttctctcagtacggggatgtgatggatgtcttcatccccaagccattcagggcctttgcctttgttacatttgcagatgatcagattgcgcagtctctttgtggagaggacttgatcattaaaggaatcagcgttcatatatccaatgccgaacctaagcacaatagcaatagacagttagaaagaagtggaagatttggtggtaatccaggtggctttgggaatcagggtggatttggtaatagcagagggggtggagctggtttgggaaacaatcaaggtagtaatatgggtggtgggatgaactttggtgcgttcagcattaatccagccatgatggctgccgcccaggcagcactacagagcagttggggtatgatgggcatgttagccagccagcagaaccagtcaggcccatcgggtaataaccaaaaccaaggcaacatgcagagggagccaaaccaggccttcggttctggaaataactcttatagtggctctaattctggtgcagcaattggttggggatcagcatccaatgcagggtcgggcagtggttttaatggaggctttggctcaagcatggattctaagtcttctggctggggaatgtagacagtggggttgtggttggttggtatagaatggtgggaattcaaatttttctaaactcatggtaagtatattgtaaaatacatatgtactaagaattttcaaaattggtttgttcagtgtggagtatattcagcagtatttttgacatttttctttagaaaaaggaagagctaaaggaattttataagttttgttacatgaaaggttgaaatattgagtggttgaaagtgaactgctgtttgcctgattggtaaaccaacacactacaattgatatcaaaaggtttctcctgtaatattttatccctggacttgtcaagtgaattctttgcatgttcaaaacggaaaccattgattagaactacattctttaccccttgttttaatttgaaccccaccatatggatttttttccttaagaaaatctccttttaggagatcatggtgtcacagtgtttggttcttttgttttgttttttaacacttgtctcccctcatacactctcatttcaaatgtttatggaagaagcacttcattgaaagtagtgctgtaaatattctgccataggaatactgtctacatgctttctcattcaagaattcgtcatcacgcatcacaggccgcgtctttgacggtgggtgtcccatttttatccgctactctttatttcatggagtcgtatcaacgctatgaacgcaaggctgtgatatggaaccagaaggctgtctgaacttttgaaaccttgtgtgggattgatggtggtgccgaggcatgaaaggctagtatgagcgagaaaaggagagagcgcgtgcagagacttggtggtgcataatggatattttttaacttggcgagatgtgtctctcaatcctgtggctttggtgagagagtgtgcagagagcaatgatagcaaataatgtacgaatgttttttgcattcaaaggacatccacatctgttggaagacttttaagtgagtttttgttcttagataacccacattagatgaatgtgttaagtgaaatgatacttgtactccccctacccctttgtcaactgctgtgaatgctgtatggtgtgtgttctcttctgttactgatatgtaagtgtggcaatgtgaactgaagctgatgggctgagaacatggactgagcttgtggtgtgctttgcaggaggacttgaagcagagttcaccagtgagctcaggtgtctcaaagaagggtggaagttctaatgtctgttagctacccataagaatgctgtttgctgcagttctgtgtcctgtgcttggatgctttttataagagttgtcattgttggaaattcttaaataagactgatttaaataat

SEQ ID NO: 440459 - DNA, 2719 bp, Homo sapiens
agcggagctccgaccgagacctgggccggcggttggtcggccgaaaccatctgctacgttacgtggggggaggaaaagtaaaagatgtctgaatatattcgggtaaccgaagatgagaacgatgagcccattgaaataccatcggaagacgatgggacggtgctgctctccacggttacagcccagtttccaggggcgtgtgggcttcgctacaggaatccagtgtctcagtgtatgagaggtgtccggctggtagaaggaattctgcatgccccagatgctggctggggaaatctggtgtatgttgtcaactatccaaaagataacaaaagaaaaatggatgagacagatgcttcatcagcagtgaaagtgaaaagagcagtccagaaaacatccgatttaatagtgttgggtctcccatggaaaacaaccgaacaggacctgaaagagtattttagtacctttggagaagttcttatggtgcaggtcaagaaagatcttaagactggtcattcaaaggggtttggctttgttcgttttacggaatatgaaacacaagtgaaagtaatgtcacagcgacatatgatagatggacgatggtgtgactgcaaacttcctaattctaagcaaagccaagatgagcctttgagaagcagaaaagtgtttgtggggcgctgtacagaggacatgactgaggatgagctgcgggagttcttctctcagtacggggatgtgatggatgtcttcatccccaagccattcagggcctttgcctttgttacatttgcagatgatcagattgcgcagtctctttgtggagaggacttgatcattaaaggaatcagcgttcatatatccaatgccgaacctaagcacaatagcaatagacagttagaaagaagtggaagatttggtggtaatccaggtggctttgggaatcagggtggatttggtaatagcagagggggtggagctggtttgggaaacaatcaaggtagtaatatgggtggtgggatgaactttggtgcgttcagcattaatccagccatgatggctgccgcccaggcagcactacagagcagttggggtatgatgggcatgttagccagccagcagaaccagtcaggcccatcgggtaataaccaaaaccaaggcaacatgcagagggagccaaaccaggccttcggttctggaaataactcttatagtggctctaattctggtgcagcaattggttggggatcagcatccaatgcagggtcgggcagtggttttaatggaggctttggctcaagcatggattctaagtcttctggctggggaatgtagacagtggggttgtggttggttggtatagaatggtgggaattcaaatttttctaaactcatggtaagtatattgtaaaatacatatgtactaagaattttcaaaattggtttgttcagtgtggagtatattcagcagtatttttgacatttttctttagaaaaaggaagagctaaaggaattttataagttttgttacatgaaaggttgaaatattgagtggttgaaagtgaactgctgtttgcctgattggtaaaccaacacactacaattgatatcaaaaggtttctcctgtaatattttatccctggacttgtcaagtgaattctttgcatgttcaaaacggaaaccattgattagaactacattctttaccccttgttttaatttgaaccccaccatatggatttttttccttaagaaaatctccttttaggagatcatggtgtcacagtgtttggttcttttgttttgttttttaacacttgtctcccctcatacacaaaagtacaatatgaagccttcatttaatctctgcagttcatctcatttcaaatgtttatggaagaagcacttcattgaaagtagtgctgtaaatattctgccataggaatactgtctacatgctttctcattcaagaattcgtcatcacgcatcacaggccgcgtctttgacggtgggtgtcccatttttatccgctactctttatttcatggagtcgtatcaacgctatgaacgcaaggctgtgatatggaaccagaaggctgtctgaacttttgaaaccttgtgtgggattgatggtggtgccgaggcatgaaaggctagtatgagcgagaaaaggagagagcgcgtgcagagacttggtggtgcataatggatattttttaacttggcgagatgtgtctctcaatcctgtggctttggtgagagagtgtgcagagagcaatgatagcaaataatgtacgaatgttttttgcattcaaaggacatccacatctgttggaagacttttaagtgagtttttgttcttagataacccacattagatgaatgtgttaagtgaaatgatacttgtactccccctacccctttgtcaactgctgtgaatgctgtatggtgtgtgttctcttctgttactgatatgtaagtgtggcaatgtgaactgaagctgatgggctgagaacatggactgagcttgtggtgtgctttgcaggaggacttgaagcagagttcaccagtgagctcaggtgtctcaaagaagggtggaagttctaatgtctgttagctacccataagaatgctgtttgctgcagttctgtgtcctgtgcttggatgctttttataagagttgtcattgttggaaattcttaaataagactgatttaaataat

SEQ ID NO: 440460 - DNA, 2717 bp, Homo sapiens
cgggatcgaagcggtgagctttggtgcttgcgcctttggggttccggtccgcttgctttccggtgtcccttcgctccacacgcacggaaataagatttgattttcggtacgagtgaacgatgagcccattgaaataccatcggaagacgatgggacggtgctgctctccacggttacagcccagtttccaggggcgtgtgggcttcgctacaggaatccagtgtctcagtgtatgagaggtgtccggctggtagaaggaattctgcatgccccagatgctggctggggaaatctggtgtatgttgtcaactatccaaaagataacaaaagaaaaatggatgagacagatgcttcatcagcagtgaaagtgaaaagagcagtccagaaaacatccgatttaatagtgttgggtctcccatggaaaacaaccgaacaggacctgaaagagtattttagtacctttggagaagttcttatggtgcaggtcaagaaagatcttaagactggtcattcaaaggggtttggctttgttcgttttacggaatatgaaacacaagtgaaagtaatgtcacagcgacatatgatagatggacgatggtgtgactgcaaacttcctaattctaagcaaagccaagatgagcctttgagaagcagaaaagtgtttgtggggcgctgtacagaggacatgactgaggatgagctgcgggagttcttctctcagtacggggatgtgatggatgtcttcatccccaagccattcagggcctttgcctttgttacatttgcagatgatcagattgcgcagtctctttgtggagaggacttgatcattaaaggaatcagcgttcatatatccaatgccgaacctaagcacaatagcaatagacagttagaaagaagtggaagatttggtggtaatccaggtggctttgggaatcagggtggatttggtaatagcagagggggtggagctggtttgggaaacaatcaaggtagtaatatgggtggtgggatgaactttggtgcgttcagcattaatccagccatgatggctgccgcccaggcagcactacagagcagttggggtatgatgggcatgttagccagccagcagaaccagtcaggcccatcgggtaataaccaaaaccaaggcaacatgcagagggagccaaaccaggccttcggttctggaaataactcttatagtggctctaattctggtgcagcaattggttggggatcagcatccaatgcagggtcgggcagtggttttaatggaggctttggctcaagcatggattctaagtcttctggctggggaatgtagacagtggggttgtggttggttggtatagaatggtgggaattcaaatttttctaaactcatggtaagtatattgtaaaatacatatgtactaagaattttcaaaattggtttgttcagtgtggagtatattcagcagtatttttgacatttttctttagaaaaaggaagagctaaaggaattttataagttttgttacatgaaaggttgaaatattgagtggttgaaagtgaactgctgtttgcctgattggtaaaccaacacactacaattgatatcaaaaggtttctcctgtaatattttatccctggacttgtcaagtgaattctttgcatgttcaaaacggaaaccattgattagaactacattctttaccccttgttttaatttgaaccccaccatatggatttttttccttaagaaaatctccttttaggagatcatggtgtcacagtgtttggttcttttgttttgttttttaacacttgtctcccctcatacacaaaagtacaatatgaagccttcatttaatctctgcagttcatctcatttcaaatgtttatggaagaagcacttcattgaaagtagtgctgtaaatattctgccataggaatactgtctacatgctttctcattcaagaattcgtcatcacgcatcacaggccgcgtctttgacggtgggtgtcccatttttatccgctactctttatttcatggagtcgtatcaacgctatgaacgcaaggctgtgatatggaaccagaaggctgtctgaacttttgaaaccttgtgtgggattgatggtggtgccgaggcatgaaaggctagtatgagcgagaaaaggagagagcgcgtgcagagacttggtggtgcataatggatattttttaacttggcgagatgtgtctctcaatcctgtggctttggtgagagagtgtgcagagagcaatgatagcaaataatgtacgaatgttttttgcattcaaaggacatccacatctgttggaagacttttaagtgagtttttgttcttagataacccacattagatgaatgtgttaagtgaaatgatacttgtactccccctacccctttgtcaactgctgtgaatgctgtatggtgtgtgttctcttctgttactgatatgtaagtgtggcaatgtgaactgaagctgatgggctgagaacatggactgagcttgtggtgtgctttgcaggaggacttgaagcagagttcaccagtgagctcaggtgtctcaaagaagggtggaagttctaatgtctgttagctacccataagaatgctgtttgctgcagttctgtgtcctgtgcttggatgctttttataagagttgtcattgttggaaattcttaaataagactgatttaaataat

SEQ ID NO: 440461 - DNA, 2709 bp, Homo sapiens
acgccggtgggcggggggaggaggcggccctagcgccattttgtgggagcgaagcggtggctgggctgcgcttgggtccgtcgctgcttcggtgtccctgtcgggcttcccagcagcggcctagcgggaaaagtaaaagatgtctgaatatattcgggtaaccgaagatgagaacgatgagcccattgaaataccatcggaagacgatgggacggtgctgctctccacggttacagcccagtttccaggggcgtgtgggcttcgctacaggaatccagtgtctcagtgtatgagaggtgtccggctggtagaaggaattctgcatgccccagatgctggctggggaaatctggtgtatgttgtcaactatccaaaagataacaaaagaaaaatggatgagacagatgcttcatcagcagtgaaagtgaaaagagcagtccagaaaacatccgatttaatagtgttgggtctcccatgtcaagaaagatcttaagactggtcattcaaaggggtttggctttgttcgttttacggaatatgaaacacaagtgaaagtaatgtcacagcgacatatgatagatggacgatggtgtgactgcaaacttcctaattctaagcaaagccaagatgagcctttgagaagcagaaaagtgtttgtggggcgctgtacagaggacatgactgaggatgagctgcgggagttcttctctcagtacggggatgtgatggatgtcttcatccccaagccattcagggcctttgcctttgttacatttgcagatgatcagattgcgcagtctctttgtggagaggacttgatcattaaaggaatcagcgttcatatatccaatgccgaacctaagcacaatagcaatagacagttagaaagaagtggaagatttggtggtaatccaggtggctttgggaatcagggtggatttggtaatagcagagggggtggagctggtttgggaaacaatcaaggtagtaatatgggtggtgggatgaactttggtgcgttcagcattaatccagccatgatggctgccgcccaggcagcactacagagcagttggggtatgatgggcatgttagccagccagcagaaccagtcaggcccatcgggtaataaccaaaaccaaggcaacatgcagagggagccaaaccaggccttcggttctggaaataactcttatagtggctctaattctggtgcagcaattggttggggatcagcatccaatgcagggtcgggcagtggttttaatggaggctttggctcaagcatggattctaagtcttctggctggggaatgtagacagtggggttgtggttggttggtatagaatggtgggaattcaaatttttctaaactcatggtaagtatattgtaaaatacatatgtactaagaattttcaaaattggtttgttcagtgtggagtatattcagcagtatttttgacatttttctttagaaaaaggaagagctaaaggaattttataagttttgttacatgaaaggttgaaatattgagtggttgaaagtgaactgctgtttgcctgattggtaaaccaacacactacaattgatatcaaaaggtttctcctgtaatattttatccctggacttgtcaagtgaattctttgcatgttcaaaacggaaaccattgattagaactacattctttaccccttgttttaatttgaaccccaccatatggatttttttccttaagaaaatctccttttaggagatcatggtgtcacagtgtttggttcttttgttttgttttttaacacttgtctcccctcatacacaaaagtacaatatgaagccttcatttaatctctgcagttcatctcatttcaaatgtttatggaagaagcacttcattgaaagtagtgctgtaaatattctgccataggaatactgtctacatgctttctcattcaagaattcgtcatcacgcatcacaggccgcgtctttgacggtgggtgtcccatttttatccgctactctttatttcatggagtcgtatcaacgctatgaacgcaaggctgtgatatggaaccagaaggctgtctgaacttttgaaaccttgtgtgggattgatggtggtgccgaggcatgaaaggctagtatgagcgagaaaaggagagagcgcgtgcagagacttggtggtgcataatggatattttttaacttggcgagatgtgtctctcaatcctgtggctttggtgagagagtgtgcagagagcaatgatagcaaataatgtacgaatgttttttgcattcaaaggacatccacatctgttggaagacttttaagtgagtttttgttcttagataacccacattagatgaatgtgttaagtgaaatgatacttgtactccccctacccctttgtcaactgctgtgaatgctgtatggtgtgtgttctcttctgttactgatatgtaagtgtggcaatgtgaactgaagctgatgggctgagaacatggactgagcttgtggtgtgctttgcaggaggacttgaagcagagttcaccagtgagctcaggtgtctcaaagaagggtggaagttctaatgtctgttagctacccataagaatgctgtttgctgcagttctgtgtcctgtgcttggatgctttttataagagttgtcattgttggaaattcttaaataagactgatttaaataat

SEQ ID NO: 440462 - DNA, 2682 bp, Homo sapiens
acgccggtgggcggggggaggaggcggccctagcgccattttgtgggagcgaagcggtggctgggctgcgcttgggtccgtcgctgcttcggtgtccctgtcgggcttcccagcagcggcctagcgggaaaagtaaaagatgtctgaatatattcgggtaaccgaagatgagaacgatgagcccattgaaataccatcggaagacgatgggacggtgctgctctccacggttacagcccaatgctggctggggaaatctggtgtatgttgtcaactatccaaaagataacaaaagaaaaatggatgagacagatgcttcatcagcagtgaaagtgaaaagagcagtccagaaaacatccgatttaatagtgttgggtctcccatggaaaacaaccgaacaggacctgaaagagtattttagtacctttggagaagttcttatggtgcaggtcaagaaagatcttaagactggtcattcaaaggggtttggctttgttcgttttacggaatatgaaacacaagtgaaagtaatgtcacagcgacatatgatagatggacgatggtgtgactgcaaacttcctaattctaagcaaagccaagatgagcctttgagaagcagaaaagtgtttgtggggcgctgtacagaggacatgactgaggatgagctgcgggagttcttctctcagtacggggatgtgatggatgtcttcatccccaagccattcagggcctttgcctttgttacatttgcagatgatcagattgcgcagtctctttgtggagaggacttgatcattaaaggaatcagcgttcatatatccaatgccgaacctaagcacaatagcaatagacagttagaaagaagtggaagatttggtggtaatccaggtggctttgggaatcagggtggatttggtaatagcagagggggtggagctggtttgggaaacaatcaaggtagtaatatgggtggtgggatgaactttggtgcgttcagcattaatccagccatgatggctgccgcccaggcagcactacagagcagttggggtatgatgggcatgttagccagccagcagaaccagtcaggcccatcgggtaataaccaaaaccaaggcaacatgcagagggagccaaaccaggccttcggttctggaaataactcttatagtggctctaattctggtgcagcaattggttggggatcagcatccaatgcagggtcgggcagtggttttaatggaggctttggctcaagcatggattctaagtcttctggctggggaatgtagacagtggggttgtggttggttggtatagaatggtgggaattcaaatttttctaaactcatggtaagtatattgtaaaatacatatgtactaagaattttcaaaattggtttgttcagtgtggagtatattcagcagtatttttgacatttttctttagaaaaaggaagagctaaaggaattttataagttttgttacatgaaaggttgaaatattgagtggttgaaagtgaactgctgtttgcctgattggtaaaccaacacactacaattgatatcaaaaggtttctcctgtaatattttatccctggacttgtcaagtgaattctttgcatgttcaaaacggaaaccattgattagaactacattctttaccccttgttttaatttgaaccccaccatatggatttttttccttaagaaaatctccttttaggagatcatggtgtcacagtgtttggttcttttgttttgttttttaacacttgtctcccctcatacacaaaagtacaatatgaagccttcatttaatctctgcagttcatctcatttcaaatgtttatggaagaagcacttcattgaaagtagtgctgtaaatattctgccataggaatactgtctacatgctttctcattcaagaattcgtcatcacgcatcacaggccgcgtctttgacggtgggtgtcccatttttatccgctactctttatttcatggagtcgtatcaacgctatgaacgcaaggctgtgatatggaaccagaaggctgtctgaacttttgaaaccttgtgtgggattgatggtggtgccgaggcatgaaaggctagtatgagcgagaaaaggagagagcgcgtgcagagacttggtggtgcataatggatattttttaacttggcgagatgtgtctctcaatcctgtggctttggtgagagagtgtgcagagagcaatgatagcaaataatgtacgaatgttttttgcattcaaaggacatccacatctgttggaagacttttaagtgagtttttgttcttagataacccacattagatgaatgtgttaagtgaaatgatacttgtactccccctacccctttgtcaactgctgtgaatgctgtatggtgtgtgttctcttctgttactgatatgtaagtgtggcaatgtgaactgaagctgatgggctgagaacatggactgagcttgtggtgtgctttgcaggaggacttgaagcagagttcaccagtgagctcaggtgtctcaaagaagggtggaagttctaatgtctgttagctacccataagaatgctgtttgctgcagttctgtgtcctgtgcttggatgctttttataagagttgtcattgttggaaattcttaaataagactgatttaaataat

SEQ ID NO: 440463 - DNA, 2338 bp, Homo sapiens
catggatttgctggtgcagtacaactaggcttaatagggaggaaaacaaccgaacaggacctgaaagagtattttagtacctttggagaagttcttatggtgcaggtcaagaaagatcttaagactggtcattcaaaggggtttggctttgttcgttttacggaatatgaaacacaagtgaaagtaatgtcacagcgacatatgatagatggacgatggtgtgactgcaaacttcctaattctaagcaaagccaagatgagcctttgagaagcagaaaagtgtttgtggggcgctgtacagaggacatgactgaggatgagctgcgggagttcttctctcagtacggggatgtgatggatgtcttcatccccaagccattcagggcctttgcctttgttacatttgcagatgatcagattgcgcagtctctttgtggagaggacttgatcattaaaggaatcagcgttcatatatccaatgccgaacctaagcacaatagcaatagacagttagaaagaagtggaagatttggtggtaatccaggtggctttgggaatcagggtggatttggtaatagcagagggggtggagctggtttgggaaacaatcaaggtagtaatatgggtggtgggatgaactttggtgcgttcagcattaatccagccatgatggctgccgcccaggcagcactacagagcagttggggtatgatgggcatgttagccagccagcagaaccagtcaggcccatcgggtaataaccaaaaccaaggcaacatgcagagggagccaaaccaggccttcggttctggaaataactcttatagtggctctaattctggtgcagcaattggttggggatcagcatccaatgcagggtcgggcagtggttttaatggaggctttggctcaagcatggattctaagtcttctggctggggaatgtagacagtggggttgtggttggttggtatagaatggtgggaattcaaatttttctaaactcatggtaagtatattgtaaaatacatatgtactaagaattttcaaaattggtttgttcagtgtggagtatattcagcagtatttttgacatttttctttagaaaaaggaagagctaaaggaattttataagttttgttacatgaaaggttgaaatattgagtggttgaaagtgaactgctgtttgcctgattggtaaaccaacacactacaattgatatcaaaaggtttctcctgtaatattttatccctggacttgtcaagtgaattctttgcatgttcaaaacggaaaccattgattagaactacattctttaccccttgttttaatttgaaccccaccatatggatttttttccttaagaaaatctccttttaggagatcatggtgtcacagtgtttggttcttttgttttgttttttaacacttgtctcccctcatacacaaaagtacaatatgaagccttcatttaatctctgcagttcatctcatttcaaatgtttatggaagaagcacttcattgaaagtagtgctgtaaatattctgccataggaatactgtctacatgctttctcattcaagaattcgtcatcacgcatcacaggccgcgtctttgacggtgggtgtcccatttttatccgctactctttatttcatggagtcgtatcaacgctatgaacgcaaggctgtgatatggaaccagaaggctgtctgaacttttgaaaccttgtgtgggattgatggtggtgccgaggcatgaaaggctagtatgagcgagaaaaggagagagcgcgtgcagagacttggtggtgcataatggatattttttaacttggcgagatgtgtctctcaatcctgtggctttggtgagagagtgtgcagagagcaatgatagcaaataatgtacgaatgttttttgcattcaaaggacatccacatctgttggaagacttttaagtgagtttttgttcttagataacccacattagatgaatgtgttaagtgaaatgatacttgtactccccctacccctttgtcaactgctgtgaatgctgtatggtgtgtgttctcttctgttactgatatgtaagtgtggcaatgtgaactgaagctgatgggctgagaacatggactgagcttgtggtgtgctttgcaggaggacttgaagcagagttcaccagtgagctcaggtgtctcaaagaagggtggaagttctaatgtctgttagctacccataagaatgctgtttgctgcagttctgtgtcctgtgcttggatgctttttataagagttgtcattgttggaaattcttaaataagactgatttaaataat

SEQ ID NO: 440464 - DNA, 2348 bp, Homo sapiens
agggggaggatcctccagcttcagcctcccaagtagctaggacagatgcatgccactacgcccagctaatgtggcttttttgtggttttttttgatagaggtggggtctccctgtgttgtctaggcttccaggctagtcttgaactattggcctcacacagtcctcccaccttggcctcccaaagcgctaggattacaggcatgagccaccatgcccagcctatgtcttttgaaaatcgactgaaatatcactgctgctgttaataaaactaaaagctgtattgggggtttaaatgaaatgatgttcattgcttatttttcctctggctttagataaattaatgcttgtaatctaagttttgttgctactttaaatatatgaatcagtggtttaatcttctttgtttacatcccttatttcttatagattgcgcagtctctttgtggagaggacttgatcattaaaggaatcagcgttcatatatccaatgccgaacctaagcacaatagcaatagacagttagaaagaagtggaagatttggtggtaatccaggtggctttgggaatcagggtggatttggtaatagcagagggggtggagctggtttgggaaacaatcaaggtagtaatatgggtggtgggatgaactttggtgcgttcagcattaatccagccatgatggctgccgcccaggcagcactacagagcagttggggtatgatgggcatgttagccagccagcagaaccagtcaggcccatcgggtaataaccaaaaccaaggcaacatgcagagggagccaaaccaggccttcggttctggaaataactcttatagtggctctaattctggtgcagcaattggttggggatcagcatccaatgcagggtcgggcagtggttttaatggaggctttggctcaagcatggattctaagtcttctggctggggaatgtagacagtggggttgtggttggttggtatagaatggtgggaattcaaatttttctaaactcatggtaagtatattgtaaaatacatatgtactaagaattttcaaaattggtttgttcagtgtggagtatattcagcagtatttttgacatttttctttagaaaaaggaagagctaaaggaattttataagttttgttacatgaaaggttgaaatattgagtggttgaaagtgaactgctgtttgcctgattggtaaaccaacacactacaattgatatcaaaaggtttctcctgtaatattttatccctggacttgtcaagtgaattctttgcatgttcaaaacggaaaccattgattagaactacattctttaccccttgttttaatttgaaccccaccatatggatttttttccttaagaaaatctccttttaggagatcatggtgtcacagtgtttggttcttttgttttgttttttaacacttgtctcccctcatacacaaaagtacaatatgaagccttcatttaatctctgcagttcatctcatttcaaatgtttatggaagaagcacttcattgaaagtagtgctgtaaatattctgccataggaatactgtctacatgctttctcattcaagaattcgtcatcacgcatcacaggccgcgtctttgacggtgggtgtcccatttttatccgctactctttatttcatggagtcgtatcaacgctatgaacgcaaggctgtgatatggaaccagaaggctgtctgaacttttgaaaccttgtgtgggattgatggtggtgccgaggcatgaaaggctagtatgagcgagaaaaggagagagcgcgtgcagagacttggtggtgcataatggatattttttaacttggcgagatgtgtctctcaatcctgtggctttggtgagagagtgtgcagagagcaatgatagcaaataatgtacgaatgttttttgcattcaaaggacatccacatctgttggaagacttttaagtgagtttttgttcttagataacccacattagatgaatgtgttaagtgaaatgatacttgtactccccctacccctttgtcaactgctgtgaatgctgtatggtgtgtgttctcttctgttactgatatgtaagtgtggcaatgtgaactgaagctgatgggctgagaacatggactgagcttgtggtgtgctttgcaggaggacttgaagcagagttcaccagtgagctcaggtgtctcaaagaagggtggaagttctaatgtctgttagctacccataagaatgctgtttgctgcagttctgtgtcctgtgcttggatgctttttataagagttgtcattgttggaaattcttaaataagactgatttaaataat

SEQ ID NO: 440465 - DNA, 1638 bp, Homo sapiens
caccgtaagcacactgcaacatgcttttattaaaacatactggttttcatgtttctgattcggaagcacactgcaacatgcagagggagccaaaccaggccttcggttctggaaataactcttatagtggctctaattctggtgcagcaattggttggggatcagcatccaatgcagggtcgggcagtggttttaatggaggctttggctcaagcatggattctaagtcttctggctggggaatgtagacagtggggttgtggttggttggtatagaatggtgggaattcaaatttttctaaactcatggtaagtatattgtaaaatacatatgtactaagaattttcaaaattggtttgttcagtgtggagtatattcagcagtatttttgacatttttctttagaaaaaggaagagctaaaggaattttataagttttgttacatgaaaggttgaaatattgagtggttgaaagtgaactgctgtttgcctgattggtaaaccaacacactacaattgatatcaaaaggtttctcctgtaatattttatccctggacttgtcaagtgaattctttgcatgttcaaaacggaaaccattgattagaactacattctttaccccttgttttaatttgaaccccaccatatggatttttttccttaagaaaatctccttttaggagatcatggtgtcacagtgtttggttcttttgttttgttttttaacacttgtctcccctcatacacaaaagtacaatatgaagccttcatttaatctctgcagttcatctcatttcaaatgtttatggaagaagcacttcattgaaagtagtgctgtaaatattctgccataggaatactgtctacatgctttctcattcaagaattcgtcatcacgcatcacaggccgcgtctttgacggtgggtgtcccatttttatccgctactctttatttcatggagtcgtatcaacgctatgaacgcaaggctgtgatatggaaccagaaggctgtctgaacttttgaaaccttgtgtgggattgatggtggtgccgaggcatgaaaggctagtatgagcgagaaaaggagagagcgcgtgcagagacttggtggtgcataatggatattttttaacttggcgagatgtgtctctcaatcctgtggctttggtgagagagtgtgcagagagcaatgatagcaaataatgtacgaatgttttttgcattcaaaggacatccacatctgttggaagacttttaagtgagtttttgttcttagataacccacattagatgaatgtgttaagtgaaatgatacttgtactccccctacccctttgtcaactgctgtgaatgctgtatggtgtgtgttctcttctgttactgatatgtaagtgtggcaatgtgaactgaagctgatgggctgagaacatggactgagcttgtggtgtgctttgcaggaggacttgaagcagagttcaccagtgagctcaggtgtctcaaagaagggtggaagttctaatgtctgttagctacccataagaatgctgtttgctgcagttctgtgtcctgtgcttggatgctttttataagagttgtcattgttggaaattcttaaataagactgatttaaataat

SEQ ID NO: 440466 - DNA, 1436 bp, Homo sapiens
  misc_feature (15)..(15): n is a, c, g, or t
  misc_feature (22)..(22): n is a, c, g, or t
  misc_feature (53)..(53): n is a, c, g, or t
  misc_feature (92)..(92): n is a, c, g, or t
  misc_feature (99)..(99): n is a, c, g, or t
  misc_feature (106)..(106): n is a, c, g, or t
  misc_feature (265)..(265): n is a, c, g, or t
ccaattttaagtttnccccgtngtttttttcctccttttgggggttaaattcnggattaaaatatagtggatgtttttattggggggggtgnaggaganagtaatngttatttgcagtgaagtagatgtctaaacattaatgtcaaataatttcaaatttaatgtcctgcttcaacatggaagggcagagctacaaaaacatgtatatttcaaaagacaaaaaggaagcagcagcagtatctgttctctaattcatagacaagtngagtgtgtttgtggtgctgtttgcctgattggtaaaccaacacactacaattgatatcaaaaggtttctcctgtaatattttatccctggacttgtcaagtgaattctttgcatgttcaaaacggaaaccattgattagaactacattctttaccccttgttttaatttgaaccccaccatatggatttttttccttaagaaaatctccttttaggagatcatggtgtcacagtgtttggttcttttgttttgttttttaacacttgtctcccctcatacacaaaagtacaatatgaagccttcatttaatctctgcagttcatctcatttcaaatgtttatggaagaagcacttcattgaaagtagtgctgtaaatattctgccataggaatactgtctacatgctttctcattcaagaattcgtcatcacgcatcacaggccgcgtctttgacggtgggtgtcccatttttatccgctactctttatttcatggagtcgtatcaacgctatgaacgcaaggctgtgatatggaaccagaaggctgtctgaacttttgaaaccttgtgtgggattgatggtggtgccgaggcatgaaaggctagtatgagcgagaaaaggagagagcgcgtgcagagacttggtggtgcataatggatattttttaacttggcgagatgtgtctctcaatcctgtggctttggtgagagagtgtgcagagagcaatgatagcaaataatgtacgaatgttttttgcattcaaaggacatccacatctgttggaagacttttaagtgagtttttgttcttagataacccacattagatgaatgtgttaagtgaaatgatacttgtactccccctacccctttgtcaactgctgtgaatgctgtatggtgtgtgttctcttctgttactgatatgtaagtgtggcaatgtgaactgaagctgatgggctgagaacatggactgagcttgtggtgtgctttgcaggaggacttgaagcagagttcaccagtgagctcaggtgtctcaaagaagggtggaagttctaatgtctgttagctacccataagaatgctgtttgctgcagttctgtgtcctgtgcttggatgctttttataagagttgtcattgttggaaattcttaaataagactgatttaaataat

SEQ ID NO: 440467 - DNA, 492 bp, Homo sapiens
agatgctgggattacaggtgcctgccaccacacccggctgatttttgtattagtagaggtggggtttcaccatgttgaccaggctggtttgaactcctgacctcaagtgatccacccgcctcggcctctcaaagtgctgggattacaggtgtcagccaccacacctggccacgatgatgaaattgtgtaatggctcatgatgtatttatatccatcattatgtgatgcatgactgtgtacttttgtaacttaaaacgttactcttcactgaagccttacaagaaaaagaaatgctgatggaaaaaattaagggtacgtctactttttaatggttcactgctatccaaggcgaatgattttgttatatcccttaccttaatgtttttttcattgttcataacatatttctgagtttttttcttccttttgatttgatcagcaaagccaagatgagcctttgagaagcagaaaagtgtttgtggggcgctgtac

SEQ ID NO: 440468 - DNA, 556 bp, Homo sapiens
atgtctgaatatattcgggtaaccgaagatgagaacgatgagcccattgaaataccatcggaagacgatgggacggtgctgctctccacggttacagcccagtttccaggggcgtgtgggcttcgctacaggaatccagtgtctcagtgtatgagaggtgtccggctggtagaaggaattctgcatgccccagatgctggctggggaaatctggtgtatgttgtcaactatccaaaaggtttgttaccatttggtttttgtaatcatgctgaagtgtgttcaggtgtgtgtctcatccatggatcttagcctcttttggtggcagaatgtctcctgaaacttaagtatttccttgaacttcagtgttagacaagtttggaagaccacgagtctaaatttatggaaactggggattgtagatcattttaaaagagaaaacaatgtatttaaaaaatatctgaataaactttgccaagttgatgataaatttcaggaatcactaagaatgttttgtacataaatcattgttgtaaatagattcttctgaagtgcttca

SEQ ID NO: 440469 - DNA, 2263 bp, Homo sapiens
acgccggtgggcggggggaggaggcggccctagcgccattttgtgggagcgaagcggtggctgggctgcgcttgggtccgtcgctgcttcggtgtccctgtcgggcttcccagcagcggcctagcgggaaaagtaaaagatgtctgaatatattcgggtaaccgaagatgagaacgatgagcccattgaaataccatcggaagacgatgggacggtgctgctctccacggttacagcccagtttccaggggcgtgtgggcttcgctacaggaatccagtgtctcagtgtatgagaggtgtccggctggtagaaggaattctgcatgccccagatgctggctggggaaatctggtgtatgttgtcaactatccaaaagataacaaaagaaaaatggatgagacagatgcttcatcagcagtgaaagtgaaaagagcagtccagaaaacatccgatttaatagtgttgggtctcccatggaaaacaaccgaacaggacctgaaagagtattttagtacctttggagaagttcttatggtgcaggtcaagaaagatcttaagactggtcattcaaaggggtttggctttgttcgttttacggaatatgaaacacaagtgaaagtaatgtcacagcgacatatgatagatggacgatggtgtgactgcaaacttcctaattctaagcaaagccaagatgagcctttgagaagcagaaaagtgtttgtggggcgctgtacagaggacatgactgaggatgagctgcgggagttcttctctcagtacggggatgtgatggatgtcttcatccccaagccattcagggcctttgcctttgttacatttgcagatgatcagattgcgcagtctctttgtggagaggacttgatcattaaaggaatcagcgttcatatatccaatgccgaacctaagcacaatagcaatagacagttagaaagaagtggaagatttggtggtaatccaggtggctttgggaatcagggtggatttggtaatagcagagggggtggagctggtttgggaaacaatcaaggtagtaatatgggtggtgggatgaactttggtgcgttcagcattaatccagccatgatggctgccgcccaggcagcactacagagcagttggggtatgatgggcatgttagccagccagcagaaccagtcaggcccatcgggtaataaccaaaaccaaggcaacatgcagagggagccaaaccaggccttcggttctggaaataactcttatagtggctctaattctggtgcagcaattggttggggatcagcatccaatgcagggtcgggcagtggttttaatggaggctttggctcaagcatggattctaagtcttctggctggggaatgtagacagtggggttgtggttggttggtatagaatggtgggaattcaaatttttctaaactcatggtaagtatattgtaaaatacatatgtactaagaattttcaaaattggtttgttcagtgtggagtatattcagcagtatttttgacatttttctttagaaaaaggaagagctaaaggaattttataagttttgttacatgaaaggttgaaatattgagtggttgaaagtgaactgctgtttgcctgattggtaaaccaacacactacaattgatatcaaaaggtttctcctgtaatattttatccctggacttgtcaagtgaattctttgcatgttcaaaacggaaaccattgattagaactacattctttaccccttgttttaatttgaaccccaccatatggatttttttccttaagaaaatctccttttaggagatcatggtgtcacagtgtttggttcttttgttttgttttttaacacttgtctcccctcatacacaaaagtacaatatgaagccttcatttaatctctgcagttcatctcatttcaaatgtttatggaagaagcacttcattgaaagtagtgctgtaaatattctgccataggaatactgtctacatgctttctcattcaagaattcgtcatcacgcatcacaggccgcgtctttgacgccctgaatgcaaagaattcatagcagttaattccccttttttgacccttttgagatggaactttcataaagtttcttggcagtagtttattttgcttcaaataaacttatttgaaaagttgtctcaagtcaaatggattcatcacctgtcatgcattgacacctgatacccagacttaattggtatttgttcttgcattggcca

SEQ ID NO: 440470 - DNA, 2720 bp, Homo sapiens
acgccggtgggcggggggaggaggcggccctagcgccattttgtgggagcgaagcggtggctgggctgcgcttgggtccgtcgctgcttcggtgtccctgtcgggcttcccagcagcggcctagcgggaaaagtaaaagatgtctgaatatattcgggtaaccgaagatgagaacgatgagcccattgaaataccatcggaagacgatgggacggtgctgctctccacggttacagcccagtttccaggggcgtgtgggcttcgctacaggaatccagtgtctcagtgtatgagaggtgtccggctggtagaaggaattctgcatgccccagatgctggctggggaaatctggtgtatgttgtcaactatccaaaagataacaaaagaaaaatggatgagacagatgcttcatcagcagtgaaagtgaaaagagcagtccagaaaacatccgatttaatagtgttgggtctcccatggaaaacaaccgaacaggacctgaaagagtattttagtacctttggagaagttcttatggtgcaggtcaagaaagatcttaagactggtcattcaaaggggtttggctttgttcgttttacggaatatgaaacacaagtgaaagtaatgtcacagcgacatatgatagatggacgatggtgtgactgcaaacttcctaattctaagcaaagccaagatgagcctttgagaagcagattcttctctcagtacggggatgtgatggatgtcttcatccccaagccattcagggcctttgcctttgttacatttgcagatgatcagattgcgcagtctctttgtggagaggacttgatcattaaaggaatcagcgttcatatatccaatgccgaacctaagcacaatagcaatagacagttagaaagaagtggaagatttggtggtaatccaggtggctttgggaatcagggtggatttggtaatagcagagggggtggagctggtttgggaaacaatcaaggtagtaatatgggtggtgggatgaactttggtgcgttcagcattaatccagccatgatggctgccgcccaggcagcactacagagcagttggggtatgatgggcatgttagccagccagcagaaccagtcaggcccatcgggtaataaccaaaaccaaggcaacatgcagagggagccaaaccaggccttcggttctggaaataactcttatagtggctctaattctggtgcagcaattggttggggatcagcatccaatgcagggtcgggcagtggttttaatggaggctttggctcaagcatggattctaagtcttctggctggggaatgtagacagtggggttgtggttggttggtatagaatggtgggaattcaaatttttctaaactcatggtaagtatattgtaaaatacatatgtactaagaattttcaaaattggtttgttcagtgtggagtatattcagcagtatttttgacatttttctttagaaaaaggaagagctaaaggaattttataagttttgttacatgaaaggttgaaatattgagtggttgaaagtgaactgctgtttgcctgattggtaaaccaacacactacaattgatatcaaaaggtttctcctgtaatattttatccctggacttgtcaagtgaattctttgcatgttcaaaacggaaaccattgattagaactacattctttaccccttgttttaatttgaaccccaccatatggatttttttccttaagaaaatctccttttaggagatcatggtgtcacagtgtttggttcttttgttttgttttttaacacttgtctcccctcatacacaaaagtacaatatgaagccttcatttaatctctgcagttcatctcatttcaaatgtttatggaagaagcacttcattgaaagtagtgctgtaaatattctgccataggaatactgtctacatgctttctcattcaagaattcgtcatcacgcatcacaggccgcgtctttgacggtgggtgtcccatttttatccgctactctttatttcatggagtcgtatcaacgctatgaacgcaaggctgtgatatggaaccagaaggctgtctgaacttttgaaaccttgtgtgggattgatggtggtgccgaggcatgaaaggctagtatgagcgagaaaaggagagagcgcgtgcagagacttggtggtgcataatggatattttttaacttggcgagatgtgtctctcaatcctgtggctttggtgagagagtgtgcagagagcaatgatagcaaataatgtacgaatgttttttgcattcaaaggacatccacatctgttggaagacttttaagtgagtttttgttcttagataacccacattagatgaatgtgttaagtgaaatgatacttgtactccccctacccctttgtcaactgctgtgaatgctgtatggtgtgtgttctcttctgttactgatatgtaagtgtggcaatgtgaactgaagctgatgggctgagaacatggactgagcttgtggtgtgctttgcaggaggacttgaagcagagttcaccagtgagctcaggtgtctcaaagaagggtggaagttctaatgtctgttagctacccataagaatgctgtttgctgcagttctgtgtcctgtgcttggatgctttttataagagttgtcattgttggaaattcttaaataagactgatttaaataat

SEQ ID NO: 440471 - DNA, 2906 bp, Homo sapiens
acgccggtgggcggggggaggaggcggccctagcgccattttgtgggagcgaagcggtggctgggctgcgcttgggtccgtcgctgcttcggtgtccctgtcgggcttcccagcagcggcctagcgggaaaagtaaaagatgtctgaatatattcgggtaaccgaagatgagaacgatgagcccattgaaataccatcggaagacgatgggacggtgctgctctccacggttacagcccagtttccaggggcgtgtgggcttcgctacaggaatccagtgtctcagtgtatgagaggtgtccggctggtagaaggaattctgcatgccccagatgctggctggggaaatctggtgtatgttgtcaactatccaaaagtatagacggcgtttcaccatcttggccaggctggtcttgaactcctgaccttgtgatccacctgcctcagactcccaaagtgctgggattacaagtgtgagccaccgcgcccagccagttatgtttttttaaataacaaaagaaaaatggatgagacagatgcttcatcagcagtgaaagtgaaaagagcagtccagaaaacatccgatttaatagtgttgggtctcccatggaaaacaaccgaacaggacctgaaagagtattttagtacctttggagaagttcttatggtgcaggtcaagaaagatcttaagactggtcattcaaaggggtttggctttgttcgttttacggaatatgaaacacaagtgaaagtaatgtcacagcgacatatgatagatggacgatggtgtgactgcaaacttcctaattctaagcaaagccaagatgagcctttgagaagcagaaaagtgtttgtggggcgctgtacagaggacatgactgaggatgagctgcgggagttcttctctcagtacggggatgtgatggatgtcttcatccccaagccattcagggcctttgcctttgttacatttgcagatgatcagattgcgcagtctctttgtggagaggacttgatcattaaaggaatcagcgttcatatatccaatgccgaacctaagcacaatagcaatagacagttagaaagaagtggaagatttggtggtaatccaggtggctttgggaatcagggtggatttggtaatagcagagggggtggagctggtttgggaaacaatcaaggtagtaatatgggtggtgggatgaactttggtgcgttcagcattaatccagccatgatggctgccgcccaggcagcactacagagcagttggggtatgatgggcatgttagccagccagcagaaccagtcaggcccatcgggtaataaccaaaaccaaggcaacatgcagagggagccaaaccaggccttcggttctggaaataactcttatagtggctctaattctggtgcagcaattggttggggatcagcatccaatgcagggtcgggcagtggttttaatggaggctttggctcaagcatggattctaagtcttctggctggggaatgtagacagtggggttgtggttggttggtatagaatggtgggaattcaaatttttctaaactcatggtaagtatattgtaaaatacatatgtactaagaattttcaaaattggtttgttcagtgtggagtatattcagcagtatttttgacatttttctttagaaaaaggaagagctaaaggaattttataagttttgttacatgaaaggttgaaatattgagtggttgaaagtgaactgctgtttgcctgattggtaaaccaacacactacaattgatatcaaaaggtttctcctgtaatattttatccctggacttgtcaagtgaattctttgcatgttcaaaacggaaaccattgattagaactacattctttaccccttgttttaatttgaaccccaccatatggatttttttccttaagaaaatctccttttaggagatcatggtgtcacagtgtttggttcttttgttttgttttttaacacttgtctcccctcatacacaaaagtacaatatgaagccttcatttaatctctgcagttcatctcatttcaaatgtttatggaagaagcacttcattgaaagtagtgctgtaaatattctgccataggaatactgtctacatgctttctcattcaagaattcgtcatcacgcatcacaggccgcgtctttgacggtgggtgtcccatttttatccgctactctttatttcatggagtcgtatcaacgctatgaacgcaaggctgtgatatggaaccagaaggctgtctgaacttttgaaaccttgtgtgggattgatggtggtgccgaggcatgaaaggctagtatgagcgagaaaaggagagagcgcgtgcagagacttggtggtgcataatggatattttttaacttggcgagatgtgtctctcaatcctgtggctttggtgagagagtgtgcagagagcaatgatagcaaataatgtacgaatgttttttgcattcaaaggacatccacatctgttggaagacttttaagtgagtttttgttcttagataacccacattagatgaatgtgttaagtgaaatgatacttgtactccccctacccctttgtcaactgctgtgaatgctgtatggtgtgtgttctcttctgttactgatatgtaagtgtggcaatgtgaactgaagctgatgggctgagaacatggactgagcttgtggtgtgctttgcaggaggacttgaagcagagttcaccagtgagctcaggtgtctcaaagaagggtggaagttctaatgtctgttagctacccataagaatgctgtttgctgcagttctgtgtcctgtgcttggatgctttttataagagttgtcattgttggaaattcttaaataagactgatttaaataat

SEQ ID NO: 440472 - DNA, 1319 bp, Homo sapiens
acgccggtgggcggggggaggaggcggccctagcgccattttgtgggagcgaagcggtggctgggctgcgcttgggtccgtcgctgcttcggtgtccctgtcgggcttcccagcagcggcctagcgggaaaagtaaaagatgtctgaatatattcgggtaaccgaagatgagaacgatgagcccattgaaataccatcggaagacgatgggacggtgctgctctccacggttacagcccagtttccaggggcgtgtgggcttcgctacaggaatccagtgtctcagtgtatgagaggtgtccggctggtagaaggaattctgcatgccccagatgctggctggggaaatctggtgtatgttgtcaactatccaaaagataacaaaagaaaaatggatgagacagatgcttcatcagcagtgaaagtgaaaagagcagtccagaaaacatccgatttaatagtgttgggtctcccatggaaaacaaccgaacaggacctgaaagagtattttagtacctttggagaagttcttatggtgcaggtcaagaaagatcttaagactggtcattcaaaggggtttggctttgttcgttttacggaatatgaaacacaagtgaaagtaatgtcacagcgacatatgatagatggacgatggtgtgactgcaaacttcctaattctaagcaaagccaagatgagcctttgagaagcagaaaagtgtttgtggggcgctgtacagaggacatgactgaggatgagctgcgggagttcttctctcagtacggggatgtgatggatgtcttcatccccaagccattcagggcctttgcctttgttacatttgcagatgatcagattgcgcagtctctttgtggagaggacttgatcattaaaggaatcagcgttcatatatccaatgccgaacctaagcacaatagcaatagacagttagaaagaagtggaagatttggtggtaatccaggttctcatttcaaatgtttatggaagaagcacttcattgaaagtagtgctgtaaatattctgccataggaatactgtctacatgctttctcattcaagaattcgtcatcacgcatcacaggccgcgtctttgacgccctgaatgcaaagaattcatagcagttaattccccttttttgacccttttgagatggaactttcataaagtttcttggcagtagtttattttgcttcaaataaacttatttgaaaagttgtctcaagtcaaatggattcatcacctgtcatgcattgacacctgatacccagacttaattggtatttgttcttgcattggcca

SEQ ID NO: 440473 - DNA, 1755 bp, Homo sapiens
acgccggtgggcggggggaggaggcggccctagcgccattttgtgggagcgaagcggtggctgggctgcgcttgggtccgtcgctgcttcggtgtccctgtcgggcttcccagcagcggcctagcgggaaaagtaaaagatgtctgaatatattcgggtaaccgaagatgagaacgatgagcccattgaaataccatcggaagacgatgggacggtgctgctctccacggttacagcccagtttccaggggcgtgtgggcttcgctacaggaatccagtgtctcagtgtatgagaggtgtccggctggtagaaggaattctgcatgccccagatgctggctggggaaatctggtgtatgttgtcaactatccaaaagataacaaaagaaaaatggatgagacagatgcttcatcagcagtgaaagtgaaaagagcagtccagaaaacatccgatttaatagtgttgggtctcccatggaaaacaaccgaacaggacctgaaagagtattttagtacctttggagaagttcttatggtgcaggtcaagaaagatcttaagactggtcattcaaaggggtttggctttgttcgttttacggaatatgaaacacaagtgaaagtaatgtcacagcgacatatgatagatggacgatggtgtgactgcaaacttcctaattctaagcaaagccaagatgagcctttgagaagcagaaaagtgtttgtggggcgctgtacagaggacatgactgaggatgagctgcgggagttcttctctcagtacggggatgtgatggatgtcttcatccccaagccattcagggcctttgcctttgttacatttgcagatgatcagattgcgcagtctctttgtggagaggacttgatcattaaaggaatcagcgttcattctcatttcaaatgtttatggaagaagcacttcattgaaagtagtgctgtaaatattctgccataggaatactgtctacatgctttctcattcaagaattcgtcatcacgcatcacaggccgcgtctttgacggtgggtgtcccatttttatccgctactctttatttcatggagtcgtatcaacgctatgaacgcaaggctgtgatatggaaccagaaggctgtctgaacttttgaaaccttgtgtgggattgatggtggtgccgaggcatgaaaggctagtatgagcgagaaaaggagagagcgcgtgcagagacttggtggtgcataatggatattttttaacttggcgagatgtgtctctcaatcctgtggctttggtgagagagtgtgcagagagcaatgatagcaaataatgtacgaatgttttttgcattcaaaggacatccacatctgttggaagacttttaagtgagtttttgttcttagataacccacattagatgaatgtgttaagtgaaatgatacttgtactccccctacccctttgtcaactgctgtgaatgctgtatggtgtgtgttctcttctgttactgatatgtaagtgtggcaatgtgaactgaagctgatgggctgagaacatggactgagcttgtggtgtgctttgcaggaggacttgaagcagagttcaccagtgagctcaggtgtctcaaagaagggtggaagttctaatgtctgttagctacccataagaatgctgtttgctgcagttctgtgtcctgtgcttggatgctttttataagagttgtcattgttggaaattcttaaataagactgatttaaataat

SEQ ID NO: 440474 - DNA, 730 bp, Homo sapiens
  misc_feature (696)..(696): n is a, c, g, or t
acgccggtgggcggggggaggaggcggccctagcgccattttgtgggagcgaagcggtggctgggctgcgcttgggtccgtcgctgcttcggtgtccctgtcgggcttcccagcagcggcctagcgggaaaagtaaaagatgtctgaatatattcgggtaaccgaagatgagaacgatgagcccattgaaataccatcggaagacgatgggacggtgctgctctccacggttacagcccagtttccaggggcgtgtgggcttcgctacaggaatccagtgtctcagtgtatgagaggtgtccggctggtagaaggaattctgcatgccccagatgctggctggggaaatctggtgtatgttgtcaactatccaaaagataacaaaagaaaaatggatgagacagatgcttcatcagcagtgaaagtgaaaagagcagtccagaaaacatccgatttaatagtgttgggtctcccatggaaaacaaccgaacaggacctgaaagagtattttagtacctttggagaagttcttatggtgcaggtcaagaaagatcttaagactggtcattcaaaggggtttggctttgttcgttttacggaatatgaaacacaagtgaaagtaatgtcacagcgacatatgatagatggacgatggtgtgactgcaaacttcctaattctaagcaaagccaagatgngccttgagatcagcatggccggtacgagctgatt

SEQ ID NO: 440475 - DNA, 1952 bp, Homo sapiens
ctgaagagccggtgcagagcgggcggcggcggcggcggcagcggaggcggcggctccagccggcgcggcgcgaggctcggcggtgggatccggcgggcggtgctagctccgcgctccctgcctcgctcgctgccgggggcggtcggaaggcgcggcgcgaagcccgggtggcccgagggcgcgatggctgctcctgtcccgtgggcctgctgtgctgtgcttgccgccgccgccgcagttgtctacgcccagagacacagtccacaggaggcaccccatgtgcagtacgagcgcctgggctctgacgtgacactgccatgtgggacagcaaactgggatgctgcggtgacgtggcgggtaaatgggacagacctggcccctgacctgctcaacggctctcagctggtgctccatggcctggaactgggccacagtggcctctacgcctgcttccaccgtgactcctggcacctgcgccaccaagtcctgctgcatgtgggcttgccgccgcgggagcctgtgctcagctgccgctccaacacttaccccaagggcttctactgcagctggcatctgcccacccccacctacattcccaacaccttcaatgtgactgtgctgcatggctccaaaattatggtctgtgagaaggacccagccctcaagaaccgctgccacattcgctacatgcacctgttctccaccatcaagtacaaggtctccataagtgtcagcaatgccctgggccacaatgccacagctatcacctttgacgagttcaccattgtgaagcctgatcctccagaaaatgtggtagcccggccagtgcccagcaaccctcgccggctggaggtgacgtggcagaccccctcgacctggcctgaccctgagtcttttcctctcaagttctttctgcgctaccgacccctcatcctggaccagtggcagcatgtggagctgtccgacggcacagcacacaccatcacagatgcctacgccgggaaggagtacattatccaggtggcagccaaggacaatgagattgggacatggagtgactggagcgtagccgcccacagctacgccctggactgaggaaccgcgacacctcaccacggaggcccaggctgcggagaccacgaccagcaccaccagctccctggcacccccacctaccacgaagatctgtgaccctggggagctgggcagcggcgggggaccctcggcacccttcttggtcagcgtccccatcactctggccctggctgccgctgccgccactgccagcagtctcttgatctgagcccggcaccccatgaggacatgcagagcacctgcagaggagcaggaggccggagctgagcctgcagaccccggtttctattttgcacacgggcaggaggaccttttgcattctcttcagacacaatttgtggagaccccggcgggcccgggcctgccgccccccagccctgccgcaccaagctggccctccttcctccctcaggggaggtgggccatgcagctaacccacccaccaaagaccccctcaccctggccccttgggctggaccctccaatgccagcgactcccaggagcccttgggggacgtgaggggagcctctcacatccgatttctcctcctgccccagcctcctgtctatcccagggtctctgttgccaccatcagattataagctcctgatgctgggggggcccagccatccccctccccccagcacccacaattttcagtcccctcccctctgccctgttttgtatacccctcccctgaccctgctcctatcccacagtatttaatgccctgtcagtcccttctagtctgactcaatggtaacttgctgtatttgaattttttatagatgtatatacagggtggggggagtgggcggttctcattaaacgtcaccatttcatgaaaaaaggaaca

SEQ ID NO: 440476 - DNA, 1811 bp, Homo sapiens
gcacggggaccacagccgtcttgagggcgcgcccgagaaaggatggctgctcctgtcccgtgggcctgctgtgctgtgcttgccgccgccgccgcagttgtctacgcccagagacacagtccacaggaggcaccccatgtgcagtacgagcgcctgggctctgacgtgacactgccatgtgggacagcaaactgggatgctgcggtgacgtggcgggtaaatgggacagacctggcccctgacctgctcaacggctctcagctggtgctccatggcctggaactgggccacagtggcctctacgcctgcttccaccgtgactcctggcacctgcgccaccaagtcctgctgcatgtgggcttgccgccgcgggagcctgtgctcagctgccgctccaacacttaccccaagggcttctactgcagctggcatctgcccacccccacctacattcccaacaccttcaatgtgactgtgctgcatggctccaaaattatggtctgtgagaaggacccagccctcaagaaccgctgccacattcgctacatgcacctgttctccaccatcaagtacaaggtctccataagtgtcagcaatgccctgggccacaatgccacagctatcacctttgacgagttcaccattgtgaagcctgatcctccagaaaatgtggtagcccggccagtgcccagcaaccctcgccggctggaggtgacgtggcagaccccctcgacctggcctgaccctgagtcttttcctctcaagttctttctgcgctaccgacccctcatcctggaccagtggcagcatgtggagctgtccgacggcacagcacacaccatcacagatgcctacgccgggaaggagtacattatccaggtggcagccaaggacaatgagattgggacatggagtgactggagcgtagccgcccacagctacgccctggactgaggaaccgcgacacctcaccacggaggcccaggctgcggagaccacgaccagcaccaccagctccctggcacccccacctaccacgaagatctgtgaccctggggagctgggcagcggcgggggaccctcggcacccttcttggtcagcgtccccatcactctggccctggctgccgctgccgccactgccagcagtctcttgatctgagcccggcaccccatgaggacatgcagagcacctgcagaggagcaggaggccggagctgagcctgcagaccccggtttctattttgcacacgggcaggaggaccttttgcattctcttcagacacaatttgtggagaccccggcgggcccgggcctgccgccccccagccctgccgcaccaagctggccctccttcctccctcaggggaggtgggccatgcagctaacccacccaccaaagaccccctcaccctggccccttgggctggaccctccaatgccagcgactcccaggagcccttgggggacgtgaggggagcctctcacatccgatttctcctcctgccccagcctcctgtctatcccagggtctctgttgccaccatcagattataagctcctgatgctgggggggcccagccatccccctccccccagcacccacaattttcagtcccctcccctctgccctgttttgtatacccctcccctgaccctgctcctatcccacagtatttaatgccctgtcagtcccttctagtctgactcaatggtaacttgctgtatttgaattttttatagatgtatatacagggtggggggagtgggcggttctcattaaacgtcaccatttcatgaaaaaaggaaca

SEQ ID NO: 440477 - DNA, 2063 bp, Homo sapiens
ctgaagagccggtgcagagcgggcggcggcggcggcggcagcggaggcggcggctccagccggcgcggcgcgaggctcggcggtgggatccggcgggcggtgctagctccgcgctccctgcctcgctcgctgccgggggcggtcggaaggcgcggcgcgaagcccgggtggcccgagggcgcgactctagccttgtcacctcatcttgcccccttggttttggaagtcctgaagagttggtctggaggaggaggaggacattgatgtgcttggtgtgtggccagtggtgaagagatggctgctcctgtcccgtgggcctgctgtgctgtgcttgccgccgccgccgcagttgtctacgcccagagacacagtccacaggaggcaccccatgtgcagtacgagcgcctgggctctgacgtgacactgccatgtgggacagcaaactgggatgctgcggtgacgtggcgggtaaatgggacagacctggcccctgacctgctcaacggctctcagctggtgctccatggcctggaactgggccacagtggcctctacgcctgcttccaccgtgactcctggcacctgcgccaccaagtcctgctgcatgtgggcttgccgccgcgggagcctgtgctcagctgccgctccaacacttaccccaagggcttctactgcagctggcatctgcccacccccacctacattcccaacaccttcaatgtgactgtgctgcatggctccaaaattatggtctgtgagaaggacccagccctcaagaaccgctgccacattcgctacatgcacctgttctccaccatcaagtacaaggtctccataagtgtcagcaatgccctgggccacaatgccacagctatcacctttgacgagttcaccattgtgaagcctgatcctccagaaaatgtggtagcccggccagtgcccagcaaccctcgccggctggaggtgacgtggcagaccccctcgacctggcctgaccctgagtcttttcctctcaagttctttctgcgctaccgacccctcatcctggaccagtggcagcatgtggagctgtccgacggcacagcacacaccatcacagatgcctacgccgggaaggagtacattatccaggtggcagccaaggacaatgagattgggacatggagtgactggagcgtagccgcccacagctacgccctggactgaggaaccgcgacacctcaccacggaggcccaggctgcggagaccacgaccagcaccaccagctccctggcacccccacctaccacgaagatctgtgaccctggggagctgggcagcggcgggggaccctcggcacccttcttggtcagcgtccccatcactctggccctggctgccgctgccgccactgccagcagtctcttgatctgagcccggcaccccatgaggacatgcagagcacctgcagaggagcaggaggccggagctgagcctgcagaccccggtttctattttgcacacgggcaggaggaccttttgcattctcttcagacacaatttgtggagaccccggcgggcccgggcctgccgccccccagccctgccgcaccaagctggccctccttcctccctcaggggaggtgggccatgcagctaacccacccaccaaagaccccctcaccctggccccttgggctggaccctccaatgccagcgactcccaggagcccttgggggacgtgaggggagcctctcacatccgatttctcctcctgccccagcctcctgtctatcccagggtctctgttgccaccatcagattataagctcctgatgctgggggggcccagccatccccctccccccagcacccacaattttcagtcccctcccctctgccctgttttgtatacccctcccctgaccctgctcctatcccacagtatttaatgccctgtcagtcccttctagtctgactcaatggtaacttgctgtatttgaattttttatagatgtatatacagggtggggggagtgggcggttctcattaaacgtcaccatttcatgaaaaaaggaaca

SEQ ID NO: 440478 - DNA, 1922 bp, Homo sapiens
gcacggggaccacagccgtcttgagggcgcgcccgagaaaggactctagccttgtcacctcatcttgcccccttggttttggaagtcctgaagagttggtctggaggaggaggaggacattgatgtgcttggtgtgtggccagtggtgaagagatggctgctcctgtcccgtgggcctgctgtgctgtgcttgccgccgccgccgcagttgtctacgcccagagacacagtccacaggaggcaccccatgtgcagtacgagcgcctgggctctgacgtgacactgccatgtgggacagcaaactgggatgctgcggtgacgtggcgggtaaatgggacagacctggcccctgacctgctcaacggctctcagctggtgctccatggcctggaactgggccacagtggcctctacgcctgcttccaccgtgactcctggcacctgcgccaccaagtcctgctgcatgtgggcttgccgccgcgggagcctgtgctcagctgccgctccaacacttaccccaagggcttctactgcagctggcatctgcccacccccacctacattcccaacaccttcaatgtgactgtgctgcatggctccaaaattatggtctgtgagaaggacccagccctcaagaaccgctgccacattcgctacatgcacctgttctccaccatcaagtacaaggtctccataagtgtcagcaatgccctgggccacaatgccacagctatcacctttgacgagttcaccattgtgaagcctgatcctccagaaaatgtggtagcccggccagtgcccagcaaccctcgccggctggaggtgacgtggcagaccccctcgacctggcctgaccctgagtcttttcctctcaagttctttctgcgctaccgacccctcatcctggaccagtggcagcatgtggagctgtccgacggcacagcacacaccatcacagatgcctacgccgggaaggagtacattatccaggtggcagccaaggacaatgagattgggacatggagtgactggagcgtagccgcccacagctacgccctggactgaggaaccgcgacacctcaccacggaggcccaggctgcggagaccacgaccagcaccaccagctccctggcacccccacctaccacgaagatctgtgaccctggggagctgggcagcggcgggggaccctcggcacccttcttggtcagcgtccccatcactctggccctggctgccgctgccgccactgccagcagtctcttgatctgagcccggcaccccatgaggacatgcagagcacctgcagaggagcaggaggccggagctgagcctgcagaccccggtttctattttgcacacgggcaggaggaccttttgcattctcttcagacacaatttgtggagaccccggcgggcccgggcctgccgccccccagccctgccgcaccaagctggccctccttcctccctcaggggaggtgggccatgcagctaacccacccaccaaagaccccctcaccctggccccttgggctggaccctccaatgccagcgactcccaggagcccttgggggacgtgaggggagcctctcacatccgatttctcctcctgccccagcctcctgtctatcccagggtctctgttgccaccatcagattataagctcctgatgctgggggggcccagccatccccctccccccagcacccacaattttcagtcccctcccctctgccctgttttgtatacccctcccctgaccctgctcctatcccacagtatttaatgccctgtcagtcccttctagtctgactcaatggtaacttgctgtatttgaattttttatagatgtatatacagggtggggggagtgggcggttctcattaaacgtcaccatttcatgaaaaaaggaaca

SEQ ID NO: 440479 - DNA, 1034 bp, Homo sapiens
  misc_feature (932)..(932): n is a, c, g, or t
  misc_feature (960)..(960): n is a, c, g, or t
  misc_feature (971)..(971): n is a, c, g, or t
ctgaagagccggtgcagagcgggcggcggcggcggcggcagcggaggcggcggctccagccggcgcggcgcgaggctcggcggtgggatccggcgggcggtgctagctccgcgctccctgcctcgctcgctgccgggggcggtcggaaggcgcggcgcgaagcccgggtggcccgagggcgcgactctagccttgtcacctcatcttgcccccttggttttggaagtcctgaagagttggtctggaggaggaggaggacattgatgtgcttggtgtgtggccagtggtgaagagatggctgctcctgtcccgtgggcctgctgtgctgtgcttgccgccgccgccgcagttgtctacgcccagagacacagtccacaggaggcaccccatgtgcagtacgagcgcctgggctctgacgtgacactgccatgtgggacagcaaactgggatgctgcggtgacgtggcgggtaaatgggacagacctggcccctgacctgctcaacggctctcagctggtgctccatggcctggaactgggccacagtggcctctacgcctgcttccaccgtgactcctggcacctgcgccaccaagtcctgctgcatgtgggcttgccgccgcgggagcctgtgctcagctgccgctccaacacttaccccaagggcttctactgcagctggcatctgcccacccccacctacattcccaacaccttcaatgtgactgtgctgcatggctccaaaattatggtctgtgagaaggacccagccctcaagaaccgctgccacattcgctacatgcacctgttctccaccatcaagtacaaggtctccataagtgtcagcaatgccctgggccacaatgccacagctatcacctttgacgagttcaccattgtctggtctgaacactccagagactaccgcagggnattatcccaactgcctttggagatgttncaatcattatntacccaatgaagaatcacatgttattcatcgcgataacaagggggatgacataggatcctgct

SEQ ID NO: 440480 - DNA, 1500 bp, Homo sapiens
atctgtggggattctcacaacttccatttctggtgaacagctgaggtcagagaggagttggtccaggcgcaatgttcagcgtatttgaggaaatcacaagaattgtagttaaggagatggatgctggaggggatatgattgccgttagaagccttgttgatgctgatagattccgctgcttccatctggtgggggagaagagaactttctttggatgccggcactacacaacaggcctcaccctgatggacattctggacacagatggggacaagtggttagatgaactggattctgggctccaaggtcaaaaggctgagtttcaaattctggataatgtagactcaacgggagagttgatagtgagattacccaaagaaataacaatttcaggcagtttccagggcttccaccatcagaaaatcaagatatcggagaaccggatatcccagcagtatctggctacccttgaaaacaggaagctgaagagggaactacccttttcattccgatcaattaatacgagagaaaacctgtatctggtgacagaaactctggagacggtaaaggaggaaaccctgaaaagcgaccggcaatataaattttggagccagatctctcagggccatctcagctataaacacaagggccaaagggaagtgaccatccccccaaatcgggtcctgagctatcgagtaaagcagcttgtcttccccaacaaggagacgatgaagaaggatggtgcttcatcctgtttaggaaagtctttgggttcggaggattccagaaacatgaaggagaagttggaggacatggagagtgtcctcaaggacctgacagaggagaagagaaaagatgtgctaaactccctcgctaagtgcctcggcaaggaggatattcggcaggatctagagcaaagagtatctgaggtcctgatttccggggagctacacatggaggacccagacaagcctctcctaagcagcctttttaatgctgctggggtcttggtagaagcgcgtgcaaaagccattctggacttcctggatgccctgctagagctgtctgaagagcagcagtttgtggctgaggccctggagaaggggacccttcctctgttgaaggaccaggtgaaatctgtcatggagcagaactgggatgagctggccagcagtcctcctgacatggactatgaccctgaggcacgaattctctgtgcgctgtatgttgttgtctctatcctgctggagctggctgaggggcctacctctgtctcttcctaactacaaaagccctttctccccacaagcctctgggttttccctttaccagtctgtcctcactgccatcgccactaccatcctgtcaccagtgggacctctttaaaacaagcagccaaccattctttgatgtatcccattcgctccatgttaacatccaaaaccagcctggatttcatacatggacttctgattaaaagtggcaggttgtgcatgttaa

SEQ ID NO: 440481 - DNA, 2106 bp, Homo sapiens
  misc_feature (617)..(617): n is a, c, g, or t
  misc_feature (632)..(632): n is a, c, g, or t
  misc_feature (695)..(695): n is a, c, g, or t
  misc_feature (1750)..(1750): n is a, c, g, or t
  misc_feature (1933)..(1933): n is a, c, g, or t
ggaagcagtgagtggataagtgcctgtgctgggcagaagggatataggggaaggtggccaaaggtaggatggggaagtggatcccaggaagcttgagtattctatagtgtcacaccacctcattgggaaattgttggtagggaggcacccatccaattgccttgcagaatacagcaaggcagggagcccaagaatcagagccaagggaagaaacgaccagttgaggttagtaatgtgaagtctggcaaccgtgcccgtcattcctccctggttcctctgttcatcaacgttggggctagtctggctggggcatggtgggcctgcctttccatcccttgggccccttggaacaagggggcaactctgctgtgggagatgtagaaaatgggtctcactttctctatttggggcaatagctgctacttttttcctccagatgggtaccatgaggggcagaggagaatctgggatctgtgatgtttagccctctttactgagtcatggctgcctcacgttctagaagtaaggcaggcaaatcattccaggtactgattgtcctggaacctttggctcttccttgacctcatgtcacgtgcgtccatgtgaagagagtccangaaacgggctttatntgagcaacaaggctgggtgcaggcaagctgagtccaaaaaaggggtcagcaaagggtggtggnattatcattagttcttatatgtttgggataggcttacaaagtacattctcaagggtggagaaatattacaaagtaccttcttaagggcaggggagaatattacaaagtaccttcttaagggcgggggggagactatattgtatcagggtggggcaggaacaaatcacaatggtggaatgtcatcagttaaggctattttcatttcttttgtggatcttcagttgcttcaggccatctggatgtatacatgcaggtcacagggaatatgatggcttagcttgggttcagaggcctgacacctcaggctgccaaatgtggaagatttaaatacttgaaccaataccctcctcccaaaaactgaaattggcttctgtttctgagttggtccaggcgcaatgttcagcgtatttgaggaaatcacaagaattgtagttaaggagatggatgctggaggggatatgattgccgttagaagccttgttgatgctgatagattccgctgcttccatctggtgggggagaagagaactttctttggatgccggcactacacaacaggcctcaccctgatggacattctggacacagatggggacaagtggttagatgaactggattctgggctccaaggtcagtataaggtagatgacaggtggccagccaggaggccttgaccgtttgtactccatctccttctcaattccccattgttatcaaccaatcaacaacgaaactgtgggatttgtacacatccacacaccttaatttaagaaatgcacggaagagctgcatggtgggaggagagtgggagaagtggagatttatttccactggaaaccgttcctaaatggtcttccttttccattttttcccttgtaaaataatctgcttttaatttagcgagctcttctcatgtgtttatcatttaaatgaataagtaaatgagggcagtttgcttactggttaagaaaggatgcaggctttagggctggaagcacctggtttcaaagcctggctctgcctcttatcagctgcgtaacctttggacaagttgntttattgctctaagtttcagtttcctcctgtgtcaactctagaggactgttgtaagaatcaagtgagggatgggtgcggtggctcactcctgtaatcccagcactttgggaggccgaggtgggcggatcacgaggtcaggagatcgagaccatcctggctaacacagtgaaaccccgtctctncttaaaaaaaaaaaatacaaaaaattagccaggcgtggtggcatgcgcctgtagtcctggctactcaggaggctgaggcaagagaattgcttgaacccgggaggtgcaggttgccgtgagctgagatcacgccactgcactccagcctgggagacaaagcaagcctctgtctc

SEQ ID NO: 440482 - DNA, 1972 bp, Homo sapiens
aaactcctgaactcaggtgatccacccactgcagcctcccaaagtgctgggattacaggcgtgagccaccatgcccagcctttcctgactttaaactaaaggagtgagactagaaggtccctgtgattctgaattatgtggcttcctctggaatttctaggttttccccttgatcccagcagggttgtactgcctaagagagcttggaaagggatagagaagtctgacccaaatttgcggagcgactgagtgtatgctgccccctttctgggccttggcttcttcctcaatcatctaggcacagtcctatgactgcctgtttttgaggatgtgggaagggtctgcaaatacagtgctttcccattgacacacgctggtgaggatgcaggctccctggcaccagcagtgagggctcagattgcaagagtaaaaacttccatcactgggaagagaagtctgcaggggactggaggtgatctgaagattctgaaataactcttcctctctctgcagagaaggatggtgcttcatcctgtttaggtaagggtgatagccaagtgtgttcagggtggctgcaccaacccaccctgagtccatgtggctcaagactgctgctcaggtggggtcagctgagtgggtaggaagtcgggaggcactgcctagcaggtttcaactttagtctggaggctgcatctgtctcctctaaacacagtggttctcattggttataccccaaaatcacaccaggaaactttaaaactagtgacgactgagtcccgtctccagaaactctgacttaattgtggggggtgtggcctggacatcaggatttgtaataactcctcaggtgattctcatgtagtcaaggttgagaaccactgctttaactttctccaaatcctaattacttctagtgtggcctgaggactgcactttgaatggcaagggccaaataaccaagtttttgtttttttccaggaagtggagaagaatttggggttgggactagactgggggttagctggggagatggaagatggaagtggggtcagtgggaggcaatgatggtaggtatcttgagaagaaggatgcttaattttaacacggaaagactggaagaagggaagatacaaagaggtggtctccagaagacagtcagacaaataacagagccttagaaataaaaccttttgggctgggtggcccaggttctcaattgctgcctctacaggaaagtctttgggttcggaggattccagaaacatgaaggagaagttggaggacatggagagtgtcctcaaggacctgacagaggagaagagaaaagatgtgctaaactccctcgctaagtgcctcggcaaggaggatattcggcaggatctagagcaaagagtatctgaggtcctgatttccggggagctacacatggaggacccagacaagcctctcctaagcagcctttttaatgctgctggggtcttggtagaagcgcgtgcaaaagccattctggacttcctggatgccctgctagagctgtctgaagagcagcagtttgtggctgaggccctggagaaggggacccttcctctgttgaaggaccaggtgaaatctgtcatggagcagaactgggatgagctggccagcagtcctcctgacatggactatgaccctgaggcacgaattctctgtgcgctgtatgttgttgtctctatcctgctggagctggctgaggggcctacctctgtctcttcctaactacaaaagccctttctccccacaagcctctgggttttccctttaccagtctgtcctcactgccatcgccactaccatcctgtcaccagtgggacctctttaaaacaagcagccaaccattctttgatgtatcccattcgctccatgttaacatccaaaaccagcctggatttcatacatggacttctgattaaaagtggcaggttgtgcatgttaa

SEQ ID NO: 440483 - DNA, 2407 bp, Homo sapiens
  misc_feature (617)..(617): n is a, c, g, or t
  misc_feature (632)..(632): n is a, c, g, or t
  misc_feature (695)..(695): n is a, c, g, or t
ggaagcagtgagtggataagtgcctgtgctgggcagaagggatataggggaaggtggccaaaggtaggatggggaagtggatcccaggaagcttgagtattctatagtgtcacaccacctcattgggaaattgttggtagggaggcacccatccaattgccttgcagaatacagcaaggcagggagcccaagaatcagagccaagggaagaaacgaccagttgaggttagtaatgtgaagtctggcaaccgtgcccgtcattcctccctggttcctctgttcatcaacgttggggctagtctggctggggcatggtgggcctgcctttccatcccttgggccccttggaacaagggggcaactctgctgtgggagatgtagaaaatgggtctcactttctctatttggggcaatagctgctacttttttcctccagatgggtaccatgaggggcagaggagaatctgggatctgtgatgtttagccctctttactgagtcatggctgcctcacgttctagaagtaaggcaggcaaatcattccaggtactgattgtcctggaacctttggctcttccttgacctcatgtcacgtgcgtccatgtgaagagagtccangaaacgggctttatntgagcaacaaggctgggtgcaggcaagctgagtccaaaaaaggggtcagcaaagggtggtggnattatcattagttcttatatgtttgggataggcttacaaagtacattctcaagggtggagaaatattacaaagtaccttcttaagggcaggggagaatattacaaagtaccttcttaagggcgggggggagactatattgtatcagggtggggcaggaacaaatcacaatggtggaatgtcatcagttaaggctattttcatttcttttgtggatcttcagttgcttcaggccatctggatgtatacatgcaggtcacagggaatatgatggcttagcttgggttcagaggcctgacacctcaggctgccaaatgtggaagatttaaatacttgaaccaataccctcctcccaaaaactgaaattggcttctgtttctgagttggtccaggcgcaatgttcagcgtatttgaggaaatcacaagaattgtagttaaggagatggatgctggaggggatatgattgccgttagaagccttgttgatgctgatagattccgctgcttccatctggtgggggagaagagaactttctttggatgccggcactacacaacaggcctcaccctgatggacattctggacacagatggggacaagtggttagatgaactggattctgggctccaaggtcaaaaggctgagtttcaaattctggataatgtagactcaacgggagagttgatagtgagattacccaaagaaataacaatttcaggcagtttccagggcttccaccatcagaaaatcaagatatcggagaaccggatatcccagcagtatctggctacccttgaaaacaggaagctgaagagggaactacccttttcattccgatcaattaatacgagagaaaacctgtatctggtgacagaaactctggagacggtaaaggaggaaaccctgaaaagcgaccggcaatataaattttggagccagatctctcagggccatctcagctataaacacaaggaaagtctttgggttcggaggattccagaaacatgaaggagaagttggaggacatggagagtgtcctcaaggacctgacagaggagaagagaaaagatgtgctaaactccctcgctaagtgcctcggcaaggaggatattcggcaggatctagagcaaagagtatctgaggtcctgatttccggggagctacacatggaggacccagacaagcctctcctaagcagcctttttaatgctgctggggtcttggtagaagcgcgtgcaaaagccattctggacttcctggatgccctgctagagctgtctgaagagcagcagtttgtggctgaggccctggagaaggggacccttcctctgttgaaggaccaggtgaaatctgtcatggagcagaactgggatgagctggccagcagtcctcctgacatggactatgaccctgaggcacgaattctctgtgcgctgtatgttgttgtctctatcctgctggagctggctgaggggcctacctctgtctcttcctaactacaaaagccctttctccccacaagcctctgggttttccctttaccagtctgtcctcactgccatcgccactaccatcctgtcaccagtgggacctctttaaaacaagcagccaaccattctttgatgtatcccattcgctccatgttaacatccaaaaccagcctggatttcatacatggacttctgattaaaagtggcaggttgtgcatgttaa

SEQ ID NO: 440484 - DNA, 1852 bp, Homo sapiens
aaactcctgaactcaggtgatccacccactgcagcctcccaaagtgctgggattacaggcgtgagccaccatgcccagcctttcctgactttaaactaaaggagtgagactagaaggtccctgtgattctgaattatgtggcttcctctggaatttctaggttttccccttgatcccagcagggttgtactgcctaagagagcttggaaagggatagagaagtctgacccaaatttgcggagcgactgagtgtatgctgccccctttctgggccttggcttcttcctcaatcatctaggcacagtcctatgactgcctgtttttgaggatgtgggaagggtctgcaaatacagtgctttcccattgacacacgctggtgaggatgcaggctccctggcaccagcagtgagggctcagattgcaagagtaaaaacttccatcactgggaagagaagtctgcaggggactggaggtgatctgaagattctgaaataactcttcctctctctgcagagaaggatggtgcttcatcctgtttaggtaagggtgatagccaagtgtgttcagggtggctgcaccaacccaccctgagtccatgtggctcaagactgctgctcaggtggggtcagctgagtgggtaggaagtcgggaggcactgcctagcaggtttcaactttagtctggaggctgcatctgtctcctctaaacacagtggttctcattggttataccccaaaatcacaccaggaaactttaaaactagtgacgactgagtcccgtctccagaaactctgacttaattgtggggggtgtggcctggacatcaggatttgtaataactcctcaggtgattctcatgtagtcaaggttgagaaccactgctttaactttctccaaatcctaattacttctagtgtggcctgaggactgcactttgaatggcaagggccaaataaccaagtttttgtttttttccaggaagtggagaagaatttggggttgggactagactgggggttagctggggagatggaagatggaagtggggtcagtgggaggcaatgatggtaggtatcttgagaagaaggatgcttaattttaacacggaaagactggaagaagggaagatacaaagaggtggtctccagaagacagtcagacaaataacagagccttagaaataaaaccttttgggctgggtggcccaggttctcaattgctgcctctacaggaaagtctttgggttcggaggattccagaaacatgaaggagaagttggaggacatggagagtgtcctcaaggacctgacagaggagaagagaaaagatgtgctaaactccctcgctaagtgcctcggcaaggaggatattcggcaggatctagagcaaagagtatctgaggtcctgatttccggggagctacacatggaggacccagacaagcctctcctaagcagcctttttaatgctgctggggtcttggtagaagcgcgtgcaaaagccattctggacttcctggatgccctgctagagctgtctgaagagcagcagtttgtggctgaggccctggagaaggggacccttcctctgttgaaggaccagctggctgaggggcctacctctgtctcttcctaactacaaaagccctttctccccacaagcctctgggttttccctttaccagtctgtcctcactgccatcgccactaccatcctgtcaccagtgggacctctttaaaacaagcagccaaccattctttgatgtatcccattcgctccatgttaacatccaaaaccagcctggatttcatacatggacttctgattaaaagtggcaggttgtgcatgttaa

SEQ ID NO: 440485 - DNA, 1757 bp, Homo sapiens
aaactcctgaactcaggtgatccacccactgcagcctcccaaagtgctgggattacaggcgtgagccaccatgcccagcctttcctgactttaaactaaaggagtgagactagaaggtccctgtgattctgaattatgtggcttcctctggaatttctaggttttccccttgatcccagcagggttgtactgcctaagagagcttggaaagggatagagaagtctgacccaaatttgcggagcgactgagtgtatgctgccccctttctgggccttggcttcttcctcaatcatctaggcacagtcctatgactgcctgtttttgaggatgtgggaagggtctgcaaatacagtgctttcccattgacacacgctggtgaggatgcaggctccctggcaccagcagtgagggctcagattgcaagagtaaaaacttccatcactgggaagagaagtctgcaggggactggaggtgatctgaagattctgaaataactcttcctctctctgcagagaaggatggtgcttcatcctgtttaggtaagggtgatagccaagtgtgttcagggtggctgcaccaacccaccctgagtccatgtggctcaagactgctgctcaggtggggtcagctgagtgggtaggaagtcgggaggcactgcctagcaggtttcaactttagtctggaggctgcatctgtctcctctaaacacagtggttctcattggttataccccaaaatcacaccaggaaactttaaaactagtgacgactgagtcccgtctccagaaactctgacttaattgtggggggtgtggcctggacatcaggatttgtaataactcctcaggtgattctcatgtagtcaaggttgagaaccactgctttaactttctccaaatcctaattacttctagtgtggcctgaggactgcactttgaatggcaagggccaaataaccaagtttttgtttttttccaggaagtggagaagaatttggggttgggactagactgggggttagctggggagatggaagatggaagtggggtcagtgggaggcaatgatggtaggtatcttgagaagaaggatgcttaattttaacacggaaagactggaagaagggaagatacaaagaggtggtctccagaagacagtcagacaaataacagagccttagaaataaaaccttttgggctgggtggcccaggttctcaattgctgcctctacaggaaagtctttgggttcggaggattccagaaacatgaaggagaagttggaggacatggagagtgtcctcaaggacctgacagaggagaagagaaaagatgtgctaaactccctcgctaagtgcctcggcaaggaggatattcggcaggatctagagcaaagagtatctgaggtcctgatttccggggagctacacatggaggacccagacaagcctctcctaagcagcctttttaatgctgctggggtcttggtagaagcgcgtgcaaaagccattctggacttcctggatgccctgctagagctgtctgaagagcagcagtttgtggctgaggccctggagaaggggacccttcctctgttgaaggaccaggacagcctgggctgagggccatggtcatagtggaagggaatgcccatattctcaagggacccagaagtcccagggtacagccccttcttattccatagttttctgccggctcacatccatgcagctggtttgtgacaattccctggacagagagt

SEQ ID NO: 440486 - DNA, 2492 bp, Homo sapiens
  misc_feature (617)..(617): n is a, c, g, or t
  misc_feature (632)..(632): n is a, c, g, or t
  misc_feature (695)..(695): n is a, c, g, or t
ggaagcagtgagtggataagtgcctgtgctgggcagaagggatataggggaaggtggccaaaggtaggatggggaagtggatcccaggaagcttgagtattctatagtgtcacaccacctcattgggaaattgttggtagggaggcacccatccaattgccttgcagaatacagcaaggcagggagcccaagaatcagagccaagggaagaaacgaccagttgaggttagtaatgtgaagtctggcaaccgtgcccgtcattcctccctggttcctctgttcatcaacgttggggctagtctggctggggcatggtgggcctgcctttccatcccttgggccccttggaacaagggggcaactctgctgtgggagatgtagaaaatgggtctcactttctctatttggggcaatagctgctacttttttcctccagatgggtaccatgaggggcagaggagaatctgggatctgtgatgtttagccctctttactgagtcatggctgcctcacgttctagaagtaaggcaggcaaatcattccaggtactgattgtcctggaacctttggctcttccttgacctcatgtcacgtgcgtccatgtgaagagagtccangaaacgggctttatntgagcaacaaggctgggtgcaggcaagctgagtccaaaaaaggggtcagcaaagggtggtggnattatcattagttcttatatgtttgggataggcttacaaagtacattctcaagggtggagaaatattacaaagtaccttcttaagggcaggggagaatattacaaagtaccttcttaagggcgggggggagactatattgtatcagggtggggcaggaacaaatcacaatggtggaatgtcatcagttaaggctattttcatttcttttgtggatcttcagttgcttcaggccatctggatgtatacatgcaggtcacagggaatatgatggcttagcttgggttcagaggcctgacacctcaggctgccaaatgtggaagatttaaatacttgaaccaataccctcctcccaaaaactgaaattggcttctgtttctgagttggtccaggcgcaatgttcagcgtatttgaggaaatcacaagaattgtagttaaggagatggatgctggaggggatatgattgccgttagaagccttgttgatgctgatagattccgctgcttccatctggtgggggagaagagaactttctttggatgccggcactacacaacaggcctcaccctgatggacattctggacacagatggggacaagtggttagatgaactggattctgggctccaaggtcaaaaggctgagtttcaaattctggataatgtagactcaacgggagagttgatagtgagattacccaaagaaataacaatttcaggcagtttccagggcttccaccatcagaaaatcaagatatcggagaaccggatatcccagcagtatctggctacccttgaaaacaggaagctgaagagggaactacccttttcattccgatcaattaatacgagagaaaacctgtatctggtgacagaaactctggagacggtaaaggaggaaaccctgaaaagcgaccggcaatataaattttggagccagatctctcagggccatctcagctataaacacaagggccaaagggaagtgaccatccccccaaatcgggtcctgagctatcgagtaaagcagcttgtcttccccaacaaggagacgatgagaaagtctttgggttcggaggattccagaaacatgaaggagaagttggaggacatggagagtgtcctcaaggacctgacagaggagaagagaaaagatgtgctaaactccctcgctaagtgcctcggcaaggaggatattcggcaggatctagagcaaagagtatctgaggtcctgatttccggggagctacacatggaggacccagacaagcctctcctaagcagcctttttaatgctgctggggtcttggtagaagcgcgtgcaaaagccattctggacttcctggatgccctgctagagctgtctgaagagcagcagtttgtggctgaggccctggagaaggggacccttcctctgttgaaggaccaggtgaaatctgtcatggagcagaactgggatgagctggccagcagtcctcctgacatggactatgaccctgaggcacgaattctctgtgcgctgtatgttgttgtctctatcctgctggagctggctgaggggcctacctctgtctcttcctaactacaaaagccctttctccccacaagcctctgggttttccctttaccagtctgtcctcactgccatcgccactaccatcctgtcaccagtgggacctctttaaaacaagcagccaaccattctttgatgtatcccattcgctccatgttaacatccaaaaccagcctggatttcatacatggacttctgattaaaagtggcaggttgtgcatgttaa

SEQ ID NO: 440487 - DNA, 1933 bp, Homo sapiens
taaccctcaccctaaccacgcaacccccaccatgcccagcctttcctgactttaaactaaaggagtgagactagaaggtccctgtgattctgaattatgtggcttcctctggaatttctaggttttccccttgatcccagcagggttgtactgcctaagagagcttggaaagggatagagaagtctgacccaaatttgcggagcgactgagtgtatgctgccccctttctgggccttggcttcttcctcaatcatctaggcacagtcctatgactgcctgtttttgaggatgtgggaagggtctgcaaatacagtgctttcccattgacacacgctggtgaggatgcaggctccctggcaccagcagtgagggctcagattgcaagagtaaaaacttccatcactgggaagagaagtctgcaggggactggaggtgatctgaagattctgaaataactcttcctctctctgcagagaaggatggtgcttcatcctgtttaggtaagggtgatagccaagtgtgttcagggtggctgcaccaacccaccctgagtccatgtggctcaagactgctgctcaggtggggtcagctgagtgggtaggaagtcgggaggcactgcctagcaggtttcaactttagtctggaggctgcatctgtctcctctaaacacagtggttctcattggttataccccaaaatcacaccaggaaactttaaaactagtgacgactgagtcccgtctccagaaactctgacttaattgtggggggtgtggcctggacatcaggatttgtaataactcctcaggtgattctcatgtagtcaaggttgagaaccactgctttaactttctccaaatcctaattacttctagtgtggcctgaggactgcactttgaatggcaagggccaaataaccaagtttttgtttttttccaggaagtggagaagaatttggggttgggactagactgggggttagctggggagatggaagatggaagtggggtcagtgggaggcaatgatggtaggtatcttgagaagaaggatgcttaattttaacacggaaagactggaagaagggaagatacaaagaggtggtctccagaagacagtcagacaaataacagagccttagaaataaaaccttttgggctgggtggcccaggttctcaattgctgcctctacaggaaagtctttgggttcggaggattccagaaacatgaaggagaagttggaggacatggagagtgtcctcaaggacctgacagaggagaagagaaaagatgtgctaaactccctcgctaagtgcctcggcaaggaggatattcggcaggatctagagcaaagagtatctgaggtcctgatttccggggagctacacatggaggacccagacaagcctctcctaagcagcctttttaatgctgctggggtcttggtagaagcgcgtgcaaaagccattctggacttcctggatgccctgctagagctgtctgaagagcagcagtttgtggctgaggccctggagaaggggacccttcctctgttgaaggaccaggtgaaatctgtcatggagcagaactgggatgagctggccagcagtcctcctgacatggactatgaccctgaggcacgaattctctgtgcgctgtatgttgttgtctctatcctgctggagctggctgaggggcctacctctgtctcttcctaactacaaaagccctttctccccacaagcctctgggttttccctttaccagtctgtcctcactgccatcgccactaccatcctgtcaccagtgggacctctttaaaacaagcagccaaccattctttgatgtatcccattcgctccatgttaacatccaaaaccagcctggatttcatacatggacttctgattaaaagtggcaggttgtgcatgttaa

SEQ ID NO: 440488 - DNA, 1281 bp, Homo sapiens
aaactcctgaactcaggtgatccacccactgcagcctcccaaagtgctgggattacaggcgtgagccaccatgcccagcctttcctgactttaaactaaaggagtgagactagaaggtccctgtgattctgaattatgtggcttcctctggaatttctaggttttccccttgatcccagcagggttgtactgcctaagagagcttggaaagggatagagaagtctgacccaaatttgcggagcgactgagtgtatgctgccccctttctgggccttggcttcttcctcaatcatctaggcacagtcctatgactgcctgtttttgaggatgtgggaagggtctgcaaatacagtgctttcccattgacacacgctggtgaggatgcaggctccctggcaccagcagtgagggctcagattgcaagagtaaaaacttccatcactgggaagagaagtctgcaggggactggaggtgatctgaagattctgaaataactcttcctctctctgcagagaaggatggtgcttcatcctgtttaggaaagtctttgggttcggaggattccagaaacatgaaggagaagttggaggacatggagagtgtcctcaaggacctgacagaggagaagagaaaagatgtgctaaactccctcgctaagtgcctcggcaaggaggatattcggcaggatctagagcaaagagtatctgaggtcctgatttccggggagctacacatggaggacccagacaagcctctcctaagcagcctttttaatgctgctggggtcttggtagaagcgcgtgcaaaagccattctggacttcctggatgccctgctagagctgtctgaagagcagcagtttgtggctgaggccctggagaaggggacccttcctctgttgaaggaccaggtgaaatctgtcatggagcagaactgggatgagctggccagcagtcctcctgacatggactatgaccctgaggcacgaattctctgtgcgctgtatgttgttgtctctatcctgctggagctggctgaggggcctacctctgtctcttcctaactacaaaagccctttctccccacaagcctctgggttttccctttaccagtctgtcctcactgccatcgccactaccatcctgtcaccagtgggacctctttaaaacaagcagccaaccattctttgatgtatcccattcgctccatgttaacatccaaaaccagcctggatttcatacatggacttctgattaaaagtggcaggttgtgcatgttaa

SEQ ID NO: 440489 - DNA, 2152 bp, Homo sapiens
  misc_feature (617)..(617): n is a, c, g, or t
  misc_feature (632)..(632): n is a, c, g, or t
  misc_feature (695)..(695): n is a, c, g, or t
ggaagcagtgagtggataagtgcctgtgctgggcagaagggatataggggaaggtggccaaaggtaggatggggaagtggatcccaggaagcttgagtattctatagtgtcacaccacctcattgggaaattgttggtagggaggcacccatccaattgccttgcagaatacagcaaggcagggagcccaagaatcagagccaagggaagaaacgaccagttgaggttagtaatgtgaagtctggcaaccgtgcccgtcattcctccctggttcctctgttcatcaacgttggggctagtctggctggggcatggtgggcctgcctttccatcccttgggccccttggaacaagggggcaactctgctgtgggagatgtagaaaatgggtctcactttctctatttggggcaatagctgctacttttttcctccagatgggtaccatgaggggcagaggagaatctgggatctgtgatgtttagccctctttactgagtcatggctgcctcacgttctagaagtaaggcaggcaaatcattccaggtactgattgtcctggaacctttggctcttccttgacctcatgtcacgtgcgtccatgtgaagagagtccangaaacgggctttatntgagcaacaaggctgggtgcaggcaagctgagtccaaaaaaggggtcagcaaagggtggtggnattatcattagttcttatatgtttgggataggcttacaaagtacattctcaagggtggagaaatattacaaagtaccttcttaagggcaggggagaatattacaaagtaccttcttaagggcgggggggagactatattgtatcagggtggggcaggaacaaatcacaatggtggaatgtcatcagttaaggctattttcatttcttttgtggatcttcagttgcttcaggccatctggatgtatacatgcaggtcacagggaatatgatggcttagcttgggttcagaggcctgacacctcaggctgccaaatgtggaagatttaaatacttgaaccaataccctcctcccaaaaactgaaattggcttctgtttctgagttggtccaggcgcaatgttcagcgtatttgaggaaatcacaagaattgtagttaaggagatggatgctggaggggatatgattgccgttagaagccttgttgatgctgatagattccgctgcttccatctggtgggggagaagagaactttctttggatgccggcactacacaacaggcctcaccctgatggacattctggacacagatggggacaagtggttagatgaactggattctgggctccaaggtcaaaaggctgagtttcaaattctggataatgtagactcaacgggagagttgatagtgagattacccaaagaaataacaatttcaggcagtttccagggcttccaccatcagaaaatcaagatatcggagaaccggatatcccagcagtatctggctacccttgaaaacaggaagctgaagagggaactacccttttcattccgatcaattaatacgagagaaaacctgtatctggtgacagaaactctggagacggtaaaggaggaaaccctgaaaagcgaccggcaatataaattttggagccagatctctcagggccatctcagctataaacacaagggccaaagggaagtgaccatccccccaaatcgggtcctgagctatcgagtaaagcagcttgtcttccccaacaaggagacgatgaagaaggatggtgcttcatcctgtttaggtaagggtgatagccaagtgtgttcagggtggctgcaccaacccaccctgagtccatgtggctcaagactgctgctcaggtggggtcagctgagtgggtaggaagtcgggaggcactgcctagcaggtttcaactttagtctggaggctgcatctgtctcctctaaacacagtggttctcattggttataccccaaaatcacaccaggaaactttaaaactagtgacgactgagtcccgtctccagaaactctgacttaattgtggggggtgtggcctggacatcaggatttgtaataactcctcaggtgattctcattggttataccccaaaatcacaccaggaaactttaaaactagcgactcgtggaaatg

SEQ ID NO: 440490 - DNA, 3354 bp, Homo sapiens
  misc_feature (1172)..(1172): n is a, c, g, or t
  misc_feature (1424)..(1424): n is a, c, g, or t
  misc_feature (1835)..(1835): n is a, c, g, or t
  misc_feature (2623)..(2623): n is a, c, g, or t
agggtatagggaggcggctgaacaaggttgtgggggtaggaagctagggttagaggcaacccgtgaggctagaaccccgaacgtggtcggttggagaaaatatgtccctccggaggcacattgggaaccctgagtatctgatgaaaaggataccacagaacccaagataccagcatatcaaatcaagactggacactggtgcctgtgtgtatcttaccagctccccagcactgccagactgtgccatgaatggattatgcttctgatgaaatccctggctgcgttttgttcagtcaccaccgcagggttcttgtatattctcaagcaccctctctgggtttctgttttgcagcactgcaggctgattaagggacactttccaaaccacagggctctccctttattagtccccacagtctttcattggctgcattgtcctcccatttctatctatattcaatctaatttccaatttctttagctttctgaaattctgtaggctttctccactcagtcttttctagccttatttttgtctttttaaaaattcaccttccttttattatctctagacaaactattcattccctcttttcttctttaggctttacttttcctgaatatttgctaatagccttgactgtaagcatcaaactcattatagactaggtactcttcatttttatttgttgtttaattctgtttcttccgtcaaaggaagaaatatatgtgaaaggcttttataaaccagaaagcactatacacacatatcacttattgaggttaacaaaggaccactgtgcctcttttcatgctttctgctcttccaagccaagagaacttctccatagaggagggaaatattgaagaaaaataaagccatggagttgtctcttagcaactgagttcgtgccttataaatctcatctactttagattactgctgcacaaaatcacttgcttttcttattggctcagtataaataatgttattaaattataggaaaacaatggaaaaaatctaatgaatgactcattcactgaatcagttgcactctgtgtttgcacagcactgttgctatagtcgggttgtttcttcctcttgattctaattgtaaagttttgttatatatcttttatcacaactttagttgtaagtaaacaaagtagangctaaatgctaccttatacatttataggttgcttaagtcgtgaagcaatatgagtcatatatgtagcacataacatatactgtatataagtcaagttgtacatagtttaaagaaaatcaggtgtgcagaaactcagaccaaattgggaagtatttgcattataaaataactcattataaggatttttcagttagtagatctccatagtaaatttcattcagcaaatgtgtatttttcctatttatttatttntttatttattgagatgaagtctcgctctgttgcccaagctggagtgcagtggcgtgatcttggctcactgcaacctctgcctcccaggttcaagcgattcttctgcctcagcctcctgagtagctgggactacaggtgcgcaccaccatgcctggctaatttttatatttttagtagagacggggttttactatgttggtcaggctggtctcgaactcctgaccttgtgatcctcccgcctcggcctcccaaagtgctgggattacaggcgtgagccactgtgccaggtctagttatttatttatttattgtagagatgggctctcactgtgttggccagggtggtcttgaactcctggcctcgagcaatccttccacctcagtctcccaaagtgctgggattacaggtgngagctatcacacctggccatttttttttttttttttttttgagatagagtctcactctgtcacccgcattgtagtgcagtggcgcattcttgctcactgcaacctccccttcctgggctcaggggatcctcctacctcagcctctcaagtagctgggactacagggatgtgccaccatgcctggctagtttttgtgtatgtgtgtgttttgtagagacgaggtctcactattttgcccaggctggtccggaactcctgggctcaagcaatcctgcctcctcagcctcccaacgtgctgggattgcaggcatgatccagtgcacctgaccatcattcagcaagtatttttgagtgtctcctatgctagacaatggaagggataaagattattcatacgtgtgtgtgtgtgtgtgtgtgtacgtgcccataaatagtcccttggctttctgtctagtaaggtaggtaagacaatacagtgataaatgccttgtgagttgtaagccgagtgctatagaggctcagaggagggaaaggtcacttcctgctgagtgagctcttacgagtatgtggcaaggtgatacgttagagaatgcaagactaagagtttgtcaagttaagtaattaaggcaacattaagaggtagtgagttggtgtccagtgctagagcaaggagtttcagctttagttaggaagcaatggggagccactgactttttttttctttttgatcaaaaagtcttatctgggaaaatgtatctggcagtaatgtgtaatttcaattttttttnaaaaaaattggttcttggatagtcttttaggcttcttttgtatgaaacaaagccatgtttataaataagtgaattatgaaatggattcatttccaatctttttaaaaggtagtcagaaactatcttcagatgcaattagatacagtaagataggctgcatagttaagatgtaagcagtttacacagtgggataaaaatgctacttttcatactttctcaaaccatttttaggggtatttttgtgtcagccatcctgctatctcatttgtccaattaaagcaaggaagaaatcctccattctccttttttccccattcttggatagaatgaatgtctatagtgaaaagaactcatcagtagtcctctcagatttggtctgaatttcaccaaatatttgtataattgcaaaaaacttgtttctcagccttctcctttagggggaaaacaaatagagggcatgatggcctacctccctgcattgtggtgagggtcagctgatacaaaataaagtgttaagtgtaattaccctgaaatgtttgtaattaatggagaaatgaagtgtagacactttgttagtagaaaccactgtggtttggaaatgcagtgtttcaataataaagactggataaataaggttgtggtttggaaatgcagtgtttcaataataaagactggataaataaggttgtggtttggaaatgcagtgtttcaataataaagactggataaat

SEQ ID NO: 440491 - DNA, 758 bp, Homo sapiens
agggtatagggaggcggctgaacaaggttgtgggggtaggaagctagggttagaggcaacccgtgaggctagaaccccgaacgtggtcggttggagaaaatatgtccctccggaggcacattgggaaccctgaggtgagggccaggtctcggccggagagccggagggggcgggcgcaccggaaaaggctcatgtgggcagggaagagcagccagcgacttccgccgcccggaaggcgggaaggggccggcgtgaggaggggtcgggatgcaggggcggggcgggccgggcttgggggccgcggggcagcgttcaggaccccgttttgaggagcgatctctccccgcgtacgcacgccagtacttgtgactgcgaggagcgaagtacccaaagacacagcccttgccctcaaatggcttacagtctcggagtgacagttacaaaacagaaaagacaaaggaagcgctgcacactaatggcacgtgttgaaagccagccagcatctctgattgtggggatacaggaagagcaggagtaagctgaccaaacctttggaaaacgggcaaaataggacattaggcttacccctctctccataggacccttcagtttcttcatctgtttcaccgctagtcccctgctgcatttgtggcagtttcaacaaacgttattggaaacttccacggtgcagtaggtgctagacgtacaaagaagacaaggcctctgccctttaataaattgcgtatagtggaccaggc

SEQ ID NO: 440492 - DNA, 3468 bp, Homo sapiens
  misc_feature (1286)..(1286): n is a, c, g, or t
  misc_feature (1538)..(1538): n is a, c, g, or t
  misc_feature (1949)..(1949): n is a, c, g, or t
  misc_feature (2737)..(2737): n is a, c, g, or t
agggtatagggaggcggctgaacaaggttgtgggggtaggaagctagggttagaggcaacccgtgaggctagaaccccgaacgtggtcggttggagaaaatatgtccctccggaggcacattgggaaccctgagtatctgatgaaaaggataccacagaacccaagataccagcatatcaaatcaagactggacactggccgtactgttcctgtatttcccccaagccttgtttcttctgccacaaaaaccctcagctctttcatctctacccatctaacccctaattgcaactgtgatccacccttctgaagtgcctgtgtgtatcttaccagctccccagcactgccagactgtgccatgaatggattatgcttctgatgaaatccctggctgcgttttgttcagtcaccaccgcagggttcttgtatattctcaagcaccctctctgggtttctgttttgcagcactgcaggctgattaagggacactttccaaaccacagggctctccctttattagtccccacagtctttcattggctgcattgtcctcccatttctatctatattcaatctaatttccaatttctttagctttctgaaattctgtaggctttctccactcagtcttttctagccttatttttgtctttttaaaaattcaccttccttttattatctctagacaaactattcattccctcttttcttctttaggctttacttttcctgaatatttgctaatagccttgactgtaagcatcaaactcattatagactaggtactcttcatttttatttgttgtttaattctgtttcttccgtcaaaggaagaaatatatgtgaaaggcttttataaaccagaaagcactatacacacatatcacttattgaggttaacaaaggaccactgtgcctcttttcatgctttctgctcttccaagccaagagaacttctccatagaggagggaaatattgaagaaaaataaagccatggagttgtctcttagcaactgagttcgtgccttataaatctcatctactttagattactgctgcacaaaatcacttgcttttcttattggctcagtataaataatgttattaaattataggaaaacaatggaaaaaatctaatgaatgactcattcactgaatcagttgcactctgtgtttgcacagcactgttgctatagtcgggttgtttcttcctcttgattctaattgtaaagttttgttatatatcttttatcacaactttagttgtaagtaaacaaagtagangctaaatgctaccttatacatttataggttgcttaagtcgtgaagcaatatgagtcatatatgtagcacataacatatactgtatataagtcaagttgtacatagtttaaagaaaatcaggtgtgcagaaactcagaccaaattgggaagtatttgcattataaaataactcattataaggatttttcagttagtagatctccatagtaaatttcattcagcaaatgtgtatttttcctatttatttatttntttatttattgagatgaagtctcgctctgttgcccaagctggagtgcagtggcgtgatcttggctcactgcaacctctgcctcccaggttcaagcgattcttctgcctcagcctcctgagtagctgggactacaggtgcgcaccaccatgcctggctaatttttatatttttagtagagacggggttttactatgttggtcaggctggtctcgaactcctgaccttgtgatcctcccgcctcggcctcccaaagtgctgggattacaggcgtgagccactgtgccaggtctagttatttatttatttattgtagagatgggctctcactgtgttggccagggtggtcttgaactcctggcctcgagcaatccttccacctcagtctcccaaagtgctgggattacaggtgngagctatcacacctggccatttttttttttttttttttttgagatagagtctcactctgtcacccgcattgtagtgcagtggcgcattcttgctcactgcaacctccccttcctgggctcaggggatcctcctacctcagcctctcaagtagctgggactacagggatgtgccaccatgcctggctagtttttgtgtatgtgtgtgttttgtagagacgaggtctcactattttgcccaggctggtccggaactcctgggctcaagcaatcctgcctcctcagcctcccaacgtgctgggattgcaggcatgatccagtgcacctgaccatcattcagcaagtatttttgagtgtctcctatgctagacaatggaagggataaagattattcatacgtgtgtgtgtgtgtgtgtgtgtacgtgcccataaatagtcccttggctttctgtctagtaaggtaggtaagacaatacagtgataaatgccttgtgagttgtaagccgagtgctatagaggctcagaggagggaaaggtcacttcctgctgagtgagctcttacgagtatgtggcaaggtgatacgttagagaatgcaagactaagagtttgtcaagttaagtaattaaggcaacattaagaggtagtgagttggtgtccagtgctagagcaaggagtttcagctttagttaggaagcaatggggagccactgactttttttttctttttgatcaaaaagtcttatctgggaaaatgtatctggcagtaatgtgtaatttcaattttttttnaaaaaaattggttcttggatagtcttttaggcttcttttgtatgaaacaaagccatgtttataaataagtgaattatgaaatggattcatttccaatctttttaaaaggtagtcagaaactatcttcagatgcaattagatacagtaagataggctgcatagttaagatgtaagcagtttacacagtgggataaaaatgctacttttcatactttctcaaaccatttttaggggtatttttgtgtcagccatcctgctatctcatttgtccaattaaagcaaggaagaaatcctccattctccttttttccccattcttggatagaatgaatgtctatagtgaaaagaactcatcagtagtcctctcagatttggtctgaatttcaccaaatatttgtataattgcaaaaaacttgtttctcagccttctcctttagggggaaaacaaatagagggcatgatggcctacctccctgcattgtggtgagggtcagctgatacaaaataaagtgttaagtgtaattaccctgaaatgtttgtaattaatggagaaatgaagtgtagacactttgttagtagaaaccactgtggtttggaaatgcagtgtttcaataataaagactggataaataaggttgtggtttggaaatgcagtgtttcaataataaagactggataaataaggttgtggtttggaaatgcagtgtttcaataataaagactggataaat

SEQ ID NO: 440493 - DNA, 6351 bp, Homo sapiens
agggtatagggaggcggctgaacaaggttgtgggggtaggaagctagggttagaggcaacccgtgaggctagaaccccgaacgtggtcggttggagaaaatatgtccctccggaggcacattgggaaccctgagtatctgatgaaaaggataccacagaacccaagataccagcatatcaaatcaagactggacactggtaacagtatgactaaatatactgagaagctcgaagagattaagaaaaattatagatacaaaaaagatgagcttttcaagagactaaaagttacaacttttgcccagctgatcatccaagttgcttccctctctgatcaaacactggaagtgacagctgaggagattcaaaggctggaagacaatgattctgcagcttcagaccctgatgctgaaaccactgccaggaccaatgggaaaggaaatccaggtgagcagtcgccgagccctgagcagttcataaacaacgcaggagcaggggactccagccgctcaactcttcagagtgtcatcagtggtgttggggaactggatctagacaaagggccagtgaagaaagcagagccccataccaaagacaaaccttatcctgactgccccttcctgctgctagatgtgcgtgatagagattcttaccagcagtgccacattgttggagcttacagttacccaattgcaactctgtctagaacaatgaacccttattcaaatgatattcttgaatataaaaatgcccatggcaagatcatcattctgtatgacgatgatgaaaggctggccagtcaggcggccaccaccatgtgcgagcgtggatttgaaaacctcttcatgctttccggaggtctaaaagtcttagctcagaaattcccggaaggactgattactggttccctgccagcatcttgccagcaggcccttcctcctgggtctgcccggaaacgatccagccccaaagggccacccctaccagctgagaataaatggagatttaccccagaagacttaaaaaagatagaatattatctggaagaggagcaagggcctgcagatcatcctagccgactgaaccaagctaactcctccggaagagagtccaaggtgcctggtgcccgaagcgctcagaatctgccaggtggcggccccgccagccactcaaacccccgctccctcagcagtggtcacctgcaaggcaaaccctggaagtaaagactttgtctcacttaggcaaataaatgttcttcctcttttcagaacccctgagcatttcccaagttgggtcatttccagaaacttctgcagaggaaagaccatgacatatgtatgggataggcctcttccctgtccctgtctccagttcctctcccctcaggaggccacctcaggaaggattttgacaggtgaccataaaaaccagaggtgtgacaggctctagtctcctccctgttgtttacagcatatttaagtcttgtgaaactgtataggaaaaaagtatctacgtttttagtttttttgttttgtttttttttaataaggtccagcttgttgggtctctctgtgttgttttgtaaatacttcagtcacatctgcccgtgtgcctgtccctgccaccttttcattcactgttcttgacttcatgaaggcttctccgggcagtcttggtgtgagaagctgtttccaagggtgcagatgagccttaggttccagccgcctgcagaccccaccccagcaggctcactcagcaaggagctctctgcccagcatattgcaggccctgttttgagtatggaagccagtgcctgtgtactcactgaaattgaagatgaggaaagtagctgtacactcactgaatgctcccccttactagatatttcctggagccagaaaggtatgcatgtgggtgtcttcacaccggggaggagggcctctcatgggaaagccctggccaccacaccggcctgtgccccttgaagcccaccaaagcggccctcacttgtggtcagtatatcagttatgacgcccattgcccagcttcagtccatccatgttagatggacagaaattatggccagttgaaaataccagctttggttggacaactgtggacacacaaggtgaagaggactccgaagtcctttgtcagggctgacaacctcgtaagcccttgcttagaaatacagtattagtctaattgagtaattagtgcaatttcctgcttacttttcattctcatgactgaactgtgattaggaagttgtgattatagattctggttttggccggaattttgaatcagcattaattgaattgctaaatgactgacattcattccatttaattgggggaacaaaaggcctcaggtaaggatgaggaactctgaaatcagatggaaaagagcggtgttaatttttatggtctgtgatcgtagctgtgataagggactgaggaataaattgtgctctttgtcatggcaaccagcttctgaaaagcccactgaaaattgcctgtcctgctggtaactgctacggggtaagatttgccttaacagtactattttctcgccaccaaaaaaaaaaaaaaaaaaaaaaaaaaatgcaccacagtatttctagcatgggggctgtgtttgtatgagaaataaacgtaataaatatctcatagagacatatggaaaaataactttcagattcagcccagttctgttttagagtgtgtttattcttctctacttgatttccaaagtgcaacattttccgatgctttagaaatcaaacaaaccagggacattgttcagatgtcaagccatgcccaattttccacaagattcaagaatcttgtataaaattcagccaacgtacacatagctttaatgaggagcctgtcatgtttccccataaatttattgcctgagaacttagttcagcctttgctaatgccaaaatgctctggctttgtattttctttacagcatagatagaaaaatgcacatttttccacactcagctttcccctagcatggacaagattttcagccatttttgccacatatacatttttaaggaaaaaagatttttctctgtaagaaagttctggttatgctgttttaaaggtgacttgtcaggagttgagacttccctgccggattctattttgaaagtaaatggtcttccctccttgttccgattctgcgttcccatcgtcagacaactttggagtattagaaaccactgtatatatgtggaaagccaggtcagccagacctgttagaattggtgtgcactcacctgagagatctggcaggttggatatatttatgtgtatttctccacagtgcttgctttgccctgttggtaaggattttaaataaccatgctcaaaagagctgttctaatctgcgttttgcatgttaagtgttaatatcaaacattctttacgtgctcgaggtattgcttttaacattctactttgccagtttcttcattagattaattgacatgtattatttaaatgaccagtgatgctttgtgcaattatgaatgttgaagattaaagtacatagttactaatttgtcgtttgctattaatatgctgaaaactgccaacttctctcttcttttctgtcgagatgatttgggggagccacaggagactggtgtgatttttgctgcatctcctaggaaagcattttttaaaaaaaataaatgaatcaggaaatcagtccaattagggcagggggcctcagctctccagtcagaaagcctggatttcttttcctgctcaggctgggactgaagccaccttcaacaactggatcatggcttcctaccagcgtctcaggggttgactagctgcccttgtctggggcttgtgaaccctgagacagaaggtgcttcatcgatgtacaactacagcaccctgaacagcagtgatggccaaagtttaaataataccttaaatgctttaaaggggtttgtgtttaaggaagggagaaaagaaaaaaagaaaggaagggagaaagaagcaaggaaatgggaagaagggagggcagagagaagaaaagaagcagaaagcgagagagaaaggagaaagctacattacttatttgaaaacaaaaggaacaccctgggctgtaataatgtcaggctcaatctcttgaaaaagtatggaatgatttaaatggcctgcattcattttatcttttatctttttttttttttttaacctttagtggttagccaggaccagcacgatcatattgggcttggtataaatccgaatgaaaagagaccaaataacattcattagttgctcagggatttttcctgtggtgctatttaaattatacaaaaattcttaagactttaggctactcgaccaagaaaacagaacaaaacaaaaaatcgtgttttctctaattcccttgtggaatgtaagtgaaatcagagtcctaggctaggaagaaatacgtaggtaatttttcttgtgttggttttggtttctgtcatgttgtttattggctatagattctgtcttttatgttatctgacttttttagagcgaataattagtttctgtccacctggatttaaatccatgaccaccttcttgctctactctgaagataatcagtaagaacctttctttctccagttctaaaacgttctcagtgtctttaatgtgtgtttattttcttcccaattctttcaaagatttaactcccacgatacttttttttccccaggaaacaccgcaaatgtgtggaatataattcaccagtttaattatgtgagcatgttgagtacttacatgcaggtccattaatttttcactaacaattattttttcatgcaaaagcaataaataacattgtgcttccaaaatgttcagaatacatttgggtagtaatactttcctagatttacaataattattgaaattattattatgacatctttaaatggatacacaggtcagttacaacataaaaaatgtaatggtggaaatttgtcagccttgaattcaggcagaacaggattcggtgcatgattttatgtgttttcgaaacggtgtctgtcacattgtgatcccctgatggctcccctctctgttgctgatcctctttgttctgtacagaagcaaattctcacctgtgtaacatcctgaagcacctggtaaaatgtgaggcaaagagaggccacttctcaaatgctgtggacggatgggctgcatcttttaaaggatatcaatatgtcttcctgttgcaattattttgactataagctcccagagagtgaaaatcaccaaccctgtgacagtggcccttaataagtgttcatgaataaatgaattgaacctgtcaagattgaagtttggatgtgatgcccactgtggtggccactcagtgctagtctgtcattctggagacccagaaagctcgttatcttctgtcccccttgtgtatcctgcctttgtgggcgaggcattcaaaaccctgaggtttttagatctccctctacaggaagtacccagagagctgctgggggtgttattaccctgtctctgccaggcttaaagtatcctcccaaattcagcacgcaaaggtcacacaccacccccatcttaagagtaggttttctcttttgtttcaaatcttgaagatttccagaaaataataatactagccaatgtttgtggagagcttactttgctcctagattcttcattatatgttttgacccatttaatttccacaacagtctgatgaggcaggcacccccattttcagatgaggagactgaggttcgggtagaaattaagtgactcaggtttgccttcagtctctgaccaagggtttgaaaagccaggagccagcctgagaactgtggctccagagggtgttctttcagccactccgctctatgcttctcactctgggtgggcacaaccatgttctcctttggtgatgcctctaacttaccgtgaaaatgtacctttcccttcgctattggcttcccttccctcctagtcagccgagattcttttgaaaactttcctccgcttgcctgcacaaaaggcgatggaaattcaggaactgaaacatctgctctggggaatgcgtatttccacatttccaccgcctgtgtctgctgtcttatcttgaagacaggtgctccagggcttccgaggttattttgtctgttaatggacaccttgcaaagtaccacttaaggaatgagaattacaaacttttaattatattgtagggggaaaaaagtaggctgttttcctgataggtctagccattcattcaataaaccatattgatatgaaatgtgcc

SEQ ID NO: 440494 - DNA, 3579 bp, Homo sapiens
agggtatagggaggcggctgaacaaggttgtgggggtaggaagctagggttagaggcaacccgtgaggctagaaccccgaacgtggtcggttggagaaaatatgtccctccggaggcacattgggaaccctgagtatctgatgaaaaggataccacagaacccaagataccagcatatcaaatcaagactggacactggtaacagtatgactaaatatactgagaagctcgaagagattaagaaaaattatagatacaaaaaagatgagcttttcaagagactaaaagttacaacttttgcccagctgatcatccaagttgcttccctctctgatcaaacactggaagtgacagctgaggagattcaaaggctggaagacaatgattctgcagcttcagaccctgatgctgaaaccactgccaggaccaatgggaaaggaaatccaggtgagcagtcgccgagccctgagcagttcataaacaacgcaggagcaggggactccagccgctcaactcttcagagtgtcatcagtggtgttggggaactggatctagacaaagggccagtgaagaaagcagagccccataccaaagacaaaccttatcctgactgccccttcctgctgctagatgtgcgtgatagagattcttaccagcagtgccacattgttggagcttacagttacccaattgcaactctgtctagaacaatgaacccttattcaaatgatattcttgaatataaaaatgcccatggcaagatcatcattctgtatgacgatgatgaaaggctggccagtcaggcggccaccaccatgtgcgagcgtggatttgaaaacctcttcatgctttccggaggtctaaaagtcttagctcagaaattcccggaaggactgattactggttccctgccagcatcttgccagcaggcccttcctcctgggtctgcccggaaacgatccagccccaaagggccacccctaccagctgagaataaatggagatttaccccagaagacttaaaaaagatagaatattatctggaagaggagcaagggcctgcagatcatcctagccgactgaaccaagctaactcctccggaagagagtccaaggtgcctggtgcccgaagcgctcagaatctgccaggtggcggccccgccagccactcaaacccccgctccctcagcagtggtcacctgcaaggcaaaccctggaagtaaagactttgtctcacttaggcaaataaatgttcttcctcttttcagaacccctgagcatttcccaagttgggtcatttccagaaacttctgcagaggaaagaccatgacatatgtatgggataggcctcttccctgtccctgtctccagttcctctcccctcaggaggccacctcaggaaggattttgacaggtgaccataaaaaccagaggtgtgacaggctctagtctcctccctgttgtttacagcatatttaagtcttgtgaaactgtataggaaaaaagtatctacgtttttagtttttttgttttgtttttttttaataaggtccagcttgttgggtctctctgtgttgttttgtaaatacttcagtcacatctgcccgtgtgcctgtccctgccaccttttcattcactgttcttgacttcatgaaggcttctccgggcagtcttggtgtgagaagctgtttccaagggtgcagatgagccttaggttccagccgcctgcagaccccaccccagcaggctcactcagcaaggagctctctgcccagcatattgcaggccctgttttgagtatggaagccagtgcctgtgtactcactgaaattgaagatgaggaaagtagctgtacactcactgaatgctcccccttactagatatttcctggagccagaaaggtatgcatgtgggtgtcttcacaccggggaggagggcctctcatgggaaagccctggccaccacaccggcctgtgccccttgaagcccaccaaagcggccctcacttgtggtcagtatatcagttatgacgcccattgcccagcttcagtccatccatgttagatggacagaaattatggccagttgaaaataccagctttggttggacaactgtggacacacaaggtgaagaggactccgaagtcctttgtcagggctgacaacctcgtaagcccttgcttagaaatacagtattagtctaattgagtaattagtgcaatttcctgcttacttttcattctcatgactgaactgtgattaggaagttgtgattatagattctggttttggccggaattttgaatcagcattaattgaattgctaaatgactgacattcattccatttaattgggggaacaaaaggcctcaggtaaggatgaggaactctgaaatcagatggaaaagagcggtgttaatttttatggtctgtgatcgtagctgtgataagggactgaggaataaattgtgctctttgtcatggcaaccagcttctgaaaagcccactgaaaattgcctgtcctgctggtaactgctacggggtaagatttgccttaacagtactattttctcgccaccaaaaaaaaaaaaaaaaaaaaaaaaaaatgcaccacagtatttctagcatgggggctgtgtttgtatgagaaataaacgtaataaatatctcatagagacatatggaaaaataactttcagattcagcccagttctgttttagagtgtgtttattcttctctacttgatttccaaagtgcaacattttccgatgctttagaaatcaaacaaaccagggacattgttcagatgtcaagccatgcccaattttccacaagattcaagaatcttgtataaaattcagccaacgtacacatagctttaatgaggagcctgtcatgtttccccataaatttattgcctgagaacttagttcagcctttgctaatgccaaaatgctctggctttgtattttctttacagcatagatagaaaaatgcacatttttccacactcagctttcccctagcatggacaagattttcagccatttttgccacatatacatttttaaggaaaaaagatttttctctgtaagaaagttctggttatgctgttttaaaggtgacttgtcaggagttgagacttccctgccggattctattttgaaagtaaatggtcttccctccttgttccgattctgcgttcccatcgtcagacaactttggagtattagaaaccactgtatatatgtggaaagccaggtcagccagacctgttagaattggtgtgcactcacctgagagatctggcaggttggatatatttatgtgtatttctccacagtgcttgctttgccctgttggtaaggattttaaataaccatgctcaaaagagctgttctaatctgcgttttgcatgttaagtgttaatatcaaacattctttacgtgctcgaggtattgcttttaacattctactttgccagtttcttcattagattaattgacatgtattatttaaatgaccagtgatgctttgtgcaattatgaatgttgaagattaaagtacatagttacta

SEQ ID NO: 440495 - DNA, 6275 bp, Homo sapiens
agggtatagggaggcggctgaacaaggttgtgggggtaggaagctagggttagaggcaacccgtgaggctagaaccccgaacgtggtcggttggagaaaatatgtccctccggaggcacattgggaaccctgagtatctgatgaaaaggataccacagaacccaagataccagcatatcaaatcaagactggacactggtaacagtatgactaaatatactgagaagctcgaagagattaagaaaaattatagatacaaaaaagatgagcttttcaagagactaaaagttacaacttttgcccagctgatcatccaagttgcttccctctctgatcaaacactggaagtgacagctgaggagattcaaaggctggaagacaatgattctgcagcttcagaccctgatgctgaaaccactgccaggaccaatgggaaaggaaatccagtgtcatcagtggtgttggggaactggatctagacaaagggccagtgaagaaagcagagccccataccaaagacaaaccttatcctgactgccccttcctgctgctagatgtgcgtgatagagattcttaccagcagtgccacattgttggagcttacagttacccaattgcaactctgtctagaacaatgaacccttattcaaatgatattcttgaatataaaaatgcccatggcaagatcatcattctgtatgacgatgatgaaaggctggccagtcaggcggccaccaccatgtgcgagcgtggatttgaaaacctcttcatgctttccggaggtctaaaagtcttagctcagaaattcccggaaggactgattactggttccctgccagcatcttgccagcaggcccttcctcctgggtctgcccggaaacgatccagccccaaagggccacccctaccagctgagaataaatggagatttaccccagaagacttaaaaaagatagaatattatctggaagaggagcaagggcctgcagatcatcctagccgactgaaccaagctaactcctccggaagagagtccaaggtgcctggtgcccgaagcgctcagaatctgccaggtggcggccccgccagccactcaaacccccgctccctcagcagtggtcacctgcaaggcaaaccctggaagtaaagactttgtctcacttaggcaaataaatgttcttcctcttttcagaacccctgagcatttcccaagttgggtcatttccagaaacttctgcagaggaaagaccatgacatatgtatgggataggcctcttccctgtccctgtctccagttcctctcccctcaggaggccacctcaggaaggattttgacaggtgaccataaaaaccagaggtgtgacaggctctagtctcctccctgttgtttacagcatatttaagtcttgtgaaactgtataggaaaaaagtatctacgtttttagtttttttgttttgtttttttttaataaggtccagcttgttgggtctctctgtgttgttttgtaaatacttcagtcacatctgcccgtgtgcctgtccctgccaccttttcattcactgttcttgacttcatgaaggcttctccgggcagtcttggtgtgagaagctgtttccaagggtgcagatgagccttaggttccagccgcctgcagaccccaccccagcaggctcactcagcaaggagctctctgcccagcatattgcaggccctgttttgagtatggaagccagtgcctgtgtactcactgaaattgaagatgaggaaagtagctgtacactcactgaatgctcccccttactagatatttcctggagccagaaaggtatgcatgtgggtgtcttcacaccggggaggagggcctctcatgggaaagccctggccaccacaccggcctgtgccccttgaagcccaccaaagcggccctcacttgtggtcagtatatcagttatgacgcccattgcccagcttcagtccatccatgttagatggacagaaattatggccagttgaaaataccagctttggttggacaactgtggacacacaaggtgaagaggactccgaagtcctttgtcagggctgacaacctcgtaagcccttgcttagaaatacagtattagtctaattgagtaattagtgcaatttcctgcttacttttcattctcatgactgaactgtgattaggaagttgtgattatagattctggttttggccggaattttgaatcagcattaattgaattgctaaatgactgacattcattccatttaattgggggaacaaaaggcctcaggtaaggatgaggaactctgaaatcagatggaaaagagcggtgttaatttttatggtctgtgatcgtagctgtgataagggactgaggaataaattgtgctctttgtcatggcaaccagcttctgaaaagcccactgaaaattgcctgtcctgctggtaactgctacggggtaagatttgccttaacagtactattttctcgccaccaaaaaaaaaaaaaaaaaaaaaaaaaaatgcaccacagtatttctagcatgggggctgtgtttgtatgagaaataaacgtaataaatatctcatagagacatatggaaaaataactttcagattcagcccagttctgttttagagtgtgtttattcttctctacttgatttccaaagtgcaacattttccgatgctttagaaatcaaacaaaccagggacattgttcagatgtcaagccatgcccaattttccacaagattcaagaatcttgtataaaattcagccaacgtacacatagctttaatgaggagcctgtcatgtttccccataaatttattgcctgagaacttagttcagcctttgctaatgccaaaatgctctggctttgtattttctttacagcatagatagaaaaatgcacatttttccacactcagctttcccctagcatggacaagattttcagccatttttgccacatatacatttttaaggaaaaaagatttttctctgtaagaaagttctggttatgctgttttaaaggtgacttgtcaggagttgagacttccctgccggattctattttgaaagtaaatggtcttccctccttgttccgattctgcgttcccatcgtcagacaactttggagtattagaaaccactgtatatatgtggaaagccaggtcagccagacctgttagaattggtgtgcactcacctgagagatctggcaggttggatatatttatgtgtatttctccacagtgcttgctttgccctgttggtaaggattttaaataaccatgctcaaaagagctgttctaatctgcgttttgcatgttaagtgttaatatcaaacattctttacgtgctcgaggtattgcttttaacattctactttgccagtttcttcattagattaattgacatgtattatttaaatgaccagtgatgctttgtgcaattatgaatgttgaagattaaagtacatagttactaatttgtcgtttgctattaatatgctgaaaactgccaacttctctcttcttttctgtcgagatgatttgggggagccacaggagactggtgtgatttttgctgcatctcctaggaaagcattttttaaaaaaaataaatgaatcaggaaatcagtccaattagggcagggggcctcagctctccagtcagaaagcctggatttcttttcctgctcaggctgggactgaagccaccttcaacaactggatcatggcttcctaccagcgtctcaggggttgactagctgcccttgtctggggcttgtgaaccctgagacagaaggtgcttcatcgatgtacaactacagcaccctgaacagcagtgatggccaaagtttaaataataccttaaatgctttaaaggggtttgtgtttaaggaagggagaaaagaaaaaaagaaaggaagggagaaagaagcaaggaaatgggaagaagggagggcagagagaagaaaagaagcagaaagcgagagagaaaggagaaagctacattacttatttgaaaacaaaaggaacaccctgggctgtaataatgtcaggctcaatctcttgaaaaagtatggaatgatttaaatggcctgcattcattttatcttttatctttttttttttttttaacctttagtggttagccaggaccagcacgatcatattgggcttggtataaatccgaatgaaaagagaccaaataacattcattagttgctcagggatttttcctgtggtgctatttaaattatacaaaaattcttaagactttaggctactcgaccaagaaaacagaacaaaacaaaaaatcgtgttttctctaattcccttgtggaatgtaagtgaaatcagagtcctaggctaggaagaaatacgtaggtaatttttcttgtgttggttttggtttctgtcatgttgtttattggctatagattctgtcttttatgttatctgacttttttagagcgaataattagtttctgtccacctggatttaaatccatgaccaccttcttgctctactctgaagataatcagtaagaacctttctttctccagttctaaaacgttctcagtgtctttaatgtgtgtttattttcttcccaattctttcaaagatttaactcccacgatacttttttttccccaggaaacaccgcaaatgtgtggaatataattcaccagtttaattatgtgagcatgttgagtacttacatgcaggtccattaatttttcactaacaattattttttcatgcaaaagcaataaataacattgtgcttccaaaatgttcagaatacatttgggtagtaatactttcctagatttacaataattattgaaattattattatgacatctttaaatggatacacaggtcagttacaacataaaaaatgtaatggtggaaatttgtcagccttgaattcaggcagaacaggattcggtgcatgattttatgtgttttcgaaacggtgtctgtcacattgtgatcccctgatggctcccctctctgttgctgatcctctttgttctgtacagaagcaaattctcacctgtgtaacatcctgaagcacctggtaaaatgtgaggcaaagagaggccacttctcaaatgctgtggacggatgggctgcatcttttaaaggatatcaatatgtcttcctgttgcaattattttgactataagctcccagagagtgaaaatcaccaaccctgtgacagtggcccttaataagtgttcatgaataaatgaattgaacctgtcaagattgaagtttggatgtgatgcccactgtggtggccactcagtgctagtctgtcattctggagacccagaaagctcgttatcttctgtcccccttgtgtatcctgcctttgtgggcgaggcattcaaaaccctgaggtttttagatctccctctacaggaagtacccagagagctgctgggggtgttattaccctgtctctgccaggcttaaagtatcctcccaaattcagcacgcaaaggtcacacaccacccccatcttaagagtaggttttctcttttgtttcaaatcttgaagatttccagaaaataataatactagccaatgtttgtggagagcttactttgctcctagattcttcattatatgttttgacccatttaatttccacaacagtctgatgaggcaggcacccccattttcagatgaggagactgaggttcgggtagaaattaagtgactcaggtttgccttcagtctctgaccaagggtttgaaaagccaggagccagcctgagaactgtggctccagagggtgttctttcagccactccgctctatgcttctcactctgggtgggcacaaccatgttctcctttggtgatgcctctaacttaccgtgaaaatgtacctttcccttcgctattggcttcccttccctcctagtcagccgagattcttttgaaaactttcctccgcttgcctgcacaaaaggcgatggaaattcaggaactgaaacatctgctctggggaatgcgtatttccacatttccaccgcctgtgtctgctgtcttatcttgaagacaggtgctccagggcttccgaggttattttgtctgttaatggacaccttgcaaagtaccacttaaggaatgagaattacaaacttttaattatattgtagggggaaaaaagtaggctgttttcctgataggtctagccattcattcaataaaccatattgatatgaaatgtgcc

SEQ ID NO: 440496 - DNA, 1269 bp, Homo sapiens
agggtatagggaggcggctgaacaaggttgtgggggtaggaagctagggttagaggcaacccgtgaggctagaaccccgaacgtggtcggttggagaaaatatgtccctccggaggcacattgggaaccctgagtatctgatgaaaaggataccacagaacccaagataccagcatatcaaatcaagactggacactggtaacagtatgactaaatatactgagaagctcgaagagattaagaaaaattatagatacaaaaaagatgagcttttcaagagactaaaagttacaacttttgcccagctgatcatccaagttgcttccctctctgatcaaacactggaagtgacagctgaggagattcaaaggctggaagacaatgattctgcagcttcagaccctgatgctgaaaccactgccaggaccaatgggaaaggaaatccaggtgagcagtcgccgagccctgagcagttcataaacaacgcaggagcaggggactccagccgctcaactcttcagagtgtcatcagtggtgttggggaactggatctagacaaagggccagtgaagaaagcagagccccataccaaagacaaaccttatcctgactgccccttcctgctgctagatgtgcgtgatagagattcttaccagcagtgccacattgttggagcttacagttacccaattgcaactctgtctagaacaatgaacccttattcaaatgatattcttgaatataaaaatgcccatggcaagatcatcattctgtatgacgatgatgaaaggctggccagtcaggcggccaccaccatgtgcgagcgtggatttgaaaacctcttcatgctttccggaggtctaaaagtcttagctcagaaattcccggaaggactgattactggttccctgccagcatcttgccagcaggcccttcctcctgggtctgcccggaaacgatccagccccaaagggccacccctaccagctgagaataaatggagatttaccccagaagacttaaaaaagatagaatattatctggaagaggagcaagggcctgcagatcatcctagccgactgaaccaagctaactcctccggaagagagtccaaggtgcctggtgcccgaagcgctcagaatctgccaggtggcggccccgccagccactcaaacccccgctccctcagcagtggtcacctgcaaggcaaaccctggaagtaaagactttgtctcacttaggcaaataaatgttcttcctcttttcaga

SEQ ID NO: 440497 - DNA, 394 bp, Homo sapiens
tagagatgaggcctcaccatgttgcccgggctggtctcaaactcctggactcaagcggtccacccaccttggcctcccaaagtgctgggattataggtgttagccaccatgcccagcagctcatggattttgaagatgtatttaactcttagattttaaaccagctgggaattgaggccaagttgtattaagagaacaacagacttcctaaactttttcttctctttgcagcttacagttacccaattgcaactctgtctagaacaatgaacccttattcaaatgatattcttgaatatgtatcctttgttgcattttaaggaattgggtggtatgaggattgtaagaatcaaagttatcatgaaccacgctcctggtaagaatgctgtgaagg

SEQ ID NO: 440498 - DNA, 6219 bp, Homo sapiens
agggtatagggaggcggctgaacaaggttgtgggggtaggaagctagggttagaggcaacccgtgaggctagaaccccgaacgtggtcggttggagaaaatatgtccctccggaggcacattgggaaccctgagtatctgatgaaaaggataccacagaacccaagataccagcatatcaaatcaagactggacactggtaacagtatgactaaatatactgagaagctcgaagagattaagaaaaacaatgattctgcagcttcagaccctgatgctgaaaccactgccaggaccaatgggaaaggaaatccaggtgagcagtcgccgagccctgagcagttcataaacaacgcaggagcaggggactccagccgctcaactcttcagagtgtcatcagtggtgttggggaactggatctagacaaagggccagtgaagaaagcagagccccataccaaagacaaaccttatcctgactgccccttcctgctgctagatgtgcgtgatagagattcttaccagcagtgccacattgttggagcttacagttacccaattgcaactctgtctagaacaatgaacccttattcaaatgatattcttgaatataaaaatgcccatggcaagatcatcattctgtatgacgatgatgaaaggctggccagtcaggcggccaccaccatgtgcgagcgtggatttgaaaacctcttcatgctttccggaggtctaaaagtcttagctcagaaattcccggaaggactgattactggttccctgccagcatcttgccagcaggcccttcctcctgggtctgcccggaaacgatccagccccaaagggccacccctaccagctgagaataaatggagatttaccccagaagacttaaaaaagatagaatattatctggaagaggagcaagggcctgcagatcatcctagccgactgaaccaagctaactcctccggaagagagtccaaggtgcctggtgcccgaagcgctcagaatctgccaggtggcggccccgccagccactcaaacccccgctccctcagcagtggtcacctgcaaggcaaaccctggaagtaaagactttgtctcacttaggcaaataaatgttcttcctcttttcagaacccctgagcatttcccaagttgggtcatttccagaaacttctgcagaggaaagaccatgacatatgtatgggataggcctcttccctgtccctgtctccagttcctctcccctcaggaggccacctcaggaaggattttgacaggtgaccataaaaaccagaggtgtgacaggctctagtctcctccctgttgtttacagcatatttaagtcttgtgaaactgtataggaaaaaagtatctacgtttttagtttttttgttttgtttttttttaataaggtccagcttgttgggtctctctgtgttgttttgtaaatacttcagtcacatctgcccgtgtgcctgtccctgccaccttttcattcactgttcttgacttcatgaaggcttctccgggcagtcttggtgtgagaagctgtttccaagggtgcagatgagccttaggttccagccgcctgcagaccccaccccagcaggctcactcagcaaggagctctctgcccagcatattgcaggccctgttttgagtatggaagccagtgcctgtgtactcactgaaattgaagatgaggaaagtagctgtacactcactgaatgctcccccttactagatatttcctggagccagaaaggtatgcatgtgggtgtcttcacaccggggaggagggcctctcatgggaaagccctggccaccacaccggcctgtgccccttgaagcccaccaaagcggccctcacttgtggtcagtatatcagttatgacgcccattgcccagcttcagtccatccatgttagatggacagaaattatggccagttgaaaataccagctttggttggacaactgtggacacacaaggtgaagaggactccgaagtcctttgtcagggctgacaacctcgtaagcccttgcttagaaatacagtattagtctaattgagtaattagtgcaatttcctgcttacttttcattctcatgactgaactgtgattaggaagttgtgattatagattctggttttggccggaattttgaatcagcattaattgaattgctaaatgactgacattcattccatttaattgggggaacaaaaggcctcaggtaaggatgaggaactctgaaatcagatggaaaagagcggtgttaatttttatggtctgtgatcgtagctgtgataagggactgaggaataaattgtgctctttgtcatggcaaccagcttctgaaaagcccactgaaaattgcctgtcctgctggtaactgctacggggtaagatttgccttaacagtactattttctcgccaccaaaaaaaaaaaaaaaaaaaaaaaaaaatgcaccacagtatttctagcatgggggctgtgtttgtatgagaaataaacgtaataaatatctcatagagacatatggaaaaataactttcagattcagcccagttctgttttagagtgtgtttattcttctctacttgatttccaaagtgcaacattttccgatgctttagaaatcaaacaaaccagggacattgttcagatgtcaagccatgcccaattttccacaagattcaagaatcttgtataaaattcagccaacgtacacatagctttaatgaggagcctgtcatgtttccccataaatttattgcctgagaacttagttcagcctttgctaatgccaaaatgctctggctttgtattttctttacagcatagatagaaaaatgcacatttttccacactcagctttcccctagcatggacaagattttcagccatttttgccacatatacatttttaaggaaaaaagatttttctctgtaagaaagttctggttatgctgttttaaaggtgacttgtcaggagttgagacttccctgccggattctattttgaaagtaaatggtcttccctccttgttccgattctgcgttcccatcgtcagacaactttggagtattagaaaccactgtatatatgtggaaagccaggtcagccagacctgttagaattggtgtgcactcacctgagagatctggcaggttggatatatttatgtgtatttctccacagtgcttgctttgccctgttggtaaggattttaaataaccatgctcaaaagagctgttctaatctgcgttttgcatgttaagtgttaatatcaaacattctttacgtgctcgaggtattgcttttaacattctactttgccagtttcttcattagattaattgacatgtattatttaaatgaccagtgatgctttgtgcaattatgaatgttgaagattaaagtacatagttactaatttgtcgtttgctattaatatgctgaaaactgccaacttctctcttcttttctgtcgagatgatttgggggagccacaggagactggtgtgatttttgctgcatctcctaggaaagcattttttaaaaaaaataaatgaatcaggaaatcagtccaattagggcagggggcctcagctctccagtcagaaagcctggatttcttttcctgctcaggctgggactgaagccaccttcaacaactggatcatggcttcctaccagcgtctcaggggttgactagctgcccttgtctggggcttgtgaaccctgagacagaaggtgcttcatcgatgtacaactacagcaccctgaacagcagtgatggccaaagtttaaataataccttaaatgctttaaaggggtttgtgtttaaggaagggagaaaagaaaaaaagaaaggaagggagaaagaagcaaggaaatgggaagaagggagggcagagagaagaaaagaagcagaaagcgagagagaaaggagaaagctacattacttatttgaaaacaaaaggaacaccctgggctgtaataatgtcaggctcaatctcttgaaaaagtatggaatgatttaaatggcctgcattcattttatcttttatctttttttttttttttaacctttagtggttagccaggaccagcacgatcatattgggcttggtataaatccgaatgaaaagagaccaaataacattcattagttgctcagggatttttcctgtggtgctatttaaattatacaaaaattcttaagactttaggctactcgaccaagaaaacagaacaaaacaaaaaatcgtgttttctctaattcccttgtggaatgtaagtgaaatcagagtcctaggctaggaagaaatacgtaggtaatttttcttgtgttggttttggtttctgtcatgttgtttattggctatagattctgtcttttatgttatctgacttttttagagcgaataattagtttctgtccacctggatttaaatccatgaccaccttcttgctctactctgaagataatcagtaagaacctttctttctccagttctaaaacgttctcagtgtctttaatgtgtgtttattttcttcccaattctttcaaagatttaactcccacgatacttttttttccccaggaaacaccgcaaatgtgtggaatataattcaccagtttaattatgtgagcatgttgagtacttacatgcaggtccattaatttttcactaacaattattttttcatgcaaaagcaataaataacattgtgcttccaaaatgttcagaatacatttgggtagtaatactttcctagatttacaataattattgaaattattattatgacatctttaaatggatacacaggtcagttacaacataaaaaatgtaatggtggaaatttgtcagccttgaattcaggcagaacaggattcggtgcatgattttatgtgttttcgaaacggtgtctgtcacattgtgatcccctgatggctcccctctctgttgctgatcctctttgttctgtacagaagcaaattctcacctgtgtaacatcctgaagcacctggtaaaatgtgaggcaaagagaggccacttctcaaatgctgtggacggatgggctgcatcttttaaaggatatcaatatgtcttcctgttgcaattattttgactataagctcccagagagtgaaaatcaccaaccctgtgacagtggcccttaataagtgttcatgaataaatgaattgaacctgtcaagattgaagtttggatgtgatgcccactgtggtggccactcagtgctagtctgtcattctggagacccagaaagctcgttatcttctgtcccccttgtgtatcctgcctttgtgggcgaggcattcaaaaccctgaggtttttagatctccctctacaggaagtacccagagagctgctgggggtgttattaccctgtctctgccaggcttaaagtatcctcccaaattcagcacgcaaaggtcacacaccacccccatcttaagagtaggttttctcttttgtttcaaatcttgaagatttccagaaaataataatactagccaatgtttgtggagagcttactttgctcctagattcttcattatatgttttgacccatttaatttccacaacagtctgatgaggcaggcacccccattttcagatgaggagactgaggttcgggtagaaattaagtgactcaggtttgccttcagtctctgaccaagggtttgaaaagccaggagccagcctgagaactgtggctccagagggtgttctttcagccactccgctctatgcttctcactctgggtgggcacaaccatgttctcctttggtgatgcctctaacttaccgtgaaaatgtacctttcccttcgctattggcttcccttccctcctagtcagccgagattcttttgaaaactttcctccgcttgcctgcacaaaaggcgatggaaattcaggaactgaaacatctgctctggggaatgcgtatttccacatttccaccgcctgtgtctgctgtcttatcttgaagacaggtgctccagggcttccgaggttattttgtctgttaatggacaccttgcaaagtaccacttaaggaatgagaattacaaacttttaattatattgtagggggaaaaaagtaggctgttttcctgataggtctagccattcattcaataaaccatattgatatgaaatgtgcc

SEQ ID NO: 440499 - DNA, 6135 bp, Homo sapiens
agggtatagggaggcggctgaacaaggttgtgggggtaggaagctagggttagaggcaacccgtgaggctagaaccccgaacgtggtcggttggagaaaatatgtccctccggaggcacattgggaaccctgagtatctgatgaaaaggataccacagaacccaagataccagcatatcaaatcaagactggacactggtaacagtatgactaaatatactgagaagctcgaagagattaagaaaaattatagatacaaaaaagatgagcttttcaagagactaaaagttacaacttttgcccagctgatcatccaagttgcttccctctctgatcaaacactggaagtgacagctgaggagattcaaaggctggaagacaatgattctgcagcttcagaccctgatgctgaaaccactgccaggaccaatgggaaaggaaatccaggtgagcagtcgccgagccctgagcagttcataaacaacgcaggagcaggggactccagccgctcaactcttcagagtgtcatcagtggtgttggggaactggatctagacaaagggccagtgaagaaagcagagccccataccaaagacaaaccttatcctgactgccccttcctgctgctagatgtgcgtgatagagattcttaccagcagtgccacattgttggagcttacagttacccaattgcaactctgtctagaacaatgaacccttattcaaatgatattcttgaatataaaaatgcccatggcaagatcatcattctgtatgacgatgatgaaaggctggccagtcaggcggccaccaccatgtgcgagcgtggatttgaaaacctcttcatgctttccggaggccgactgaaccaagctaactcctccggaagagagtccaaggtgcctggtgcccgaagcgctcagaatctgccaggtggcggccccgccagccactcaaacccccgctccctcagcagtggtcacctgcaaggcaaaccctggaagtaaagactttgtctcacttaggcaaataaatgttcttcctcttttcagaacccctgagcatttcccaagttgggtcatttccagaaacttctgcagaggaaagaccatgacatatgtatgggataggcctcttccctgtccctgtctccagttcctctcccctcaggaggccacctcaggaaggattttgacaggtgaccataaaaaccagaggtgtgacaggctctagtctcctccctgttgtttacagcatatttaagtcttgtgaaactgtataggaaaaaagtatctacgtttttagtttttttgttttgtttttttttaataaggtccagcttgttgggtctctctgtgttgttttgtaaatacttcagtcacatctgcccgtgtgcctgtccctgccaccttttcattcactgttcttgacttcatgaaggcttctccgggcagtcttggtgtgagaagctgtttccaagggtgcagatgagccttaggttccagccgcctgcagaccccaccccagcaggctcactcagcaaggagctctctgcccagcatattgcaggccctgttttgagtatggaagccagtgcctgtgtactcactgaaattgaagatgaggaaagtagctgtacactcactgaatgctcccccttactagatatttcctggagccagaaaggtatgcatgtgggtgtcttcacaccggggaggagggcctctcatgggaaagccctggccaccacaccggcctgtgccccttgaagcccaccaaagcggccctcacttgtggtcagtatatcagttatgacgcccattgcccagcttcagtccatccatgttagatggacagaaattatggccagttgaaaataccagctttggttggacaactgtggacacacaaggtgaagaggactccgaagtcctttgtcagggctgacaacctcgtaagcccttgcttagaaatacagtattagtctaattgagtaattagtgcaatttcctgcttacttttcattctcatgactgaactgtgattaggaagttgtgattatagattctggttttggccggaattttgaatcagcattaattgaattgctaaatgactgacattcattccatttaattgggggaacaaaaggcctcaggtaaggatgaggaactctgaaatcagatggaaaagagcggtgttaatttttatggtctgtgatcgtagctgtgataagggactgaggaataaattgtgctctttgtcatggcaaccagcttctgaaaagcccactgaaaattgcctgtcctgctggtaactgctacggggtaagatttgccttaacagtactattttctcgccaccaaaaaaaaaaaaaaaaaaaaaaaaaaatgcaccacagtatttctagcatgggggctgtgtttgtatgagaaataaacgtaataaatatctcatagagacatatggaaaaataactttcagattcagcccagttctgttttagagtgtgtttattcttctctacttgatttccaaagtgcaacattttccgatgctttagaaatcaaacaaaccagggacattgttcagatgtcaagccatgcccaattttccacaagattcaagaatcttgtataaaattcagccaacgtacacatagctttaatgaggagcctgtcatgtttccccataaatttattgcctgagaacttagttcagcctttgctaatgccaaaatgctctggctttgtattttctttacagcatagatagaaaaatgcacatttttccacactcagctttcccctagcatggacaagattttcagccatttttgccacatatacatttttaaggaaaaaagatttttctctgtaagaaagttctggttatgctgttttaaaggtgacttgtcaggagttgagacttccctgccggattctattttgaaagtaaatggtcttccctccttgttccgattctgcgttcccatcgtcagacaactttggagtattagaaaccactgtatatatgtggaaagccaggtcagccagacctgttagaattggtgtgcactcacctgagagatctggcaggttggatatatttatgtgtatttctccacagtgcttgctttgccctgttggtaaggattttaaataaccatgctcaaaagagctgttctaatctgcgttttgcatgttaagtgttaatatcaaacattctttacgtgctcgaggtattgcttttaacattctactttgccagtttcttcattagattaattgacatgtattatttaaatgaccagtgatgctttgtgcaattatgaatgttgaagattaaagtacatagttactaatttgtcgtttgctattaatatgctgaaaactgccaacttctctcttcttttctgtcgagatgatttgggggagccacaggagactggtgtgatttttgctgcatctcctaggaaagcattttttaaaaaaaataaatgaatcaggaaatcagtccaattagggcagggggcctcagctctccagtcagaaagcctggatttcttttcctgctcaggctgggactgaagccaccttcaacaactggatcatggcttcctaccagcgtctcaggggttgactagctgcccttgtctggggcttgtgaaccctgagacagaaggtgcttcatcgatgtacaactacagcaccctgaacagcagtgatggccaaagtttaaataataccttaaatgctttaaaggggtttgtgtttaaggaagggagaaaagaaaaaaagaaaggaagggagaaagaagcaaggaaatgggaagaagggagggcagagagaagaaaagaagcagaaagcgagagagaaaggagaaagctacattacttatttgaaaacaaaaggaacaccctgggctgtaataatgtcaggctcaatctcttgaaaaagtatggaatgatttaaatggcctgcattcattttatcttttatctttttttttttttttaacctttagtggttagccaggaccagcacgatcatattgggcttggtataaatccgaatgaaaagagaccaaataacattcattagttgctcagggatttttcctgtggtgctatttaaattatacaaaaattcttaagactttaggctactcgaccaagaaaacagaacaaaacaaaaaatcgtgttttctctaattcccttgtggaatgtaagtgaaatcagagtcctaggctaggaagaaatacgtaggtaatttttcttgtgttggttttggtttctgtcatgttgtttattggctatagattctgtcttttatgttatctgacttttttagagcgaataattagtttctgtccacctggatttaaatccatgaccaccttcttgctctactctgaagataatcagtaagaacctttctttctccagttctaaaacgttctcagtgtctttaatgtgtgtttattttcttcccaattctttcaaagatttaactcccacgatacttttttttccccaggaaacaccgcaaatgtgtggaatataattcaccagtttaattatgtgagcatgttgagtacttacatgcaggtccattaatttttcactaacaattattttttcatgcaaaagcaataaataacattgtgcttccaaaatgttcagaatacatttgggtagtaatactttcctagatttacaataattattgaaattattattatgacatctttaaatggatacacaggtcagttacaacataaaaaatgtaatggtggaaatttgtcagccttgaattcaggcagaacaggattcggtgcatgattttatgtgttttcgaaacggtgtctgtcacattgtgatcccctgatggctcccctctctgttgctgatcctctttgttctgtacagaagcaaattctcacctgtgtaacatcctgaagcacctggtaaaatgtgaggcaaagagaggccacttctcaaatgctgtggacggatgggctgcatcttttaaaggatatcaatatgtcttcctgttgcaattattttgactataagctcccagagagtgaaaatcaccaaccctgtgacagtggcccttaataagtgttcatgaataaatgaattgaacctgtcaagattgaagtttggatgtgatgcccactgtggtggccactcagtgctagtctgtcattctggagacccagaaagctcgttatcttctgtcccccttgtgtatcctgcctttgtgggcgaggcattcaaaaccctgaggtttttagatctccctctacaggaagtacccagagagctgctgggggtgttattaccctgtctctgccaggcttaaagtatcctcccaaattcagcacgcaaaggtcacacaccacccccatcttaagagtaggttttctcttttgtttcaaatcttgaagatttccagaaaataataatactagccaatgtttgtggagagcttactttgctcctagattcttcattatatgttttgacccatttaatttccacaacagtctgatgaggcaggcacccccattttcagatgaggagactgaggttcgggtagaaattaagtgactcaggtttgccttcagtctctgaccaagggtttgaaaagccaggagccagcctgagaactgtggctccagagggtgttctttcagccactccgctctatgcttctcactctgggtgggcacaaccatgttctcctttggtgatgcctctaacttaccgtgaaaatgtacctttcccttcgctattggcttcccttccctcctagtcagccgagattcttttgaaaactttcctccgcttgcctgcacaaaaggcgatggaaattcaggaactgaaacatctgctctggggaatgcgtatttccacatttccaccgcctgtgtctgctgtcttatcttgaagacaggtgctccagggcttccgaggttattttgtctgttaatggacaccttgcaaagtaccacttaaggaatgagaattacaaacttttaattatattgtagggggaaaaaagtaggctgttttcctgataggtctagccattcattcaataaaccatattgatatgaaatgtgcc

SEQ ID NO: 440500 - DNA, 8149 bp, Homo sapiens
agagatgggtctcgccatcaccatgttgcccagtctggtctccaactcctgggctcaagcgatcctcctgccttggtctcccaaagtgctgggattacaggtgtgagcccccacacccggcctgagtgagtgggttctgaatggtgactgttgttgtccatagccttccccctgcttctgagagtggagtccctcccctcatgttggagacctcccaaggtccatgtggtcctataggggctgttcagcctccctagccccttaacgtgtcaggtaatactgtatatattccatgaaatgtgaataattagttatataattcctaagcacttattttaaaaaacagcaatgtgatgcttaactcttcccacctctgttcctgtcccccttagaaaaccactgataactctttttttttttgagacggagtcttgccctgtcgcccaggctggagtgtagtggcctgatctcggctcggctcattgtaacctccgcctcgggtttgagcgattctcctgcctcagcctcctgagtagctgggattataggcgtgcaccaccacgcctggctaattttttgtatctttagtagggacgggtttcaccatgttggccagagtggtcttgaactcctgaccttgtgatccgctcgcctcagcctcccaaagtgctgggattacaggcatgagccaccgtgcctgtcctagaaccactggtaactcttaactgtgttctaagaacggaagcatctgggctggatggaatttagcatcaagcagagtcccctttctgttcagagtgttgtaaagtgcataaagatgaagcaggcaccagaaatcctcggcagtgccaacgggaagactccgagctgcgaggtgaaccgcgagtgttctgtgttcctcagcaaagcccagctctccagtagcctgcaggagggggtcatgcagaagtttaacggccacgacgccctgccctttattccagccgacaagctgaaagatcttacttcccgggtgtttaatggagaacccggcgcacacgatgccaaactgcgttttgagtcccaggaaatgaaagggattgggacaccccctaacactacccctatcaaaaatggctctccagaaattaagctgaaaatcaccaaaacatacatgaatgggaagcctctctttgaatcttccatttgtggtgacagtgctgctgatgtgtctcagtcagaagaaaatggacaaaaaccagaaaacaaggcgagaaggaacaggaagaggagcataaaatatgactccttgctggagcagggccttgtcgaagcagctcttgtgtctaagatctcaagtccttcagataaaaagattccagctaagaaagagtcttgtccaaacactggaagagacaaagaccacctgttgaaatacaacgttggtgatttggtgtggtccaaagtgtcgggttacccttggtggccttgcatggtttctgcagatccactccttcacagctataccaaacttaaaggtcagaaaaagagtgcacgccagtatcacgtacagttctttggtgacgccccagaaagagcttggatatttgagaagagcctcgtagcttttgaaggagaaggacagtttgaaaaattatgccaggaaagtgccaagcaggcacccacgaaagctgagaaaattaagctattgaaaccaatttcagggaaattgagggcccagtgggaaatgggcattgttcaagcagaagaagctgcaagcatgtcagtggaggagcggaaagccaagttcacctttctctatgtgggggaccagcttcatctcaaccctcaagtagccaaggaggctggcattgctgcagagtctttgggagaaatggcagaatcctcaggagtcagtgaagaagctgctgaaaaccccaagtctgtgagagaagagtgcattcccatgaagagaaggcggagggccaaactgtgtagctctgcagagaccctggagagtcaccccgacatagggaagagtactcctcaaaagacggcagaggctgaccccagaagaggagtagggtctcctcctgggaggaagaagaccacagtctccatgccacgaagcaggaagggagatgcagcatcccagtttttggtcttctgtcaaaaacacagggatgaggtggtagctgagcacccagatgcttcaggtgaggagattgaagagctgctcaggtcacagtggagtctgctgagtgagaagcagagagcacgctacaacaccaagtttgccctggtggcccctgtccaggctgaagaagactctggtaatgtaaatgggaaaaaaagaaaccacacaaagaggatacaggaccctacagaagatgctgaagctgaggacacacccaggaaaagactcaggacggacaagcacagtcttcggaagagagacacaatcactgacaaaacggccagaacaagctcttacaaggccatggaggcagcctcctcgctcaagagccaggcagcaacgaaaaatctgtctgatgcatgtaaaccactgaagaagcgaaatcgggcttccacggcagcatcttcagctcttgggtttagcaaaagttcatctccttctgcatccttaactgagaatgaggtctcggacagcccgggagacgagccctcggagtccccatacgaaagtgcagacgaaacacaaactgaagtatctgtctcatccaaaaagtctgagcgaggagtgactgccaaaaaggagtatgtgtgccagctgtgtgagaagccgggcagcctcctgctctgtgaaggaccctgctgcggagctttccacctcgcctgccttgggctttcccggaggccagaagggaggttcacctgcagcgagtgtgcctcagggattcactcatgtttcgtgtgtaaagagagcaagacagatgttaagcgctgtgtggtaactcagtgtggaaaattttaccatgaggcttgtgtgaaaaaataccctctgactgtatttgagagccgaggtttccgctgccccctccacagctgtgtgagctgccatgcttccaacccttcaaacccaaggccgtcaaaaggtaaaatgatgcggtgtgtccgctgccccgttgcctatcacagcggggatgcttgtctggcagcaggatgctcagtgatcgcctccaacagcatcatctgcactgcccacttcactgctcggaaggggaagcgacaccacgcccacgtcaacgtgagctggtgcttcgtgtgctccaaaggggggagccttctgtgctgtgagtcctgcccagcggccttccaccctgactgcctgaacatcgagatgcctgacggcagctggttctgcaatgactgcagggctgggaagaagctgcacttccaggatatcatttgggtgaaacttgggaactacagatggtggccggcagaagtttgccatcccaaaaatgttcccccaaatattcagaaaatgaagcacgagattggagaattccctgtgtttttctttgggtctaaagattattactggacgcatcaggcgcgagtgttcccgtacatggagggggaccggggcagccgctaccagggggtcagagggatcggaagagtcttcaaaaacgcactgcaagaagctgaagctcgttttcgtgaaattaagcttcagagggaagcccgagaaacacaggagagcgagcgcaagcccccaccatacaagcacatcaaggtgaataagccttacgggaaagtccagatctacacagcggatatttcagaaatccctaagtgcaactgcaagcccacagatgagaatccttgtggctttgattcggagtgtctgaacaggatgctgatgtttgagtgccacccgcaggtgtgtcccgcgggcgagttctgccagaaccagtgcttcaccaagcgccagtacccagagaccaagatcatcaagacagatggcaaagggtggggcctggtcgccaagagggacatcagaaagggagaatttgttaacgagtacgttggggagctgatcgacgaggaggagtgcatggcgagaatcaagcacgcacacgagaacgacatcacccacttctacatgctcactatagacaaggaccgtataatagacgctggccccaaaggaaactactctcgatttatgaatcacagctgccagcccaactgtgagaccctcaagtggacagtgaatggggacactcgtgtgggcctgtttgccgtctgtgacattcctgcagggacggagctgacttttaactacaacctcgattgtctgggcaatgaaaaaacggtctgccggtgtggagcctccaattgcagtggattcctcggggatagaccaaagacctcgacgaccctttcatcagaggaaaagggcaaaaagaccaagaagaaaacgaggcggcgcagagcaaaaggggaagggaagaggcagtcagaggacgagtgcttccgctgcggtgatggcgggcagctggtgctgtgtgaccgcaagttctgcaccaaggcctaccacctgtcctgcctgggccttggcaagcggcccttcgggaagtgggaatgtccttggcatcattgtgacgtgtgtggcaaaccttcgacttcattttgccacctctgccccaattcgttctgtaaggagcaccaggacgggacagccttcagctgcaccccggacgggcggtcctactgctgtgagcatgacttaggggcggcatcggtcagaagcaccaagactgagaagccccccccagagccagggaagccgaaggggaagaggcggcggcggaggggctggcggagagtcacagagggcaaatagcgccaggcggccgcttggccggatccaggggcggtgcagggcggccggccctgcctgcgggagagggcgagcatgaactggcccggaggacccagctcgagccgccaggacacagacgtacaggcctcctcgggagggagcgcctccccaccactgagccatcctcagcagcgtccgctgcgtctgcactgatgaccgtctgagcccagctcagcgttcctggacaaacagcctcactcctcagcgttaccgccacacttgaatttctccgaatgtcaaggttccctcccactctatttttttaggttaaagttaattggcatatggaatgttttaatctcctctgaaatgtgtagcgtaggcttttcccaagggtcgctagaaactcgtcttcgcgttgccccctttctggctctcagcgccgtcgccactcgggagaggctgggtgaggcccgtgtgaggactgaccctggattcctcgaaactgccattgtgatcattactctgctctttggaaatggctgtatcatttttttgtactaatgtgaattgttcctcagaaacgcttcttttccatcctagtgagaagctggccctgcaggtggtggcagcaatggtgttgtaagatttcctcccgtagttttttctcctcatggatttgaatgaaatgccaataacacgtccactttcaacgtgtagtttacgcggagcactttcgaggcctggccgggttgggcctacttctcacctgggcctatcttctgaactcgctaggttcttatcaacatttgggggataactttgtatatttttttcatttggcttttctttaccagtttctgatttttattctcaatatatttttgctaaacctatttcacaaatcaccaccgactgaagtgtgtgtttactgatgcggccctgagctccatggcgaaaggagtgactttgcagggcgtgagaccgcagtctgcttagagcacaggaagtgacaacttagggagccccgtagggcgctgcaggccccggggaccccagcacgtgggtctaaagagagacggagtctagctctcctgccacccagagtggcttccatctcagcactctgtgggtctggtgatggaagatgcagtctctgctgatcacatgtgccctctgccagggcacctactgagaggtgcggtcctgggggtggaggcctgcctggcaggtgtgcgtgcctcgtacgtgtgttatgggcactggtctaggccaggtatgacacccactctcctgtgagatttcactttagtttttaaaaggtccagttctacagagtgagacctatctatctgagtactacatatgttttaagacttggttctttttttgagggatccttgaccctgggaagtctggagcaccctgagaagggggcaccatgtgtgcctttgcccacgtgtcctgaggggctgcttgtctgggagggagggagagaacattcagcagcaggtgcttttttatggccttttcttaaaataacctaagggggacacatccatcttgcagagaagtttacagaactccccttgaaaactgctgctgaggctcctgttaaattttctgtggcatcttttatgccttggtaaaaactgcagtgtctttggacctgagagtggctactccgtggttttgtgacctgtaagcgtggggttcaggggtgtgtggccctgcagggtcccacgcctccctgagcactgactggaagtttcactggctggtggctgtcccttctcccatcagggtccccagcaaagttaactacacagaggacccaggggaaacgagctgtgtagccactgacttgctcgcgcggccgtggcctctgaggggcactcgccggttaagacagggtgggagtagtgctttccagttcagactctaacttctcccaaagtgtcctaagaaaatactggatcggctcatagatttatgctccttatgatgccctaacttggaaggttgttctagggacaggccgggcagtgtccccacacacaccttagagtcgaaggccccagggccccgctgtcacttgcccaaaagatcccttccggcaggtaagggactaccaatgcttacgtcaaaacagcagaatcggctttgcagtgcactttggggagcagatattaacttatttttgtgttggacagtagtgaaatcttgtgatttttaatcgctttgataatacttccaaattttatgatttttctgaaggaaataatgcaaacattttaaatatgtttctccccctttccaaaaactgttaaactaatgagcaagtaacactaactttgaatgtctctacaatacccgttgataactcagtggagccaggctttggggtagcggccctgagcttgcagggtttctcgccactggggctgaccacgcccccagctgtgaccgtgggtgtggctggctctcggccctgcccagctttgttctgaggacgtggtgacttcctgaacatcagcttcaatcctccatcattaatgtgaagcaaaacacaaaaaccgccccaatccctcaggattccttggcatccgaaaccagcatctgcacctaaacccatacccacccgtgtgcgcccacagggggatgtgtccgaatgggcagcttaaaatgtggtcacctgtgggggaaactcttcaggcacctgaagtgagaacccagctgtccgtcctcaggccggcctttcttccggcgacacccgtccatggctggctgggtccccttcgcagtgtttgtctgtcttgacatctaaaccccggcgtgtgcagtgcccatcttccaggactaccttattttccagaattaaacctgttttataattcaagttaatgcaaatgactgtcagttgccaaatatcttgatcctatgagtgtagttgatgactgtttgttagtcagtagagtaaaatgctgtgtccacggggtgtcacagcctcaccataccctgttgaggtgtgaaatgccccgtcagaaattaaatacaaacttaaatgtgcctattggtgtctaaacttcatacaatgtaaggtcagattccttttaggaatactgggtgctgtcaccaggtttgatagttagacttaaaaacttgaaattcactttttggggggagggatatactgaaatagagagttgagacttgccagttgggggaaaatagcatttaaaatggaaagctgtgtttggaaaattgtgtatgagtatttttgtattaaaaacattttaaaggcttttttcttaa

SEQ ID NO: 440501 - DNA, 8324 bp, Homo sapiens
agagatgggtctcgccatcaccatgttgcccagtctggtctccaactcctgggctcaagcgatcctcctgccttggtctcccaaagtgctgggattacaggtgtgagcccccacacccggcctgagtgagtgggttctgaatggtgactgttgttgtccatagccttccccctgcttctgagagtggagtccctcccctcatgttggagacctcccaaggtccatgtggtcctataggggctgttcagcctccctagccccttaacgtgtcaggtaatactgtatatattccatgaaatgtgaataattagttatataattcctaagcacttattttaaaaaacagcaatgtgatgcttaactcttcccacctctgttcctgtcccccttagaaaaccactgataactctttttttttttgagacggagtcttgccctgtcgcccaggctggagtgtagtggcctgatctcggctcggctcattgtaacctccgcctcgggtttgagcgattctcctgcctcagcctcctgagtagctgggattataggcgtgcaccaccacgcctggctaattttttgtatctttagtagggacgggtttcaccatgttggccagagtggtcttgaactcctgaccttgtgatccgctcgcctcagcctcccaaagtgctgggattacaggcatgagccaccgtgcctgtcctagaaccactggtaactcttaactgctgtctgcttttctgtggagactgcgggttgcagacaccagcagccccctattgctgcacgtcaggtgtcctccacctcagtactgtggacatctcgggccgcatagccctgttgcgcgggcatcctgtgcgttgcaggagatgcagcagcatccatgaccgcaacccatcagagtgttctaagaacggaagcatctgggctggatggaatttagcatcaagcagagtcccctttctgttcagagtgttgtaaagtgcataaagatgaagcaggcaccagaaatcctcggcagtgccaacgggaagactccgagctgcgaggtgaaccgcgagtgttctgtgttcctcagcaaagcccagctctccagtagcctgcaggagggggtcatgcagaagtttaacggccacgacgccctgccctttattccagccgacaagctgaaagatcttacttcccgggtgtttaatggagaacccggcgcacacgatgccaaactgcgttttgagtcccaggaaatgaaagggattgggacaccccctaacactacccctatcaaaaatggctctccagaaattaagctgaaaatcaccaaaacatacatgaatgggaagcctctctttgaatcttccatttgtggtgacagtgctgctgatgtgtctcagtcagaagaaaatggacaaaaaccagaaaacaaggcgagaaggaacaggaagaggagcataaaatatgactccttgctggagcagggccttgtcgaagcagctcttgtgtctaagatctcaagtccttcagataaaaagattccagctaagaaagagtcttgtccaaacactggaagagacaaagaccacctgttgaaatacaacgttggtgatttggtgtggtccaaagtgtcgggttacccttggtggccttgcatggtttctgcagatccactccttcacagctataccaaacttaaaggtcagaaaaagagtgcacgccagtatcacgtacagttctttggtgacgccccagaaagagcttggatatttgagaagagcctcgtagcttttgaaggagaaggacagtttgaaaaattatgccaggaaagtgccaagcaggcacccacgaaagctgagaaaattaagctattgaaaccaatttcagggaaattgagggcccagtgggaaatgggcattgttcaagcagaagaagctgcaagcatgtcagtggaggagcggaaagccaagttcacctttctctatgtgggggaccagcttcatctcaaccctcaagtagccaaggaggctggcattgctgcagagtctttgggagaaatggcagaatcctcaggagtcagtgaagaagctgctgaaaaccccaagtctgtgagagaagagtgcattcccatgaagagaaggcggagggccaaactgtgtagctctgcagagaccctggagagtcaccccgacatagggaagagtactcctcaaaagacggcagaggctgaccccagaagaggagtagggtctcctcctgggaggaagaagaccacagtctccatgccacgaagcaggaagggagatgcagcatcccagtttttggtcttctgtcaaaaacacagggatgaggtggtagctgagcacccagatgcttcaggtgaggagattgaagagctgctcaggtcacagtggagtctgctgagtgagaagcagagagcacgctacaacaccaagtttgccctggtggcccctgtccaggctgaagaagactctggtaatgtaaatgggaaaaaaagaaaccacacaaagaggatacaggaccctacagaagatgctgaagctgaggacacacccaggaaaagactcaggacggacaagcacagtcttcggaagagagacacaatcactgacaaaacggccagaacaagctcttacaaggccatggaggcagcctcctcgctcaagagccaggcagcaacgaaaaatctgtctgatgcatgtaaaccactgaagaagcgaaatcgggcttccacggcagcatcttcagctcttgggtttagcaaaagttcatctccttctgcatccttaactgagaatgaggtctcggacagcccgggagacgagccctcggagtccccatacgaaagtgcagacgaaacacaaactgaagtatctgtctcatccaaaaagtctgagcgaggagtgactgccaaaaaggagtatgtgtgccagctgtgtgagaagccgggcagcctcctgctctgtgaaggaccctgctgcggagctttccacctcgcctgccttgggctttcccggaggccagaagggaggttcacctgcagcgagtgtgcctcagggattcactcatgtttcgtgtgtaaagagagcaagacagatgttaagcgctgtgtggtaactcagtgtggaaaattttaccatgaggcttgtgtgaaaaaataccctctgactgtatttgagagccgaggtttccgctgccccctccacagctgtgtgagctgccatgcttccaacccttcaaacccaaggccgtcaaaaggtaaaatgatgcggtgtgtccgctgccccgttgcctatcacagcggggatgcttgtctggcagcaggatgctcagtgatcgcctccaacagcatcatctgcactgcccacttcactgctcggaaggggaagcgacaccacgcccacgtcaacgtgagctggtgcttcgtgtgctccaaaggggggagccttctgtgctgtgagtcctgcccagcggccttccaccctgactgcctgaacatcgagatgcctgacggcagctggttctgcaatgactgcagggctgggaagaagctgcacttccaggatatcatttgggtgaaacttgggaactacagatggtggccggcagaagtttgccatcccaaaaatgttcccccaaatattcagaaaatgaagcacgagattggagaattccctgtgtttttctttgggtctaaagattattactggacgcatcaggcgcgagtgttcccgtacatggagggggaccggggcagccgctaccagggggtcagagggatcggaagagtcttcaaaaacgcactgcaagaagctgaagctcgttttcgtgaaattaagcttcagagggaagcccgagaaacacaggagagcgagcgcaagcccccaccatacaagcacatcaaggtgaataagccttacgggaaagtccagatctacacagcggatatttcagaaatccctaagtgcaactgcaagcccacagatgagaatccttgtggctttgattcggagtgtctgaacaggatgctgatgtttgagtgccacccgcaggtgtgtcccgcgggcgagttctgccagaaccagtgcttcaccaagcgccagtacccagagaccaagatcatcaagacagatggcaaagggtggggcctggtcgccaagagggacatcagaaagggagaatttgttaacgagtacgttggggagctgatcgacgaggaggagtgcatggcgagaatcaagcacgcacacgagaacgacatcacccacttctacatgctcactatagacaaggaccgtataatagacgctggccccaaaggaaactactctcgatttatgaatcacagctgccagcccaactgtgagaccctcaagtggacagtgaatggggacactcgtgtgggcctgtttgccgtctgtgacattcctgcagggacggagctgacttttaactacaacctcgattgtctgggcaatgaaaaaacggtctgccggtgtggagcctccaattgcagtggattcctcggggatagaccaaagacctcgacgaccctttcatcagaggaaaagggcaaaaagaccaagaagaaaacgaggcggcgcagagcaaaaggggaagggaagaggcagtcagaggacgagtgcttccgctgcggtgatggcgggcagctggtgctgtgtgaccgcaagttctgcaccaaggcctaccacctgtcctgcctgggccttggcaagcggcccttcgggaagtgggaatgtccttggcatcattgtgacgtgtgtggcaaaccttcgacttcattttgccacctctgccccaattcgttctgtaaggagcaccaggacgggacagccttcagctgcaccccggacgggcggtcctactgctgtgagcatgacttaggggcggcatcggtcagaagcaccaagactgagaagccccccccagagccagggaagccgaaggggaagaggcggcggcggaggggctggcggagagtcacagagggcaaatagcgccaggcggccgcttggccggatccaggggcggtgcagggcggccggccctgcctgcgggagagggcgagcatgaactggcccggaggacccagctcgagccgccaggacacagacgtacaggcctcctcgggagggagcgcctccccaccactgagccatcctcagcagcgtccgctgcgtctgcactgatgaccgtctgagcccagctcagcgttcctggacaaacagcctcactcctcagcgttaccgccacacttgaatttctccgaatgtcaaggttccctcccactctatttttttaggttaaagttaattggcatatggaatgttttaatctcctctgaaatgtgtagcgtaggcttttcccaagggtcgctagaaactcgtcttcgcgttgccccctttctggctctcagcgccgtcgccactcgggagaggctgggtgaggcccgtgtgaggactgaccctggattcctcgaaactgccattgtgatcattactctgctctttggaaatggctgtatcatttttttgtactaatgtgaattgttcctcagaaacgcttcttttccatcctagtgagaagctggccctgcaggtggtggcagcaatggtgttgtaagatttcctcccgtagttttttctcctcatggatttgaatgaaatgccaataacacgtccactttcaacgtgtagtttacgcggagcactttcgaggcctggccgggttgggcctacttctcacctgggcctatcttctgaactcgctaggttcttatcaacatttgggggataactttgtatatttttttcatttggcttttctttaccagtttctgatttttattctcaatatatttttgctaaacctatttcacaaatcaccaccgactgaagtgtgtgtttactgatgcggccctgagctccatggcgaaaggagtgactttgcagggcgtgagaccgcagtctgcttagagcacaggaagtgacaacttagggagccccgtagggcgctgcaggccccggggaccccagcacgtgggtctaaagagagacggagtctagctctcctgccacccagagtggcttccatctcagcactctgtgggtctggtgatggaagatgcagtctctgctgatcacatgtgccctctgccagggcacctactgagaggtgcggtcctgggggtggaggcctgcctggcaggtgtgcgtgcctcgtacgtgtgttatgggcactggtctaggccaggtatgacacccactctcctgtgagatttcactttagtttttaaaaggtccagttctacagagtgagacctatctatctgagtactacatatgttttaagacttggttctttttttgagggatccttgaccctgggaagtctggagcaccctgagaagggggcaccatgtgtgcctttgcccacgtgtcctgaggggctgcttgtctgggagggagggagagaacattcagcagcaggtgcttttttatggccttttcttaaaataacctaagggggacacatccatcttgcagagaagtttacagaactccccttgaaaactgctgctgaggctcctgttaaattttctgtggcatcttttatgccttggtaaaaactgcagtgtctttggacctgagagtggctactccgtggttttgtgacctgtaagcgtggggttcaggggtgtgtggccctgcagggtcccacgcctccctgagcactgactggaagtttcactggctggtggctgtcccttctcccatcagggtccccagcaaagttaactacacagaggacccaggggaaacgagctgtgtagccactgacttgctcgcgcggccgtggcctctgaggggcactcgccggttaagacagggtgggagtagtgctttccagttcagactctaacttctcccaaagtgtcctaagaaaatactggatcggctcatagatttatgctccttatgatgccctaacttggaaggttgttctagggacaggccgggcagtgtccccacacacaccttagagtcgaaggccccagggccccgctgtcacttgcccaaaagatcccttccggcaggtaagggactaccaatgcttacgtcaaaacagcagaatcggctttgcagtgcactttggggagcagatattaacttatttttgtgttggacagtagtgaaatcttgtgatttttaatcgctttgataatacttccaaattttatgatttttctgaaggaaataatgcaaacattttaaatatgtttctccccctttccaaaaactgttaaactaatgagcaagtaacactaactttgaatgtctctacaatacccgttgataactcagtggagccaggctttggggtagcggccctgagcttgcagggtttctcgccactggggctgaccacgcccccagctgtgaccgtgggtgtggctggctctcggccctgcccagctttgttctgaggacgtggtgacttcctgaacatcagcttcaatcctccatcattaatgtgaagcaaaacacaaaaaccgccccaatccctcaggattccttggcatccgaaaccagcatctgcacctaaacccatacccacccgtgtgcgcccacagggggatgtgtccgaatgggcagcttaaaatgtggtcacctgtgggggaaactcttcaggcacctgaagtgagaacccagctgtccgtcctcaggccggcctttcttccggcgacacccgtccatggctggctgggtccccttcgcagtgtttgtctgtcttgacatctaaaccccggcgtgtgcagtgcccatcttccaggactaccttattttccagaattaaacctgttttataattcaagttaatgcaaatgactgtcagttgccaaatatcttgatcctatgagtgtagttgatgactgtttgttagtcagtagagtaaaatgctgtgtccacggggtgtcacagcctcaccataccctgttgaggtgtgaaatgccccgtcagaaattaaatacaaacttaaatgtgcctattggtgtctaaacttcatacaatgtaaggtcagattccttttaggaatactgggtgctgtcaccaggtttgatagttagacttaaaaacttgaaattcactttttggggggagggatatactgaaatagagagttgagacttgccagttgggggaaaatagcatttaaaatggaaagctgtgtttggaaaattgtgtatgagtatttttgtattaaaaacattttaaaggcttttttcttaa

SEQ ID NO: 440502 - DNA, 8598 bp, Homo sapiens
agagatgggtctcgccatcaccatgttgcccagtctggtctccaactcctgggctcaagcgatcctcctgccttggtctcccaaagtgctgggattacaggtgtgagcccccacacccggcctgagtgagtgggttctgaatggtgactgttgttgtccatagccttccccctgcttctgagagtggagtccctcccctcatgttggagacctcccaaggtccatgtggtcctataggggctgttcagcctccctagccccttaacgtgtcaggtaatactgtatatattccatgaaatgtgaataattagttatataattcctaagcacttattttaaaaaacagcaatgtgatgcttaactcttcccacctctgttcctgtcccccttagaaaaccactgataactctttttttttttgagacggagtcttgccctgtcgcccaggctggagtgtagtggcctgatctcggctcggctcattgtaacctccgcctcgggtttgagcgattctcctgcctcagcctcctgagtagctgggattataggcgtgcaccaccacgcctggctaattttttgtatctttagtagggacgggtttcaccatgttggccagagtggtcttgaactcctgaccttgtgatccgctcgcctcagcctcccaaagtgctgggattacaggcatgagccaccgtgcctgtcctagaaccactggtaactcttaactgagacaagatttcgccatgttgcccaggctggtctcgaacttctgagctcaagcgatctacctgcctcgtcctcccaaagtgttggaattgcaggtgtgagccactgcacccggcccttgcctcatgtttgaatgataatttacctgggcataaaattctggacacttgtggtggcacgagctgtctgcttttctgtggagactgcgggttgcagacaccagcagccccctattgctgcacgtcaggtgtcctccacctcagtactgtggacatctcgggccgcatagccctgttgcgcgggcatcctgtgcgttgcaggagatgcagcagcatccatgaccgcaacccatcagagtgttctaagaacggaagcatctgggctggatggaatttagcatcaagcagagtcccctttctgttcagagtgttgtaaagtgcataaagatgaagcaggcaccagaaatcctcggcagtgccaacgggaagactccgagctgcgaggtgaaccgcgagtgttctgtgttcctcagcaaagcccagctctccagtagcctgcaggagggggtcatgcagaagtttaacggccacgacgccctgccctttattccagccgacaagctgaaagatcttacttcccgggtgtttaatggagaacccggcgcacacgatgccaaactgcgttttgagtcccaggaaatgaaagggattgggacaccccctaacactacccctatcaaaaatggctctccagaaattaagctgaaaatcaccaaaacatacatgaatgggaagcctctctttgaatcttccatttgtggtgacagtgctgctgatgtgtctcagtcagaagaaaatggacaaaaaccagaaaacaaggcgagaaggaacaggaagaggagcataaaatatgactccttgctggagcagggccttgtcgaagcagctcttgtgtctaagatctcaagtccttcagataaaaagattccagctaagaaagagtcttgtccaaacactggaagagacaaagaccacctgttgaaatacaacgttggtgatttggtgtggtccaaagtgtcgggttacccttggtggccttgcatggtttctgcagatccactccttcacagctataccaaacttaaaggtcagaaaaagagtgcacgccagtatcacgtacagttctttggtgacgccccagaaagagcttggatatttgagaagagcctcgtagcttttgaaggagaaggacagtttgaaaaattatgccaggaaagtgccaagcaggcacccacgaaagctgagaaaattaagctattgaaaccaatttcagggaaattgagggcccagtgggaaatgggcattgttcaagcagaagaagctgcaagcatgtcagtggaggagcggaaagccaagttcacctttctctatgtgggggaccagcttcatctcaaccctcaagtagccaaggaggctggcattgctgcagagtctttgggagaaatggcagaatcctcaggagtcagtgaagaagctgctgaaaaccccaagtctgtgagagaagagtgcattcccatgaagagaaggcggagggccaaactgtgtagctctgcagagaccctggagagtcaccccgacatagggaagagtactcctcaaaagacggcagaggctgaccccagaagaggagtagggtctcctcctgggaggaagaagaccacagtctccatgccacgaagcaggaagggagatgcagcatcccagtttttggtcttctgtcaaaaacacagggatgaggtggtagctgagcacccagatgcttcaggtgaggagattgaagagctgctcaggtcacagtggagtctgctgagtgagaagcagagagcacgctacaacaccaagtttgccctggtggcccctgtccaggctgaagaagactctggtaatgtaaatgggaaaaaaagaaaccacacaaagaggatacaggaccctacagaagatgctgaagctgaggacacacccaggaaaagactcaggacggacaagcacagtcttcggaagagagacacaatcactgacaaaacggccagaacaagctcttacaaggccatggaggcagcctcctcgctcaagagccaggcagcaacgaaaaatctgtctgatgcatgtaaaccactgaagaagcgaaatcgggcttccacggcagcatcttcagctcttgggtttagcaaaagttcatctccttctgcatccttaactgagaatgagcttttgtgggagcccacaccagtcaagttggatttgaacccagctgctctgtactgcacttagaatgatgtaatattccaggatgctgctgcaggtctcggacagcccgggagacgagccctcggagtccccatacgaaagtgcagacgaaacacaaactgaagtatctgtctcatccaaaaagtctgagcgaggagtgactgccaaaaaggagtatgtgtgccagctgtgtgagaagccgggcagcctcctgctctgtgaaggaccctgctgcggagctttccacctcgcctgccttgggctttcccggaggccagaagggaggttcacctgcagcgagtgtgcctcagggattcactcatgtttcgtgtgtaaagagagcaagacagatgttaagcgctgtgtggtaactcagtgtggaaaattttaccatgaggcttgtgtgaaaaaataccctctgactgtatttgagagccgaggtttccgctgccccctccacagctgtgtgagctgccatgcttccaacccttcaaacccaaggccgtcaaaaggtaaaatgatgcggtgtgtccgctgccccgttgcctatcacagcggggatgcttgtctggcagcaggatgctcagtgatcgcctccaacagcatcatctgcactgcccacttcactgctcggaaggggaagcgacaccacgcccacgtcaacgtgagctggtgcttcgtgtgctccaaaggggggagccttctgtgctgtgagtcctgcccagcggccttccaccctgactgcctgaacatcgagatgcctgacggcagctggttctgcaatgactgcagggctgggaagaagctgcacttccaggatatcatttgggtgaaacttgggaactacagatggtggccggcagaagtttgccatcccaaaaatgttcccccaaatattcagaaaatgaagcacgagattggagaattccctgtgtttttctttgggtctaaagattattactggacgcatcaggcgcgagtgttcccgtacatggagggggaccggggcagccgctaccagggggtcagagggatcggaagagtcttcaaaaacgcactgcaagaagctgaagctcgttttcgtgaaattaagcttcagagggaagcccgagaaacacaggagagcgagcgcaagcccccaccatacaagcacatcaaggtgaataagccttacgggaaagtccagatctacacagcggatatttcagaaatccctaagtgcaactgcaagcccacagatgagaatccttgtggctttgattcggagtgtctgaacaggatgctgatgtttgagtgccacccgcaggtgtgtcccgcgggcgagttctgccagaaccagtgcttcaccaagcgccagtacccagagaccaagatcatcaagacagatggcaaagggtggggcctggtcgccaagagggacatcagaaagggagaatttgttaacgagtacgttggggagctgatcgacgaggaggagtgcatggcgagaatcaagcacgcacacgagaacgacatcacccacttctacatgctcactatagacaaggaccgtataatagacgctggccccaaaggaaactactctcgatttatgaatcacagctgccagcccaactgtgagaccctcaagtggacagtgaatggggacactcgtgtgggcctgtttgccgtctgtgacattcctgcagggacggagctgacttttaactacaacctcgattgtctgggcaatgaaaaaacggtctgccggtgtggagcctccaattgcagtggattcctcggggatagaccaaagacctcgacgaccctttcatcagaggaaaagggcaaaaagaccaagaagaaaacgaggcggcgcagagcaaaaggggaagggaagaggcagtcagaggacgagtgcttccgctgcggtgatggcgggcagctggtgctgtgtgaccgcaagttctgcaccaaggcctaccacctgtcctgcctgggccttggcaagcggcccttcgggaagtgggaatgtccttggcatcattgtgacgtgtgtggcaaaccttcgacttcattttgccacctctgccccaattcgttctgtaaggagcaccaggacgggacagccttcagctgcaccccggacgggcggtcctactgctgtgagcatgacttaggggcggcatcggtcagaagcaccaagactgagaagccccccccagagccagggaagccgaaggggaagaggcggcggcggaggggctggcggagagtcacagagggcaaatagcgccaggcggccgcttggccggatccaggggcggtgcagggcggccggccctgcctgcgggagagggcgagcatgaactggcccggaggacccagctcgagccgccaggacacagacgtacaggcctcctcgggagggagcgcctccccaccactgagccatcctcagcagcgtccgctgcgtctgcactgatgaccgtctgagcccagctcagcgttcctggacaaacagcctcactcctcagcgttaccgccacacttgaatttctccgaatgtcaaggttccctcccactctatttttttaggttaaagttaattggcatatggaatgttttaatctcctctgaaatgtgtagcgtaggcttttcccaagggtcgctagaaactcgtcttcgcgttgccccctttctggctctcagcgccgtcgccactcgggagaggctgggtgaggcccgtgtgaggactgaccctggattcctcgaaactgccattgtgatcattactctgctctttggaaatggctgtatcatttttttgtactaatgtgaattgttcctcagaaacgcttcttttccatcctagtgagaagctggccctgcaggtggtggcagcaatggtgttgtaagatttcctcccgtagttttttctcctcatggatttgaatgaaatgccaataacacgtccactttcaacgtgtagtttacgcggagcactttcgaggcctggccgggttgggcctacttctcacctgggcctatcttctgaactcgctaggttcttatcaacatttgggggataactttgtatatttttttcatttggcttttctttaccagtttctgatttttattctcaatatatttttgctaaacctatttcacaaatcaccaccgactgaagtgtgtgtttactgatgcggccctgagctccatggcgaaaggagtgactttgcagggcgtgagaccgcagtctgcttagagcacaggaagtgacaacttagggagccccgtagggcgctgcaggccccggggaccccagcacgtgggtctaaagagagacggagtctagctctcctgccacccagagtggcttccatctcagcactctgtgggtctggtgatggaagatgcagtctctgctgatcacatgtgccctctgccagggcacctactgagaggtgcggtcctgggggtggaggcctgcctggcaggtgtgcgtgcctcgtacgtgtgttatgggcactggtctaggccaggtatgacacccactctcctgtgagatttcactttagtttttaaaaggtccagttctacagagtgagacctatctatctgagtactacatatgttttaagacttggttctttttttgagggatccttgaccctgggaagtctggagcaccctgagaagggggcaccatgtgtgcctttgcccacgtgtcctgaggggctgcttgtctgggagggagggagagaacattcagcagcaggtgcttttttatggccttttcttaaaataacctaagggggacacatccatcttgcagagaagtttacagaactccccttgaaaactgctgctgaggctcctgttaaattttctgtggcatcttttatgccttggtaaaaactgcagtgtctttggacctgagagtggctactccgtggttttgtgacctgtaagcgtggggttcaggggtgtgtggccctgcagggtcccacgcctccctgagcactgactggaagtttcactggctggtggctgtcccttctcccatcagggtccccagcaaagttaactacacagaggacccaggggaaacgagctgtgtagccactgacttgctcgcgcggccgtggcctctgaggggcactcgccggttaagacagggtgggagtagtgctttccagttcagactctaacttctcccaaagtgtcctaagaaaatactggatcggctcatagatttatgctccttatgatgccctaacttggaaggttgttctagggacaggccgggcagtgtccccacacacaccttagagtcgaaggccccagggccccgctgtcacttgcccaaaagatcccttccggcaggtaagggactaccaatgcttacgtcaaaacagcagaatcggctttgcagtgcactttggggagcagatattaacttatttttgtgttggacagtagtgaaatcttgtgatttttaatcgctttgataatacttccaaattttatgatttttctgaaggaaataatgcaaacattttaaatatgtttctccccctttccaaaaactgttaaactaatgagcaagtaacactaactttgaatgtctctacaatacccgttgataactcagtggagccaggctttggggtagcggccctgagcttgcagggtttctcgccactggggctgaccacgcccccagctgtgaccgtgggtgtggctggctctcggccctgcccagctttgttctgaggacgtggtgacttcctgaacatcagcttcaatcctccatcattaatgtgaagcaaaacacaaaaaccgccccaatccctcaggattccttggcatccgaaaccagcatctgcacctaaacccatacccacccgtgtgcgcccacagggggatgtgtccgaatgggcagcttaaaatgtggtcacctgtgggggaaactcttcaggcacctgaagtgagaacccagctgtccgtcctcaggccggcctttcttccggcgacacccgtccatggctggctgggtccccttcgcagtgtttgtctgtcttgacatctaaaccccggcgtgtgcagtgcccatcttccaggactaccttattttccagaattaaacctgttttataattcaagttaatgcaaatgactgtcagttgccaaatatcttgatcctatgagtgtagttgatgactgtttgttagtcagtagagtaaaatgctgtgtccacggggtgtcacagcctcaccataccctgttgaggtgtgaaatgccccgtcagaaattaaatacaaacttaaatgtgcctattggtgtctaaacttcatacaatgtaaggtcagattccttttaggaatactgggtgctgtcaccaggtttgatagttagacttaaaaacttgaaattcactttttggggggagggatatactgaaatagagagttgagacttgccagttgggggaaaatagcatttaaaatggaaagctgtgtttggaaaattgtgtatgagtatttttgtattaaaaacattttaaaggcttttttcttaa

SEQ ID NO: 440503 - DNA, 754 bp, Homo sapiens
gctcggtcctctccacgtggtcctgacctgtcctctgtgagcaagagaaacaggactggtttgggggtgtcctgtctcagtggacacaggacaccacggttttcagtacaacaaggaacacaacttgttcaatgtgctttatgatggtgaaaattccctttaaaaataacatgcgattgctaacacttgaccgaatatatcacttgaccttacagggaccgtataatagacgctggccccaaaggaaactactctcgatttatgaatcacagctgccagcccaactgtgagaccctcaagtggacagtgaatggggacactcgtgtgggcctgtttgccgtctgtgacattcctgcagggacggagctgacttttaactacaacctcgattgtctgggcaatgaaaaaacggtctgccggtgtggagcctccaattgcagtggattcctcggggatagaccaaagacctcgacgaccctttcatcagaggaaaagggcaaaaagaccaagaagaaaacgaggcggcgcagagcaaaaggggaagggaagaggcagtcagaggacgagtgcttccgctgcggtgatggcgggcagctggtgctgtgtgaccgcaagttctgcaccaaggcctaccacctgtcctgcctgggccttggcaagcggcccttcgggagtgggatgtcttaatcatgtgactgttggaacctcgatcattgcacttgccaatcgctgaggacagaggcactataccggg

SEQ ID NO: 440504 - DNA, 559 bp, Homo sapiens
  misc_feature (103)..(103): n is a, c, g, or t
aggcgatcactgagcatcctgctggcagacaagcatccccgctgtgataggcacgggggcagcggacacaccgcatcattttaccttttgacggccttgggtntgaagggttggaagcatggccctgctccagcaaggagtcatattttatgctcctcttcctgttccttctcgccttgttttctggtttttgtccattttcttctgactgagacacatcagcagcatgtcagtggaggagcggaaagccaagttcacctttctctatgtgggggaccagcttcatctcaaccctcaagtagccaaggaggctggcattgctgcagagtctttgggagaaatggcagaatcctcaggagtcagtgaagaagctgctgaaaaccccaagtctgtgagagaagagtgcattcccatgaagagaaggcggagggccaaactgtgtagctctgcagagaccctggagagtcaccccgacatagggaagagtactcctcaaaagacggcagaggctgaccccagaagaggagtagtaaatcgtcggccaagtgaatttttaatc

SEQ ID NO: 440505 - DNA, 7592 bp, Homo sapiens
  misc_feature (12)..(12): n is a, c, g, or t
  misc_feature (86)..(86): n is a, c, g, or t
gggaggcgcggnggcggggtcggcgccgcgcgcgagagcctcggcctggccgcgctgcgcccgccgccgccgccgccccctccccncctgggccctaccgccgcacggccccggccccctcccagcctgccgctccggagagccgcccgccgaggatgcgacgcaccgcagtgttctaagaacggaagcatctgggctggatggaatttagcatcaagcagagtcccctttctgttcagagtgttgtaaagtgcataaagatgaagcaggcaccagaaatcctcggcagtgccaacgggaagactccgagctgcgaggtgaaccgcgagtgttctgtgttcctcagcaaagcccagctctccagtagcctgcaggagggggtcatgcagaagtttaacggccacgacgccctgccctttattccagccgacaagctgaaagatcttacttcccgggtgtttaatggagaacccggcgcacacgatgccaaactgcgttttgagtcccaggaaatgaaagggattgggacaccccctaacactacccctatcaaaaatggctctccagaaattaagctgaaaatcaccaaaacatacatgaatgggaagcctctctttgaatcttccatttgtggtgacagtgctgctgatgtgtctcagtcagaagaaaatggacaaaaaccagaaaacaaggcgagaaggaacaggaagaggagcataaaatatgactccttgctggagcagggccttgtcgaagcagctcttgtgtctaagatctcaagtccttcagataaaaagattccagctaagaaagagtcttgtccaaacactggaagagacaaagaccacctgttgaaatacaacgttggtgatttggtgtggtccaaagtgtcgggttacccttggtggccttgcatggtttctgcagatccactccttcacagctataccaaacttaaaggtcagaaaaagagtgcacgccagtatcacgtacagttctttggtgacgccccagaaagagcttggatatttgagaagagcctcgtagcttttgaaggagaaggacagtttgaaaaattatgccaggaaagtgccaagcaggcacccacgaaagctgagaaaattaagctattgaaaccaatttcagggaaattgagggcccagtgggaaatgggcattgttcaagcagaagaagctgcaagcatgtcagtggaggagcggaaagccaagttcacctttctctatgtgggggaccagcttcatctcaaccctcaagtagccaaggaggctggcattgctgcagagtctttgggagaaatggcagaatcctcaggagtcagtgaagaagctgctgaaaaccccaagtctgtgagagaagagtgcattcccatgaagagaaggcggagggccaaactgtgtagctctgcagagaccctggagagtcaccccgacatagggaagagtactcctcaaaagacggcagaggctgaccccagaagaggagtagggtctcctcctgggaggaagaagaccacagtctccatgccacgaagcaggaagggagatgcagcatcccagtttttggtcttctgtcaaaaacacagggatgaggtggtagctgagcacccagatgcttcaggtgaggagattgaagagctgctcaggtcacagtggagtctgctgagtgagaagcagagagcacgctacaacaccaagtttgccctggtggcccctgtccaggctgaagaagactctggtaatgtaaatgggaaaaaaagaaaccacacaaagaggatacaggaccctacagaagatgctgaagctgaggacacacccaggaaaagactcaggacggacaagcacagtcttcggaagagagacacaatcactgacaaaacggccagaacaagctcttacaaggccatggaggcagcctcctcgctcaagagccaggcagcaacgaaaaatctgtctgatgcatgtaaaccactgaagaagcgaaatcgggcttccacggcagcatcttcagctcttgggtttagcaaaagttcatctccttctgcatccttaactgagaatgaggtctcggacagcccgggagacgagccctcggagtccccatacgaaagtgcagacgaaacacaaactgaagtatctgtctcatccaaaaagtctgagcgaggagtgactgccaaaaaggagtatgtgtgccagctgtgtgagaagccgggcagcctcctgctctgtgaaggaccctgctgcggagctttccacctcgcctgccttgggctttcccggaggccagaagggaggttcacctgcagcgagtgtgcctcagggattcactcatgtttcgtgtgtaaagagagcaagacagatgttaagcgctgtgtggtaactcagtgtggaaaattttaccatgaggcttgtgtgaaaaaataccctctgactgtatttgagagccgaggtttccgctgccccctccacagctgtgtgagctgccatgcttccaacccttcaaacccaaggccgtcaaaaggtaaaatgatgcggtgtgtccgctgccccgttgcctatcacagcggggatgcttgtctggcagcaggatgctcagtgatcgcctccaacagcatcatctgcactgcccacttcactgctcggaaggggaagcgacaccacgcccacgtcaacgtgagctggtgcttcgtgtgctccaaaggggggagccttctgtgctgtgagtcctgcccagcggccttccaccctgactgcctgaacatcgagatgcctgacggcagctggttctgcaatgactgcagggctgggaagaagctgcacttccaggatatcatttgggtgaaacttgggaactacagatggtggccggcagaagtttgccatcccaaaaatgttcccccaaatattcagaaaatgaagcacgagattggagaattccctgtgtttttctttgggtctaaagattattactggacgcatcaggcgcgagtgttcccgtacatggagggggaccggggcagccgctaccagggggtcagagggatcggaagagtcttcaaaaacgcactgcaagaagctgaagctcgttttcgtgaaattaagcttcagagggaagcccgagaaacacaggagagcgagcgcaagcccccaccatacaagcacatcaaggtgaataagccttacgggaaagtccagatctacacagcggatatttcagaaatccctaagtgcaactgcaagcccacagatgagaatccttgtggctttgattcggagtgtctgaacaggatgctgatgtttgagtgccacccgcaggtgtgtcccgcgggcgagttctgccagaaccagtgcttcaccaagcgccagtacccagagaccaagatcatcaagacagatggcaaagggtggggcctggtcgccaagagggacatcagaaagggagaatttgttaacgagtacgttggggagctgatcgacgaggaggagtgcatggcgagaatcaagcacgcacacgagaacgacatcacccacttctacatgctcactatagacaaggaccgtataatagacgctggccccaaaggaaactactctcgatttatgaatcacagctgccagcccaactgtgagaccctcaagtggacagtgaatggggacactcgtgtgggcctgtttgccgtctgtgacattcctgcagggacggagctgacttttaactacaacctcgattgtctgggcaatgaaaaaacggtctgccggtgtggagcctccaattgcagtggattcctcggggatagaccaaagacctcgacgaccctttcatcagaggaaaagggcaaaaagaccaagaagaaaacgaggcggcgcagagcaaaaggggaagggaagaggcagtcagaggacgagtgcttccgctgcggtgatggcgggcagctggtgctgtgtgaccgcaagttctgcaccaaggcctaccacctgtcctgcctgggccttggcaagcggcccttcgggaagtgggaatgtccttggcatcattgtgacgtgtgtggcaaaccttcgacttcattttgccacctctgccccaattcgttctgtaaggagcaccaggacgggacagccttcagctgcaccccggacgggcggtcctactgctgtgagcatgacttaggggcggcatcggtcagaagcaccaagactgagaagccccccccagagccagggaagccgaaggggaagaggcggcggcggaggggctggcggagagtcacagagggcaaatagcgccaggcggccgcttggccggatccaggggcggtgcagggcggccggccctgcctgcgggagagggcgagcatgaactggcccggaggacccagctcgagccgccaggacacagacgtacaggcctcctcgggagggagcgcctccccaccactgagccatcctcagcagcgtccgctgcgtctgcactgatgaccgtctgagcccagctcagcgttcctggacaaacagcctcactcctcagcgttaccgccacacttgaatttctccgaatgtcaaggttccctcccactctatttttttaggttaaagttaattggcatatggaatgttttaatctcctctgaaatgtgtagcgtaggcttttcccaagggtcgctagaaactcgtcttcgcgttgccccctttctggctctcagcgccgtcgccactcgggagaggctgggtgaggcccgtgtgaggactgaccctggattcctcgaaactgccattgtgatcattactctgctctttggaaatggctgtatcatttttttgtactaatgtgaattgttcctcagaaacgcttcttttccatcctagtgagaagctggccctgcaggtggtggcagcaatggtgttgtaagatttcctcccgtagttttttctcctcatggatttgaatgaaatgccaataacacgtccactttcaacgtgtagtttacgcggagcactttcgaggcctggccgggttgggcctacttctcacctgggcctatcttctgaactcgctaggttcttatcaacatttgggggataactttgtatatttttttcatttggcttttctttaccagtttctgatttttattctcaatatatttttgctaaacctatttcacaaatcaccaccgactgaagtgtgtgtttactgatgcggccctgagctccatggcgaaaggagtgactttgcagggcgtgagaccgcagtctgcttagagcacaggaagtgacaacttagggagccccgtagggcgctgcaggccccggggaccccagcacgtgggtctaaagagagacggagtctagctctcctgccacccagagtggcttccatctcagcactctgtgggtctggtgatggaagatgcagtctctgctgatcacatgtgccctctgccagggcacctactgagaggtgcggtcctgggggtggaggcctgcctggcaggtgtgcgtgcctcgtacgtgtgttatgggcactggtctaggccaggtatgacacccactctcctgtgagatttcactttagtttttaaaaggtccagttctacagagtgagacctatctatctgagtactacatatgttttaagacttggttctttttttgagggatccttgaccctgggaagtctggagcaccctgagaagggggcaccatgtgtgcctttgcccacgtgtcctgaggggctgcttgtctgggagggagggagagaacattcagcagcaggtgcttttttatggccttttcttaaaataacctaagggggacacatccatcttgcagagaagtttacagaactccccttgaaaactgctgctgaggctcctgttaaattttctgtggcatcttttatgccttggtaaaaactgcagtgtctttggacctgagagtggctactccgtggttttgtgacctgtaagcgtggggttcaggggtgtgtggccctgcagggtcccacgcctccctgagcactgactggaagtttcactggctggtggctgtcccttctcccatcagggtccccagcaaagttaactacacagaggacccaggggaaacgagctgtgtagccactgacttgctcgcgcggccgtggcctctgaggggcactcgccggttaagacagggtgggagtagtgctttccagttcagactctaacttctcccaaagtgtcctaagaaaatactggatcggctcatagatttatgctccttatgatgccctaacttggaaggttgttctagggacaggccgggcagtgtccccacacacaccttagagtcgaaggccccagggccccgctgtcacttgcccaaaagatcccttccggcaggtaagggactaccaatgcttacgtcaaaacagcagaatcggctttgcagtgcactttggggagcagatattaacttatttttgtgttggacagtagtgaaatcttgtgatttttaatcgctttgataatacttccaaattttatgatttttctgaaggaaataatgcaaacattttaaatatgtttctccccctttccaaaaactgttaaactaatgagcaagtaacactaactttgaatgtctctacaatacccgttgataactcagtggagccaggctttggggtagcggccctgagcttgcagggtttctcgccactggggctgaccacgcccccagctgtgaccgtgggtgtggctggctctcggccctgcccagctttgttctgaggacgtggtgacttcctgaacatcagcttcaatcctccatcattaatgtgaagcaaaacacaaaaaccgccccaatccctcaggattccttggcatccgaaaccagcatctgcacctaaacccatacccacccgtgtgcgcccacagggggatgtgtccgaatgggcagcttaaaatgtggtcacctgtgggggaaactcttcaggcacctgaagtgagaacccagctgtccgtcctcaggccggcctttcttccggcgacacccgtccatggctggctgggtccccttcgcagtgtttgtctgtcttgacatctaaaccccggcgtgtgcagtgcccatcttccaggactaccttattttccagaattaaacctgttttataattcaagttaatgcaaatgactgtcagttgccaaatatcttgatcctatgagtgtagttgatgactgtttgttagtcagtagagtaaaatgctgtgtccacggggtgtcacagcctcaccataccctgttgaggtgtgaaatgccccgtcagaaattaaatacaaacttaaatgtgcctattggtgtctaaacttcatacaatgtaaggtcagattccttttaggaatactgggtgctgtcaccaggtttgatagttagacttaaaaacttgaaattcactttttggggggagggatatactgaaatagagagttgagacttgccagttgggggaaaatagcatttaaaatggaaagctgtgtttggaaaattgtgtatgagtatttttgtattaaaaacattttaaaggcttttttcttaa

SEQ ID NO: 440506 - DNA, 10870 bp, Homo sapiens
  misc_feature (12)..(12): n is a, c, g, or t
  misc_feature (86)..(86): n is a, c, g, or t
gggaggcgcggnggcggggtcggcgccgcgcgcgagagcctcggcctggccgcgctgcgcccgccgccgccgccgccccctccccncctgggccctaccgccgcacggccccggccccctcccagcctgccgctccggagagccgcccgccgaggatgcgacgcaccgcagtgttctaagaacggaagcatctgggctggatggaatttagcatcaagcagagtcccctttctgttcagagtgttgtaaagtgcataaagatgaagcaggcaccagaaatcctcggcagtgccaacgggaagactccgagctgcgaggtgaaccgcgagtgttctgtgttcctcagcaaagcccagctctccagtagcctgcaggagggggtcatgcagaagtttaacggccacgacgccctgccctttattccagccgacaagctgaaagatcttacttcccgggtgtttaatggagaacccggcgcacacgatgccaaactgcgttttgagtcccaggaaatgaaagggattgggacaccccctaacactacccctatcaaaaatggctctccagaaattaagctgaaaatcaccaaaacatacatgaatgggaagcctctctttgaatcttccatttgtggtgacagtgctgctgatgtgtctcagtcagaagaaaatggacaaaaaccagaaaacaaggcgagaaggaacaggaagaggagcataaaatatgactccttgctggagcagggccttgtcgaagcagctcttgtgtctaagatctcaagtccttcagataaaaagattccagctaagaaagagtcttgtccaaacactggaagagacaaagaccacctgttgaaatacaacgttggtgatttggtgtggtccaaagtgtcgggttacccttggtggccttgcatggtttctgcagatccactccttcacagctataccaaacttaaaggtcagaaaaagagtgcacgccagtatcacgtacagttctttggtgacgccccagaaagagcttggatatttgagaagagcctcgtagcttttgaaggagaaggacagtttgaaaaattatgccaggaaagtgccaagcaggcacccacgaaagctgagaaaattaagctattgaaaccaatttcagggaaattgagggcccagtgggaaatgggcattgttcaagcagaagaagctgcaagcatgtcagtggaggagcggaaagccaagttcacctttctctatgtgggggaccagcttcatctcaaccctcaagtagccaaggaggctggcattgctgcagagtctttgggagaaatggcagaatcctcaggagtcagtgaagaagctgctgaaaaccccaagtctgtgagagaagagtgcattcccatgaagagaaggcggagggccaaactgtgtagctctgcagagaccctggagagtcaccccgacatagggaagagtactcctcaaaagacggcagaggctgaccccagaagaggagtagggtctcctcctgggaggaagaagaccacagtctccatgccacgaagcaggaagggagatgcagcatcccagtttttggtcttctgtcaaaaacacagggatgaggtggtagctgagcacccagatgcttcaggtgaggagattgaagagctgctcaggtcacagtggagtctgctgagtgagaagcagagagcacgctacaacaccaagtttgccctggtggcccctgtccaggctgaagaagactctggtaatgtaaatgggaaaaaaagaaaccacacaaagaggatacaggaccctacagaagatgctgaagctgaggacacacccaggaaaagactcaggacggacaagcacagtcttcggaagcaacgaaaaatctgtctgatgcatgtaaaccactgaagaagcgaaatcgggcttccacggcagcatcttcagctcttgggtttagcaaaagttcatctccttctgcatccttaactgagaatgagggtaaaataataataataacgataaccatggcattggtatgaaggccatttagctgcccacgctgcagtgtgagtaatgctcagacttcataagcgcagcattggtgctcactgccagtgcagatgttttagggcctcttggctaactcagattcatgaaatggacaaacagtgcactatgttagtttatttgagcactttttatacacacgcacacagtgtctgtgtacatgtacagatatacttcagtcttgatgcagtttcatagttcttaaaatctgtctgaagaatgttgtgttctgtgtagccctcacactgtaagagttcacatggaagtaagtctgcgttggttctgaaagggcacagtgtcagttgagctgacatatactgggtggggtggaaggcgactcacacaccacacctgattcctgttgcttccagacctaggctcatggaggaagccaaagatttctttgttctcatgcatttcatggctttggtcctttaaattctggcacatttttagttacttgagtgttgaggtgagtcagaactaccattgtaatatgactcctgtgttctggacttgcagagtacatgatagcaaaataaagccatttggggctgctgcctgccatcattgtaacatgacacttagactttattatcaaacctaaattttttgccgttgccaaaaacaacaaatagccacagaacgtaggtgtgacacttttttgttcggaggtagttttggtttcctgatttttagggattaccttcatagagctttggagttttaatttcttgttatttggttctccgtgatgctgtttttctcattgtagacatgggtcctgtttttgtcatgtttatgaggagatgataactgggggcccttttggaacagggtagtgaggcaagggttggacaggccccttactcttgctgagtcagaaggcggcacttctggccaggtctctgccatggtccccaggaaggatggggtgtgcctcagttgtttccactcattagaggagtgtaggccttccagtgcaggaaggtcagggacctaggcaacctgggcggggctcatagagctctgcggcttgccactctgaatcctcagcgaccactcctccgagtgggattttctgcagggactcaaaccaactcagtggtggtcgagacctgttcacggatggtgggactggggctgctttacagtttgatacgtgtagataattaagcattttgtgatgtttggacacactggagaaaaggcagtaagaattatttactgaaacatctaggagcttactgaaatatgaaaaggcaaattttatacaaattatttttcctttttcctttctttcttgtccaagttcaggttaaaatcttagaaaattaaatgaaaggtcatttacagttccaaagaagaatattaaacatttttcacttaagttgagatttttgctttaaagagcttttaatgagtttttctgttatcataattttggtccggttattcacttgagttgttgcttatactgttgtcaggtacagtagagagaacatggagcctgctgagatcttctctgttattcctgatcctaagtcatgtatatcgaaggctttgatttagagtaatgcatgaggccagtgtagcggggtcgaggcctgcccatgagtcaggggagctcagtctccctggcctaggcagttgtcctgaccttgagaagacatagatgaagcattttatcatcattagacttaaattttaattcttcagaatgtcagaagttgataggttgttaaatacatttatataatacattaaatatgtgaaattaatacaccttcctacattttgaaggtgatgcatagatcccatagtgtgcatcatgttccttatatgaaaacgtttaaattactgggtcttttccattaaactacttttgtatggcttagataaatcttccattagtgttcatttttatagaattatgctgttaaaactactttaggtgaacaaataaacttgtctattatatattaacgcgactgaactacagtaaatgtttgtgatgtttccaatgctgaatgcctgttagcatatgaggcaaagtgtagtgttataaaaaacagcctgttgactgctgggcccgattctgatatgagttaggtgaccatgagaattgctgtttgaggtccacactgacacacacccattgggtcacaccccctttgcatgtttgtatttcctccctttcatcacatttgtttgaaataaggtacttttatagggttggtatttcagaacactttaggtcatgttgtagtttaaattcttcttgaaaaaggtatatgtgataaataaaaatttttattggaataattattacatggtactacatcaccctgaggaagagaataaattaaaattacacacttgcatgacaaaggcctgtgaaggaattaatgtgatttaagtgttttgtaacttcattttttattcctttagtagagcaaattcttatttttttcgccttcactggtaacagcttttgtgggagcccacaccagtcaagttggatttgaacccagctgctctgtactgcacttagaatgatgtaatattccaggatgctgctgcaggtggcgtatcatcgtacacactcagtgacatttctatcacaatcattttatggaagatgtgtgataatctgtttttactggtattaataaacacatacaatgaagaaaacagataacaaattttaagaccaaggtctcggacagcccgggagacgagccctcggagtccccatacgaaagtgcagacgaaacacaaactgaagtatctgtctcatccaaaaagtctgagcgaggagtgactgccaaaaaggagtatgtgtgccagctgtgtgagaagccgggcagcctcctgctctgtgaaggaccctgctgcggagctttccacctcgcctgccttgggctttcccggaggccagaagggaggttcacctgcagcgagtgtgcctcaggtgtcgcccggcacagtctggggtctgtgaggatgatgagaggacacctgcacagccgtggcccttcctgcctactcaccgggcccaaggagtctcctatctcacgtcagaacacttcctgggtcaggaagacacctggagagtctcccaggccatggcagccccacagcagcacctcacttatgggagtgtctgtctgcctgcccagaatgataagtgactgctccaccactggccagctgctctcaaggaggaaaggcctcttttcataggagccccttctttcaagcttcttgccagttagactgggcctccccagccaggctgcctagtaagattctcctgtatttcaggtgaagctggagctcagatcgcagcaaggtaatccttgatggctggatctttttgctggagaatgcttggactagtgagcaaggttggaaacagggccaggtgctttagcagcgtggctgcctctgaagaggagttgcttgattttagtggctcagaactgcaatttaattcttgttctttgcacctctctctccaccccttctttaactttttgttagggattcactcatgtttcgtgtgtaaagagagcaagacagatgttaagcgctgtgtggtaactcagtgtggaaaattttaccatgaggcttgtgtgaaaaaataccctctgactgtatttgagagccgaggtttccgctgccccctccacagctgtgtgagctgccatgcttccaacccttcaaacccaaggccgtcaaaaggtaaaatgatgcggtgtgtccgctgccccgttgcctatcacagcggggatgcttgtctggcagcaggatgctcagtgatcgcctccaacagcatcatctgcactgcccacttcactgctcggaaggggaagcgacaccacgcccacgtcaacgtgagctggtgcttcgtgtgctccaaaggggggagccttctgtgctgtgagtcctgcccagcggccttccaccctgactgcctgaacatcgagatgcctgacggcagctggttctgcaatgactgcagggctgggaagaagctgcacttccaggatatcatttgggtgaaacttgggaactacagatggtggccggcagaagtttgccatcccaaaaatgttcccccaaatattcagaaaatgaagcacgagattggagaattccctgtgtttttctttgggtctaaagattattactggacgcatcaggcgcgagtgttcccgtacatggagggggaccggggcagccgctaccagggggtcagagggatcggaagagtcttcaaaaacgcactgcaagaagctgaagctcgttttcgtgaaattaagcttcagagggaagcccgagaaacacaggagagcgagcgcaagcccccaccatacaagcacatcaaggtgaataagccttacgggaaagtccagatctacacagcggatatttcagaaatccctaagtgcaactgcaagcccacagatgagaatccttgtggctttgattcggagtgtctgaacaggatgctgatgtttgagtgccacccgcaggtgtgtcccgcgggcgagttctgccagaaccagtgcttcaccaagcgccagtacccagagaccaagatcatcaagacagatggcaaagggtggggcctggtcgccaagagggacatcagaaagggagaatttgttaacgagtacgttggggagctgatcgacgaggaggagtgcatggcgagaatcaagcacgcacacgagaacgacatcacccacttctacatgctcactatagacaaggaccgtataatagacgctggccccaaaggaaactactctcgatttatgaatcacagctgccagcccaactgtgagaccctcaagtggacagtgaatggggacactcgtgtgggcctgtttgccgtctgtgacattcctgcagggacggagctgacttttaactacaacctcgattgtctgggcaatgaaaaaacggtctgccggtgtggagcctccaattgcagtggattcctcggggatagaccaaagacctcgacgaccctttcatcagaggaaaagggcaaaaagaccaagaagaaaacgaggcggcgcagagcaaaaggggaagggaagaggcagtcagaggacgagtgcttccgctgcggtgatggcgggcagctggtgctgtgtgaccgcaagttctgcaccaaggcctaccacctgtcctgcctgggccttggcaagcggcccttcgggaagtgggaatgtccttggcatcattgtgacgtgtgtggcaaaccttcgacttcattttgccacctctgccccaattcgttctgtaaggagcaccaggacgggacagccttcagctgcaccccggacgggcggtcctactgctgtgagcatgacttaggggcggcatcggtcagaagcaccaagactgagaagccccccccagagccagggaagccgaaggggaagaggcggcggcggaggggctggcggagagtcacagagggcaaatagcgccaggcggccgcttggccggatccaggggcggtgcagggcggccggccctgcctgcgggagagggcgagcatgaactggcccggaggacccagctcgagccgccaggacacagacgtacaggcctcctcgggagggagcgcctccccaccactgagccatcctcagcagcgtccgctgcgtctgcactgatgaccgtctgagcccagctcagcgttcctggacaaacagcctcactcctcagcgttaccgccacacttgaatttctccgaatgtcaaggttccctcccactctatttttttaggttaaagttaattggcatatggaatgttttaatctcctctgaaatgtgtagcgtaggcttttcccaagggtcgctagaaactcgtcttcgcgttgccccctttctggctctcagcgccgtcgccactcgggagaggctgggtgaggcccgtgtgaggactgaccctggattcctcgaaactgccattgtgatcattactctgctctttggaaatggctgtatcatttttttgtactaatgtgaattgttcctcagaaacgcttcttttccatcctagtgagaagctggccctgcaggtggtggcagcaatggtgttgtaagatttcctcccgtagttttttctcctcatggatttgaatgaaatgccaataacacgtccactttcaacgtgtagtttacgcggagcactttcgaggcctggccgggttgggcctacttctcacctgggcctatcttctgaactcgctaggttcttatcaacatttgggggataactttgtatatttttttcatttggcttttctttaccagtttctgatttttattctcaatatatttttgctaaacctatttcacaaatcaccaccgactgaagtgtgtgtttactgatgcggccctgagctccatggcgaaaggagtgactttgcagggcgtgagaccgcagtctgcttagagcacaggaagtgacaacttagggagccccgtagggcgctgcaggccccggggaccccagcacgtgggtctaaagagagacggagtctagctctcctgccacccagagtggcttccatctcagcactctgtgggtctggtgatggaagatgcagtctctgctgatcacatgtgccctctgccagggcacctactgagaggtgcggtcctgggggtggaggcctgcctggcaggtgtgcgtgcctcgtacgtgtgttatgggcactggtctaggccaggtatgacacccactctcctgtgagatttcactttagtttttaaaaggtccagttctacagagtgagacctatctatctgagtactacatatgttttaagacttggttctttttttgagggatccttgaccctgggaagtctggagcaccctgagaagggggcaccatgtgtgcctttgcccacgtgtcctgaggggctgcttgtctgggagggagggagagaacattcagcagcaggtgcttttttatggccttttcttaaaataacctaagggggacacatccatcttgcagagaagtttacagaactccccttgaaaactgctgctgaggctcctgttaaattttctgtggcatcttttatgccttggtaaaaactgcagtgtctttggacctgagagtggctactccgtggttttgtgacctgtaagcgtggggttcaggggtgtgtggccctgcagggtcccacgcctccctgagcactgactggaagtttcactggctggtggctgtcccttctcccatcagggtccccagcaaagttaactacacagaggacccaggggaaacgagctgtgtagccactgacttgctcgcgcggccgtggcctctgaggggcactcgccggttaagacagggtgggagtagtgctttccagttcagactctaacttctcccaaagtgtcctaagaaaatactggatcggctcatagatttatgctccttatgatgccctaacttggaaggttgttctagggacaggccgggcagtgtccccacacacaccttagagtcgaaggccccagggccccgctgtcacttgcccaaaagatcccttccggcaggtaagggactaccaatgcttacgtcaaaacagcagaatcggctttgcagtgcactttggggagcagatattaacttatttttgtgttggacagtagtgaaatcttgtgatttttaatcgctttgataatacttccaaattttatgatttttctgaaggaaataatgcaaacattttaaatatgtttctccccctttccaaaaactgttaaactaatgagcaagtaacactaactttgaatgtctctacaatacccgttgataactcagtggagccaggctttggggtagcggccctgagcttgcagggtttctcgccactggggctgaccacgcccccagctgtgaccgtgggtgtggctggctctcggccctgcccagctttgttctgaggacgtggtgacttcctgaacatcagcttcaatcctccatcattaatgtgaagcaaaacacaaaaaccgccccaatccctcaggattccttggcatccgaaaccagcatctgcacctaaacccatacccacccgtgtgcgcccacagggggatgtgtccgaatgggcagcttaaaatgtggtcacctgtgggggaaactcttcaggcacctgaagtgagaacccagctgtccgtcctcaggccggcctttcttccggcgacacccgtccatggctggctgggtccccttcgcagtgtttgtctgtcttgacatctaaaccccggcgtgtgcagtgcccatcttccaggactaccttattttccagaattaaacctgttttataattcaagttaatgcaaatgactgtcagttgccaaatatcttgatcctatgagtgtagttgatgactgtttgttagtcagtagagtaaaatgctgtgtccacggggtgtcacagcctcaccataccctgttgaggtgtgaaatgccccgtcagaaattaaatacaaacttaaatgtgcctattggtgtctaaacttcatacaatgtaaggtcagattccttttaggaatactgggtgctgtcaccaggtttgatagttagacttaaaaacttgaaattcactttttggggggagggatatactgaaatagagagttgagacttgccagttgggggaaaatagcatttaaaatggaaagctgtgtttggaaaattgtgtatgagtatttttgtattaaaaacattttaaaggcttttttcttaa

SEQ ID NO: 440507 - DNA, 11056 bp, Homo sapiens
  misc_feature (12)..(12): n is a, c, g, or t
  misc_feature (86)..(86): n is a, c, g, or t
gggaggcgcggnggcggggtcggcgccgcgcgcgagagcctcggcctggccgcgctgcgcccgccgccgccgccgccccctccccncctgggccctaccgccgcacggccccggccccctcccagcctgccgctccggagagccgcccgccgaggatgcgacgcaccgcagtgttctaagaacggaagcatctgggctggatggaatttagcatcaagcagagtcccctttctgttcagagtgttgtaaagtgcataaagatgaagcaggcaccagaaatcctcggcagtgccaacgggaagactccgagctgcgaggtgaaccgcgagtgttctgtgttcctcagcaaagcccagctctccagtagcctgcaggagggggtcatgcagaagtttaacggccacgacgccctgccctttattccagccgacaagctgaaagatcttacttcccgggtgtttaatggagaacccggcgcacacgatgccaaactgcgttttgagtcccaggaaatgaaagggattgggacaccccctaacactacccctatcaaaaatggctctccagaaattaagctgaaaatcaccaaaacatacatgaatgggaagcctctctttgaatcttccatttgtggtgacagtgctgctgatgtgtctcagtcagaagaaaatggacaaaaaccagaaaacaaggcgagaaggaacaggaagaggagcataaaatatgactccttgctggagcagggccttgtcgaagcagctcttgtgtctaagatctcaagtccttcagataaaaagattccagctaagaaagagtcttgtccaaacactggaagagacaaagaccacctgttgaaatacaacgttggtgatttggtgtggtccaaagtgtcgggttacccttggtggccttgcatggtttctgcagatccactccttcacagctataccaaacttaaaggtattttcaaatcaaagaagtttgaacacttaaaaacaagtcaaattgtactgaaagattaatagtgaaaaatcatcccctgccttcctctctcctccccagaggtcagaaaaagagtgcacgccagtatcacgtacagttctttggtgacgccccagaaagagcttggatatttgagaagagcctcgtagcttttgaaggagaaggacagtttgaaaaattatgccaggaaagtgccaagcaggcacccacgaaagctgagaaaattaagctattgaaaccaatttcagggaaattgagggcccagtgggaaatgggcattgttcaagcagaagaagctgcaagcatgtcagtggaggagcggaaagccaagttcacctttctctatgtgggggaccagcttcatctcaaccctcaagtagccaaggaggctggcattgctgcagagtctttgggagaaatggcagaatcctcaggagtcagtgaagaagctgctgaaaaccccaagtctgtgagagaagagtgcattcccatgaagagaaggcggagggccaaactgtgtagctctgcagagaccctggagagtcaccccgacatagggaagagtactcctcaaaagacggcagaggctgaccccagaagaggagtagggtctcctcctgggaggaagaagaccacagtctccatgccacgaagcaggaagggagatgcagcatcccagtttttggtcttctgtcaaaaacacagggatgaggtggtagctgagcacccagatgcttcaggtgaggagattgaagagctgctcaggtcacagtggagtctgctgagtgagaagcagagagcacgctacaacaccaagtttgccctggtggcccctgtccaggctgaagaagactctggtaatgtaaatgggaaaaaaagaaaccacacaaagaggatacaggaccctacagaagatgctgaagctgaggacacacccaggaaaagactcaggacggacaagcacagtcttcggaagagagacacaatcactgacaaaacggccagaacaagctcttacaaggccatggaggcagcctcctcgctcaagagccaggcagcaacgaaaaatctgtctgatgcatgtaaaccactgaagaagcgaaatcgggcttccacggcagcatcttcagctcttgggtttagcaaaagttcatctccttctgcatccttaactgagaatgagggtaaaataataataataacgataaccatggcattggtatgaaggccatttagctgcccacgctgcagtgtgagtaatgctcagacttcataagcgcagcattggtgctcactgccagtgcagatgttttagggcctcttggctaactcagattcatgaaatggacaaacagtgcactatgttagtttatttgagcactttttatacacacgcacacagtgtctgtgtacatgtacagatatacttcagtcttgatgcagtttcatagttcttaaaatctgtctgaagaatgttgtgttctgtgtagccctcacactgtaagagttcacatggaagtaagtctgcgttggttctgaaagggcacagtgtcagttgagctgacatatactgggtggggtggaaggcgactcacacaccacacctgattcctgttgcttccagacctaggctcatggaggaagccaaagatttctttgttctcatgcatttcatggctttggtcctttaaattctggcacatttttagttacttgagtgttgaggtgagtcagaactaccattgtaatatgactcctgtgttctggacttgcagagtacatgatagcaaaataaagccatttggggctgctgcctgccatcattgtaacatgacacttagactttattatcaaacctaaattttttgccgttgccaaaaacaacaaatagccacagaacgtaggtgtgacacttttttgttcggaggtagttttggtttcctgatttttagggattaccttcatagagctttggagttttaatttcttgttatttggttctccgtgatgctgtttttctcattgtagacatgggtcctgtttttgtcatgtttatgaggagatgataactgggggcccttttggaacagggtagtgaggcaagggttggacaggccccttactcttgctgagtcagaaggcggcacttctggccaggtctctgccatggtccccaggaaggatggggtgtgcctcagttgtttccactcattagaggagtgtaggccttccagtgcaggaaggtcagggacctaggcaacctgggcggggctcatagagctctgcggcttgccactctgaatcctcagcgaccactcctccgagtgggattttctgcagggactcaaaccaactcagtggtggtcgagacctgttcacggatggtgggactggggctgctttacagtttgatacgtgtagataattaagcattttgtgatgtttggacacactggagaaaaggcagtaagaattatttactgaaacatctaggagcttactgaaatatgaaaaggcaaattttatacaaattatttttcctttttcctttctttcttgtccaagttcaggttaaaatcttagaaaattaaatgaaaggtcatttacagttccaaagaagaatattaaacatttttcacttaagttgagatttttgctttaaagagcttttaatgagtttttctgttatcataattttggtccggttattcacttgagttgttgcttatactgttgtcaggtacagtagagagaacatggagcctgctgagatcttctctgttattcctgatcctaagtcatgtatatcgaaggctttgatttagagtaatgcatgaggccagtgtagcggggtcgaggcctgcccatgagtcaggggagctcagtctccctggcctaggcagttgtcctgaccttgagaagacatagatgaagcattttatcatcattagacttaaattttaattcttcagaatgtcagaagttgataggttgttaaatacatttatataatacattaaatatgtgaaattaatacaccttcctacattttgaaggtgatgcatagatcccatagtgtgcatcatgttccttatatgaaaacgtttaaattactgggtcttttccattaaactacttttgtatggcttagataaatcttccattagtgttcatttttatagaattatgctgttaaaactactttaggtgaacaaataaacttgtctattatatattaacgcgactgaactacagtaaatgtttgtgatgtttccaatgctgaatgcctgttagcatatgaggcaaagtgtagtgttataaaaaacagcctgttgactgctgggcccgattctgatatgagttaggtgaccatgagaattgctgtttgaggtccacactgacacacacccattgggtcacaccccctttgcatgtttgtatttcctccctttcatcacatttgtttgaaataaggtacttttatagggttggtatttcagaacactttaggtcatgttgtagtttaaattcttcttgaaaaaggtatatgtgataaataaaaatttttattggaataattattacatggtactacatcaccctgaggaagagaataaattaaaattacacacttgcatgacaaaggcctgtgaaggaattaatgtgatttaagtgttttgtaacttcattttttattcctttagtagagcaaattcttatttttttcgccttcactggtaacagcttttgtgggagcccacaccagtcaagttggatttgaacccagctgctctgtactgcacttagaatgatgtaatattccaggatgctgctgcaggtggcgtatcatcgtacacactcagtgacatttctatcacaatcattttatggaagatgtgtgataatctgtttttactggtattaataaacacatacaatgaagaaaacagataacaaattttaagaccaaggtctcggacagcccgggagacgagccctcggagtccccatacgaaagtgcagacgaaacacaaactgaagtatctgtctcatccaaaaagtctgagcgaggagtgactgccaaaaaggagtatgtgtgccagctgtgtgagaagccgggcagcctcctgctctgtgaaggaccctgctgcggagctttccacctcgcctgccttgggctttcccggaggccagaagggaggttcacctgcagcgagtgtgcctcaggtgtcgcccggcacagtctggggtctgtgaggatgatgagaggacacctgcacagccgtggcccttcctgcctactcaccgggcccaaggagtctcctatctcacgtcagaacacttcctgggtcaggaagacacctggagagtctcccaggccatggcagccccacagcagcacctcacttatgggagtgtctgtctgcctgcccagaatgataagtgactgctccaccactggccagctgctctcaaggaggaaaggcctcttttcataggagccccttctttcaagcttcttgccagttagactgggcctccccagccaggctgcctagtaagattctcctgtatttcaggtgaagctggagctcagatcgcagcaaggtaatccttgatggctggatctttttgctggagaatgcttggactagtgagcaaggttggaaacagggccaggtgctttagcagcgtggctgcctctgaagaggagttgcttgattttagtggctcagaactgcaatttaattcttgttctttgcacctctctctccaccccttctttaactttttgttagggattcactcatgtttcgtgtgtaaagagagcaagacagatgttaagcgctgtgtggtaactcagtgtggaaaattttaccatgaggcttgtgtgaaaaaataccctctgactgtatttgagagccgaggtttccgctgccccctccacagctgtgtgagctgccatgcttccaacccttcaaacccaaggccgtcaaaaggtaaaatgatgcggtgtgtccgctgccccgttgcctatcacagcggggatgcttgtctggcagcaggatgctcagtgatcgcctccaacagcatcatctgcactgcccacttcactgctcggaaggggaagcgacaccacgcccacgtcaacgtgagctggtgcttcgtgtgctccaaaggggggagccttctgtgctgtgagtcctgcccagcggccttccaccctgactgcctgaacatcgagatgcctgacggcagctggttctgcaatgactgcagggctgggaagaagctgcacttccaggatatcatttgggtgaaacttgggaactacagatggtggccggcagaagtttgccatcccaaaaatgttcccccaaatattcagaaaatgaagcacgagattggagaattccctgtgtttttctttgggtctaaagattattactggacgcatcaggcgcgagtgttcccgtacatggagggggaccggggcagccgctaccagggggtcagagggatcggaagagtcttcaaaaacgcactgcaagaagctgaagctcgttttcgtgaaattaagcttcagagggaagcccgagaaacacaggagagcgagcgcaagcccccaccatacaagcacatcaaggtgaataagccttacgggaaagtccagatctacacagcggatatttcagaaatccctaagtgcaactgcaagcccacagatgagaatccttgtggctttgattcggagtgtctgaacaggatgctgatgtttgagtgccacccgcaggtgtgtcccgcgggcgagttctgccagaaccagtgcttcaccaagcgccagtacccagagaccaagatcatcaagacagatggcaaagggtggggcctggtcgccaagagggacatcagaaagggagaatttgttaacgagtacgttggggagctgatcgacgaggaggagtgcatggcgagaatcaagcacgcacacgagaacgacatcacccacttctacatgctcactatagacaaggaccgtataatagacgctggccccaaaggaaactactctcgatttatgaatcacagctgccagcccaactgtgagaccctcaagtggacagtgaatggggacactcgtgtgggcctgtttgccgtctgtgacattcctgcagggacggagctgacttttaactacaacctcgattgtctgggcaatgaaaaaacggtctgccggtgtggagcctccaattgcagtggattcctcggggatagaccaaagacctcgacgaccctttcatcagaggaaaagggcaaaaagaccaagaagaaaacgaggcggcgcagagcaaaaggggaagggaagaggcagtcagaggacgagtgcttccgctgcggtgatggcgggcagctggtgctgtgtgaccgcaagttctgcaccaaggcctaccacctgtcctgcctgggccttggcaagcggcccttcgggaagtgggaatgtccttggcatcattgtgacgtgtgtggcaaaccttcgacttcattttgccacctctgccccaattcgttctgtaaggagcaccaggacgggacagccttcagctgcaccccggacgggcggtcctactgctgtgagcatgacttaggggcggcatcggtcagaagcaccaagactgagaagccccccccagagccagggaagccgaaggggaagaggcggcggcggaggggctggcggagagtcacagagggcaaatagcgccaggcggccgcttggccggatccaggggcggtgcagggcggccggccctgcctgcgggagagggcgagcatgaactggcccggaggacccagctcgagccgccaggacacagacgtacaggcctcctcgggagggagcgcctccccaccactgagccatcctcagcagcgtccgctgcgtctgcactgatgaccgtctgagcccagctcagcgttcctggacaaacagcctcactcctcagcgttaccgccacacttgaatttctccgaatgtcaaggttccctcccactctatttttttaggttaaagttaattggcatatggaatgttttaatctcctctgaaatgtgtagcgtaggcttttcccaagggtcgctagaaactcgtcttcgcgttgccccctttctggctctcagcgccgtcgccactcgggagaggctgggtgaggcccgtgtgaggactgaccctggattcctcgaaactgccattgtgatcattactctgctctttggaaatggctgtatcatttttttgtactaatgtgaattgttcctcagaaacgcttcttttccatcctagtgagaagctggccctgcaggtggtggcagcaatggtgttgtaagatttcctcccgtagttttttctcctcatggatttgaatgaaatgccaataacacgtccactttcaacgtgtagtttacgcggagcactttcgaggcctggccgggttgggcctacttctcacctgggcctatcttctgaactcgctaggttcttatcaacatttgggggataactttgtatatttttttcatttggcttttctttaccagtttctgatttttattctcaatatatttttgctaaacctatttcacaaatcaccaccgactgaagtgtgtgtttactgatgcggccctgagctccatggcgaaaggagtgactttgcagggcgtgagaccgcagtctgcttagagcacaggaagtgacaacttagggagccccgtagggcgctgcaggccccggggaccccagcacgtgggtctaaagagagacggagtctagctctcctgccacccagagtggcttccatctcagcactctgtgggtctggtgatggaagatgcagtctctgctgatcacatgtgccctctgccagggcacctactgagaggtgcggtcctgggggtggaggcctgcctggcaggtgtgcgtgcctcgtacgtgtgttatgggcactggtctaggccaggtatgacacccactctcctgtgagatttcactttagtttttaaaaggtccagttctacagagtgagacctatctatctgagtactacatatgttttaagacttggttctttttttgagggatccttgaccctgggaagtctggagcaccctgagaagggggcaccatgtgtgcctttgcccacgtgtcctgaggggctgcttgtctgggagggagggagagaacattcagcagcaggtgcttttttatggccttttcttaaaataacctaagggggacacatccatcttgcagagaagtttacagaactccccttgaaaactgctgctgaggctcctgttaaattttctgtggcatcttttatgccttggtaaaaactgcagtgtctttggacctgagagtggctactccgtggttttgtgacctgtaagcgtggggttcaggggtgtgtggccctgcagggtcccacgcctccctgagcactgactggaagtttcactggctggtggctgtcccttctcccatcagggtccccagcaaagttaactacacagaggacccaggggaaacgagctgtgtagccactgacttgctcgcgcggccgtggcctctgaggggcactcgccggttaagacagggtgggagtagtgctttccagttcagactctaacttctcccaaagtgtcctaagaaaatactggatcggctcatagatttatgctccttatgatgccctaacttggaaggttgttctagggacaggccgggcagtgtccccacacacaccttagagtcgaaggccccagggccccgctgtcacttgcccaaaagatcccttccggcaggtaagggactaccaatgcttacgtcaaaacagcagaatcggctttgcagtgcactttggggagcagatattaacttatttttgtgttggacagtagtgaaatcttgtgatttttaatcgctttgataatacttccaaattttatgatttttctgaaggaaataatgcaaacattttaaatatgtttctccccctttccaaaaactgttaaactaatgagcaagtaacactaactttgaatgtctctacaatacccgttgataactcagtggagccaggctttggggtagcggccctgagcttgcagggtttctcgccactggggctgaccacgcccccagctgtgaccgtgggtgtggctggctctcggccctgcccagctttgttctgaggacgtggtgacttcctgaacatcagcttcaatcctccatcattaatgtgaagcaaaacacaaaaaccgccccaatccctcaggattccttggcatccgaaaccagcatctgcacctaaacccatacccacccgtgtgcgcccacagggggatgtgtccgaatgggcagcttaaaatgtggtcacctgtgggggaaactcttcaggcacctgaagtgagaacccagctgtccgtcctcaggccggcctttcttccggcgacacccgtccatggctggctgggtccccttcgcagtgtttgtctgtcttgacatctaaaccccggcgtgtgcagtgcccatcttccaggactaccttattttccagaattaaacctgttttataattcaagttaatgcaaatgactgtcagttgccaaatatcttgatcctatgagtgtagttgatgactgtttgttagtcagtagagtaaaatgctgtgtccacggggtgtcacagcctcaccataccctgttgaggtgtgaaatgccccgtcagaaattaaatacaaacttaaatgtgcctattggtgtctaaacttcatacaatgtaaggtcagattccttttaggaatactgggtgctgtcaccaggtttgatagttagacttaaaaacttgaaattcactttttggggggagggatatactgaaatagagagttgagacttgccagttgggggaaaatagcatttaaaatggaaagctgtgtttggaaaattgtgtatgagtatttttgtattaaaaacattttaaaggcttttttcttaa

SEQ ID NO: 440508 - DNA, 8309 bp, Homo sapiens
  misc_feature (12)..(12): n is a, c, g, or t
  misc_feature (86)..(86): n is a, c, g, or t
gggaggcgcggnggcggggtcggcgccgcgcgcgagagcctcggcctggccgcgctgcgcccgccgccgccgccgccccctccccncctgggccctaccgccgcacggccccggccccctcccagcctgccgctccggagagccgcccgccgaggatgcgacgcaccgcagtgttctaagaacggaagcatctgggctggatggaatttagcatcaagcagagtcccctttctgttcagagtgttgtaaagtgcataaagatgaagcaggcaccagaaatcctcggcagtgccaacgggaagactccgagctgcgaggtgaaccgcgagtgttctgtgttcctcagcaaagcccagctctccagtagcctgcaggagggggtcatgcagaagtttaacggccacgacgccctgccctttattccagccgacaagctgaaagatcttacttcccgggtgtttaatggagaacccggcgcacacgatgccaaactgcgttttgagtcccaggaaatgaaagggattgggacaccccctaacactacccctatcaaaaatggctctccagaaattaagctgaaaatcaccaaaacatacatgaatgggaagcctctctttgaatcttccatttgtggtgacagtgctgctgatgtgtctcagtcagaagaaaatggacaaaaaccagaaaacaaggcgagaaggaacaggaagaggagcataaaatatgactccttgctggagcagggccttgtcgaagcagctcttgtgtctaagatctcaagtccttcagataaaaagattccagctaagaaagagtcttgtccaaacactggaagagacaaagaccacctgttgaaatacaacgttggtgatttggtgtggtccaaagtgtcgggttacccttggtggccttgcatggtttctgcagatccactccttcacagctataccaaacttaaaggtcagaaaaagagtgcacgccagtatcacgtacagttctttggtgacgccccagaaagagcttggatatttgagaagagcctcgtagcttttgaaggagaaggacagtttgaaaaattatgccaggaaagtgccaagcaggcacccacgaaagctgagaaaattaagctattgaaaccaatttcagggaaattgagggcccagtgggaaatgggcattgttcaagcagaagaagctgcaagcatgtcagtggaggagcggaaagccaagttcacctttctctatgtgggggaccagcttcatctcaaccctcaagtagccaaggaggctggcattgctgcagagtctttgggagaaatggcagaatcctcaggagtcagtgaagaagctgctgaaaaccccaagtctgtgagagaagagtgcattcccatgaagagaaggcggagggccaaactgtgtagctctgcagagaccctggagagtcaccccgacatagggaagagtactcctcaaaagacggcagaggctgaccccagaagaggagtagggtctcctcctgggaggaagaagaccacagtctccatgccacgaagcaggaagggagatgcagcatcccagtttttggtcttctgtcaaaaacacagggatgaggtggtagctgagcacccagatgcttcaggtgaggagattgaagagctgctcaggtcacagtggagtctgctgagtgagaagcagagagcacgctacaacaccaagtttgccctggtggcccctgtccaggctgaagaagactctggtaatgtaaatgggaaaaaaagaaaccacacaaagaggatacaggaccctacagaagatgctgaagctgaggacacacccaggaaaagactcaggacggacaagcacagtcttcggaagcaacgaaaaatctgtctgatgcatgtaaaccactgaagaagcgaaatcgggcttccacggcagcatcttcagctcttgggtttagcaaaagttcatctccttctgcatccttaactgagaatgagcttttgtgggagcccacaccagtcaagttggatttgaacccagctgctctgtactgcacttagaatgatgtaatattccaggatgctgctgcaggtggcgtatcatcgtacacactcagtgacatttctatcacaatcattttatggaagatgtgtgataatctgtttttactggtattaataaacacatacaatgaagaaaacagataacaaattttaagaccaaggtctcggacagcccgggagacgagccctcggagtccccatacgaaagtgcagacgaaacacaaactgaagtatctgtctcatccaaaaagtctgagcgaggagtgactgccaaaaaggagtatgtgtgccagctgtgtgagaagccgggcagcctcctgctctgtgaaggaccctgctgcggagctttccacctcgcctgccttgggctttcccggaggccagaagggaggttcacctgcagcgagtgtgcctcaggtgtcgcccggcacagtctggggtctgtgaggatgatgagaggacacctgcacagccgtggcccttcctgcctactcaccgggcccaaggagtctcctatctcacgtcagaacacttcctgggtcaggaagacacctggagagtctcccaggccatggcagccccacagcagcacctcacttatgggagtgtctgtctgcctgcccagaatgataagtgactgctccaccactggccagctgctctcaaggaggaaaggcctcttttcataggagccccttctttcaagcttcttgccagttagactgggcctccccagccaggctgcctagtaagattctcctgtatttcaggtgaagctggagctcagatcgcagcaaggtaatccttgatggctggatctttttgctggagaatgcttggactagtgagcaaggttggaaacagggccaggtgctttagcagcgtggctgcctctgaagaggagttgcttgattttagtggctcagaactgcaatttaattcttgttctttgcacctctctctccaccccttctttaactttttgttagggattcactcatgtttcgtgtgtaaagagagcaagacagatgttaagcgctgtgtggtaactcagtgtggaaaattttaccatgaggcttgtgtgaaaaaataccctctgactgtatttgagagccgaggtttccgctgccccctccacagctgtgtgagctgccatgcttccaacccttcaaacccaaggccgtcaaaaggtaaaatgatgcggtgtgtccgctgccccgttgcctatcacagcggggatgcttgtctggcagcaggatgctcagtgatcgcctccaacagcatcatctgcactgcccacttcactgctcggaaggggaagcgacaccacgcccacgtcaacgtgagctggtgcttcgtgtgctccaaaggggggagccttctgtgctgtgagtcctgcccagcggccttccaccctgactgcctgaacatcgagatgcctgacggcagctggttctgcaatgactgcagggctgggaagaagctgcacttccaggatatcatttgggtgaaacttgggaactacagatggtggccggcagaagtttgccatcccaaaaatgttcccccaaatattcagaaaatgaagcacgagattggagaattccctgtgtttttctttgggtctaaagattattactggacgcatcaggcgcgagtgttcccgtacatggagggggaccggggcagccgctaccagggggtcagagggatcggaagagtcttcaaaaacgcactgcaagaagctgaagctcgttttcgtgaaattaagcttcagagggaagcccgagaaacacaggagagcgagcgcaagcccccaccatacaagcacatcaaggtgaataagccttacgggaaagtccagatctacacagcggatatttcagaaatccctaagtgcaactgcaagcccacagatgagaatccttgtggctttgattcggagtgtctgaacaggatgctgatgtttgagtgccacccgcaggtgtgtcccgcgggcgagttctgccagaaccagtgcttcaccaagcgccagtacccagagaccaagatcatcaagacagatggcaaagggtggggcctggtcgccaagagggacatcagaaagggagaatttgttaacgagtacgttggggagctgatcgacgaggaggagtgcatggcgagaatcaagcacgcacacgagaacgacatcacccacttctacatgctcactatagacaaggaccgtataatagacgctggccccaaaggaaactactctcgatttatgaatcacagctgccagcccaactgtgagaccctcaagtggacagtgaatggggacactcgtgtgggcctgtttgccgtctgtgacattcctgcagggacggagctgacttttaactacaacctcgattgtctgggcaatgaaaaaacggtctgccggtgtggagcctccaattgcagtggattcctcggggatagaccaaagacctcgacgaccctttcatcagaggaaaagggcaaaaagaccaagaagaaaacgaggcggcgcagagcaaaaggggaagggaagaggcagtcagaggacgagtgcttccgctgcggtgatggcgggcagctggtgctgtgtgaccgcaagttctgcaccaaggcctaccacctgtcctgcctgggccttggcaagcggcccttcgggaagtgggaatgtccttggcatcattgtgacgtgtgtggcaaaccttcgacttcattttgccacctctgccccaattcgttctgtaaggagcaccaggacgggacagccttcagctgcaccccggacgggcggtcctactgctgtgagcatgacttaggggcggcatcggtcagaagcaccaagactgagaagccccccccagagccagggaagccgaaggggaagaggcggcggcggaggggctggcggagagtcacagagggcaaatagcgccaggcggccgcttggccggatccaggggcggtgcagggcggccggccctgcctgcgggagagggcgagcatgaactggcccggaggacccagctcgagccgccaggacacagacgtacaggcctcctcgggagggagcgcctccccaccactgagccatcctcagcagcgtccgctgcgtctgcactgatgaccgtctgagcccagctcagcgttcctggacaaacagcctcactcctcagcgttaccgccacacttgaatttctccgaatgtcaaggttccctcccactctatttttttaggttaaagttaattggcatatggaatgttttaatctcctctgaaatgtgtagcgtaggcttttcccaagggtcgctagaaactcgtcttcgcgttgccccctttctggctctcagcgccgtcgccactcgggagaggctgggtgaggcccgtgtgaggactgaccctggattcctcgaaactgccattgtgatcattactctgctctttggaaatggctgtatcatttttttgtactaatgtgaattgttcctcagaaacgcttcttttccatcctagtgagaagctggccctgcaggtggtggcagcaatggtgttgtaagatttcctcccgtagttttttctcctcatggatttgaatgaaatgccaataacacgtccactttcaacgtgtagtttacgcggagcactttcgaggcctggccgggttgggcctacttctcacctgggcctatcttctgaactcgctaggttcttatcaacatttgggggataactttgtatatttttttcatttggcttttctttaccagtttctgatttttattctcaatatatttttgctaaacctatttcacaaatcaccaccgactgaagtgtgtgtttactgatgcggccctgagctccatggcgaaaggagtgactttgcagggcgtgagaccgcagtctgcttagagcacaggaagtgacaacttagggagccccgtagggcgctgcaggccccggggaccccagcacgtgggtctaaagagagacggagtctagctctcctgccacccagagtggcttccatctcagcactctgtgggtctggtgatggaagatgcagtctctgctgatcacatgtgccctctgccagggcacctactgagaggtgcggtcctgggggtggaggcctgcctggcaggtgtgcgtgcctcgtacgtgtgttatgggcactggtctaggccaggtatgacacccactctcctgtgagatttcactttagtttttaaaaggtccagttctacagagtgagacctatctatctgagtactacatatgttttaagacttggttctttttttgagggatccttgaccctgggaagtctggagcaccctgagaagggggcaccatgtgtgcctttgcccacgtgtcctgaggggctgcttgtctgggagggagggagagaacattcagcagcaggtgcttttttatggccttttcttaaaataacctaagggggacacatccatcttgcagagaagtttacagaactccccttgaaaactgctgctgaggctcctgttaaattttctgtggcatcttttatgccttggtaaaaactgcagtgtctttggacctgagagtggctactccgtggttttgtgacctgtaagcgtggggttcaggggtgtgtggccctgcagggtcccacgcctccctgagcactgactggaagtttcactggctggtggctgtcccttctcccatcagggtccccagcaaagttaactacacagaggacccaggggaaacgagctgtgtagccactgacttgctcgcgcggccgtggcctctgaggggcactcgccggttaagacagggtgggagtagtgctttccagttcagactctaacttctcccaaagtgtcctaagaaaatactggatcggctcatagatttatgctccttatgatgccctaacttggaaggttgttctagggacaggccgggcagtgtccccacacacaccttagagtcgaaggccccagggccccgctgtcacttgcccaaaagatcccttccggcaggtaagggactaccaatgcttacgtcaaaacagcagaatcggctttgcagtgcactttggggagcagatattaacttatttttgtgttggacagtagtgaaatcttgtgatttttaatcgctttgataatacttccaaattttatgatttttctgaaggaaataatgcaaacattttaaatatgtttctccccctttccaaaaactgttaaactaatgagcaagtaacactaactttgaatgtctctacaatacccgttgataactcagtggagccaggctttggggtagcggccctgagcttgcagggtttctcgccactggggctgaccacgcccccagctgtgaccgtgggtgtggctggctctcggccctgcccagctttgttctgaggacgtggtgacttcctgaacatcagcttcaatcctccatcattaatgtgaagcaaaacacaaaaaccgccccaatccctcaggattccttggcatccgaaaccagcatctgcacctaaacccatacccacccgtgtgcgcccacagggggatgtgtccgaatgggcagcttaaaatgtggtcacctgtgggggaaactcttcaggcacctgaagtgagaacccagctgtccgtcctcaggccggcctttcttccggcgacacccgtccatggctggctgggtccccttcgcagtgtttgtctgtcttgacatctaaaccccggcgtgtgcagtgcccatcttccaggactaccttattttccagaattaaacctgttttataattcaagttaatgcaaatgactgtcagttgccaaatatcttgatcctatgagtgtagttgatgactgtttgttagtcagtagagtaaaatgctgtgtccacggggtgtcacagcctcaccataccctgttgaggtgtgaaatgccccgtcagaaattaaatacaaacttaaatgtgcctattggtgtctaaacttcatacaatgtaaggtcagattccttttaggaatactgggtgctgtcaccaggtttgatagttagacttaaaaacttgaaattcactttttggggggagggatatactgaaatagagagttgagacttgccagttgggggaaaatagcatttaaaatggaaagctgtgtttggaaaattgtgtatgagtatttttgtattaaaaacattttaaaggcttttttcttaa

SEQ ID NO: 440509 - DNA, 10797 bp, Homo sapiens
agagatgggtctcgccatcaccatgttgcccagtctggtctccaactcctgggctcaagcgatcctcctgccttggtctcccaaagtgctgggattacaggtgtgagcccccacacccggcctgagtgagtgggttctgaatggtgactgttgttgtccatagccttccccctgcttctgagagtggagtccctcccctcatgttggagacctcccaaggtccatgtggtcctataggggctgttcagcctccctagccccttaacgtgtcaggtaatactgtatatattccatgaaatgtgaataattagttatataattcctaagcacttattttaaaaaacagcaatgtgatgcttaactcttcccacctctgttcctgtcccccttagaaaaccactgataactctttttttttttgagacggagtcttgccctgtcgcccaggctggagtgtagtggcctgatctcggctcggctcattgtaacctccgcctcgggtttgagcgattctcctgcctcagcctcctgagtagctgggattataggcgtgcaccaccacgcctggctaattttttgtatctttagtagggacgggtttcaccatgttggccagagtggtcttgaactcctgaccttgtgatccgctcgcctcagcctcccaaagtgctgggattacaggcatgagccaccgtgcctgtcctagaaccactggtaactcttaactgctgtctgcttttctgtggagactgcgggttgcagacaccagcagccccctattgctgcacgtcaggtgtcctccacctcagtactgtggacatctcgggccgcatagccctgttgcgcgggcatcctgtgcgttgcaggagatgcagcagcatccatgaccgcaacccatcagagtgttctaagaacggaagcatctgggctggatggaatttagcatcaagcagagtcccctttctgttcagagtgttgtaaagtgcataaagatgaagcaggcaccagaaatcctcggcagtgccaacgggaagactccgagctgcgaggtgaaccgcgagtgttctgtgttcctcagcaaagcccagctctccagtagcctgcaggagggggtcatgcagaagtttaacggccacgacgccctgccctttattccagccgacaagctgaaagatcttacttcccgggtgtttaatggagaacccggcgcacacgatgccaaactgcgttttgagtcccaggaaatgaaagggattgggacaccccctaacactacccctatcaaaaatggctctccagaaattaagctgaaaatcaccaaaacatacatgaatgggaagcctctctttgaatcttccatttgtggtgacagtgctgctgatgtgtctcagtcgaagcaggaagggagatgcagcatcccagtttttggtcttctgtcaaaaacacagggatgaggtggtagctgagcacccagatgcttcaggtgaggagattgaagagctgctcaggtcacagtggagtctgctgagtgagaagcagagagcacgctacaacaccaagtttgccctggtggcccctgtccaggctgaagaagactctggtaatgtaaatgggaaaaaaagaaaccacacaaagaggatacaggaccctacagaagatgctgaagctgaggacacacccaggaaaagactcaggacggacaagcacagtcttcggaagagagacacaatcactgacaaaacggccagaacaagctcttacaaggccatggaggcagcctcctcgctcaagagccaggcagcaacgaaaaatctgtctgatgcatgtaaaccactgaagaagcgaaatcgggcttccacggcagcatcttcagctcttgggtttagcaaaagttcatctccttctgcatccttaactgagaatgagggtaaaataataataataacgataaccatggcattggtatgaaggccatttagctgcccacgctgcagtgtgagtaatgctcagacttcataagcgcagcattggtgctcactgccagtgcagatgttttagggcctcttggctaactcagattcatgaaatggacaaacagtgcactatgttagtttatttgagcactttttatacacacgcacacagtgtctgtgtacatgtacagatatacttcagtcttgatgcagtttcatagttcttaaaatctgtctgaagaatgttgtgttctgtgtagccctcacactgtaagagttcacatggaagtaagtctgcgttggttctgaaagggcacagtgtcagttgagctgacatatactgggtggggtggaaggcgactcacacaccacacctgattcctgttgcttccagacctaggctcatggaggaagccaaagatttctttgttctcatgcatttcatggctttggtcctttaaattctggcacatttttagttacttgagtgttgaggtgagtcagaactaccattgtaatatgactcctgtgttctggacttgcagagtacatgatagcaaaataaagccatttggggctgctgcctgccatcattgtaacatgacacttagactttattatcaaacctaaattttttgccgttgccaaaaacaacaaatagccacagaacgtaggtgtgacacttttttgttcggaggtagttttggtttcctgatttttagggattaccttcatagagctttggagttttaatttcttgttatttggttctccgtgatgctgtttttctcattgtagacatgggtcctgtttttgtcatgtttatgaggagatgataactgggggcccttttggaacagggtagtgaggcaagggttggacaggccccttactcttgctgagtcagaaggcggcacttctggccaggtctctgccatggtccccaggaaggatggggtgtgcctcagttgtttccactcattagaggagtgtaggccttccagtgcaggaaggtcagggacctaggcaacctgggcggggctcatagagctctgcggcttgccactctgaatcctcagcgaccactcctccgagtgggattttctgcagggactcaaaccaactcagtggtggtcgagacctgttcacggatggtgggactggggctgctttacagtttgatacgtgtagataattaagcattttgtgatgtttggacacactggagaaaaggcagtaagaattatttactgaaacatctaggagcttactgaaatatgaaaaggcaaattttatacaaattatttttcctttttcctttctttcttgtccaagttcaggttaaaatcttagaaaattaaatgaaaggtcatttacagttccaaagaagaatattaaacatttttcacttaagttgagatttttgctttaaagagcttttaatgagtttttctgttatcataattttggtccggttattcacttgagttgttgcttatactgttgtcaggtacagtagagagaacatggagcctgctgagatcttctctgttattcctgatcctaagtcatgtatatcgaaggctttgatttagagtaatgcatgaggccagtgtagcggggtcgaggcctgcccatgagtcaggggagctcagtctccctggcctaggcagttgtcctgaccttgagaagacatagatgaagcattttatcatcattagacttaaattttaattcttcagaatgtcagaagttgataggttgttaaatacatttatataatacattaaatatgtgaaattaatacaccttcctacattttgaaggtgatgcatagatcccatagtgtgcatcatgttccttatatgaaaacgtttaaattactgggtcttttccattaaactacttttgtatggcttagataaatcttccattagtgttcatttttatagaattatgctgttaaaactactttaggtgaacaaataaacttgtctattatatattaacgcgactgaactacagtaaatgtttgtgatgtttccaatgctgaatgcctgttagcatatgaggcaaagtgtagtgttataaaaaacagcctgttgactgctgggcccgattctgatatgagttaggtgaccatgagaattgctgtttgaggtccacactgacacacacccattgggtcacaccccctttgcatgtttgtatttcctccctttcatcacatttgtttgaaataaggtacttttatagggttggtatttcagaacactttaggtcatgttgtagtttaaattcttcttgaaaaaggtatatgtgataaataaaaatttttattggaataattattacatggtactacatcaccctgaggaagagaataaattaaaattacacacttgcatgacaaaggcctgtgaaggaattaatgtgatttaagtgttttgtaacttcattttttattcctttagtagagcaaattcttatttttttcgccttcactggtaacagcttttgtgggagcccacaccagtcaagttggatttgaacccagctgctctgtactgcacttagaatgatgtaatattccaggatgctgctgcaggtggcgtatcatcgtacacactcagtgacatttctatcacaatcattttatggaagatgtgtgataatctgtttttactggtattaataaacacatacaatgaagaaaacagataacaaattttaagaccaaggtctcggacagcccgggagacgagccctcggagtccccatacgaaagtgcagacgaaacacaaactgaagtatctgtctcatccaaaaagtctgagcgaggagtgactgccaaaaaggagtatgtgtgccagctgtgtgagaagccgggcagcctcctgctctgtgaaggaccctgctgcggagctttccacctcgcctgccttgggctttcccggaggccagaagggaggttcacctgcagcgagtgtgcctcaggtgtcgcccggcacagtctggggtctgtgaggatgatgagaggacacctgcacagccgtggcccttcctgcctactcaccgggcccaaggagtctcctatctcacgtcagaacacttcctgggtcaggaagacacctggagagtctcccaggccatggcagccccacagcagcacctcacttatgggagtgtctgtctgcctgcccagaatgataagtgactgctccaccactggccagctgctctcaaggaggaaaggcctcttttcataggagccccttctttcaagcttcttgccagttagactgggcctccccagccaggctgcctagtaagattctcctgtatttcaggtgaagctggagctcagatcgcagcaaggtaatccttgatggctggatctttttgctggagaatgcttggactagtgagcaaggttggaaacagggccaggtgctttagcagcgtggctgcctctgaagaggagttgcttgattttagtggctcagaactgcaatttaattcttgttctttgcacctctctctccaccccttctttaactttttgttagggattcactcatgtttcgtgtgtaaagagagcaagacagatgttaagcgctgtgtggtaactcagtgtggaaaattttaccatgaggcttgtgtgaaaaaataccctctgactgtatttgagagccgaggtttccgctgccccctccacagctgtgtgagctgccatgcttccaacccttcaaacccaaggccgtcaaaaggtaaaatgatgcggtgtgtccgctgccccgttgcctatcacagcggggatgcttgtctggcagcaggatgctcagtgatcgcctccaacagcatcatctgcactgcccacttcactgctcggaaggggaagcgacaccacgcccacgtcaacgtgagctggtgcttcgtgtgctccaaaggggggagccttctgtgctgtgagtcctgcccagcggccttccaccctgactgcctgaacatcgagatgcctgacggcagctggttctgcaatgactgcagggctgggaagaagctgcacttccaggatatcatttgggtgaaacttgggaactacagatggtggccggcagaagtttgccatcccaaaaatgttcccccaaatattcagaaaatgaagcacgagattggagaattccctgtgtttttctttgggtctaaagattattactggacgcatcaggcgcgagtgttcccgtacatggagggggaccggggcagccgctaccagggggtcagagggatcggaagagtcttcaaaaacgcactgcaagaagctgaagctcgttttcgtgaaattaagcttcagagggaagcccgagaaacacaggagagcgagcgcaagcccccaccatacaagcacatcaaggtgaataagccttacgggaaagtccagatctacacagcggatatttcagaaatccctaagtgcaactgcaagcccacagatgagaatccttgtggctttgattcggagtgtctgaacaggatgctgatgtttgagtgccacccgcaggtgtgtcccgcgggcgagttctgccagaaccagtgcttcaccaagcgccagtacccagagaccaagatcatcaagacagatggcaaagggtggggcctggtcgccaagagggacatcagaaagggagaatttgttaacgagtacgttggggagctgatcgacgaggaggagtgcatggcgagaatcaagcacgcacacgagaacgacatcacccacttctacatgctcactatagacaaggaccgtataatagacgctggccccaaaggaaactactctcgatttatgaatcacagctgccagcccaactgtgagaccctcaagtggacagtgaatggggacactcgtgtgggcctgtttgccgtctgtgacattcctgcagggacggagctgacttttaactacaacctcgattgtctgggcaatgaaaaaacggtctgccggtgtggagcctccaattgcagtggattcctcggggatagaccaaagacctcgacgaccctttcatcagaggaaaagggcaaaaagaccaagaagaaaacgaggcggcgcagagcaaaaggggaagggaagaggcagtcagaggacgagtgcttccgctgcggtgatggcgggcagctggtgctgtgtgaccgcaagttctgcaccaaggcctaccacctgtcctgcctgggccttggcaagcggcccttcgggaagtgggaatgtccttggcatcattgtgacgtgtgtggcaaaccttcgacttcattttgccacctctgccccaattcgttctgtaaggagcaccaggacgggacagccttcagctgcaccccggacgggcggtcctactgctgtgagcatgacttaggggcggcatcggtcagaagcaccaagactgagaagccccccccagagccagggaagccgaaggggaagaggcggcggcggaggggctggcggagagtcacagagggcaaatagcgccaggcggccgcttggccggatccaggggcggtgcagggcggccggccctgcctgcgggagagggcgagcatgaactggcccggaggacccagctcgagccgccaggacacagacgtacaggcctcctcgggagggagcgcctccccaccactgagccatcctcagcagcgtccgctgcgtctgcactgatgaccgtctgagcccagctcagcgttcctggacaaacagcctcactcctcagcgttaccgccacacttgaatttctccgaatgtcaaggttccctcccactctatttttttaggttaaagttaattggcatatggaatgttttaatctcctctgaaatgtgtagcgtaggcttttcccaagggtcgctagaaactcgtcttcgcgttgccccctttctggctctcagcgccgtcgccactcgggagaggctgggtgaggcccgtgtgaggactgaccctggattcctcgaaactgccattgtgatcattactctgctctttggaaatggctgtatcatttttttgtactaatgtgaattgttcctcagaaacgcttcttttccatcctagtgagaagctggccctgcaggtggtggcagcaatggtgttgtaagatttcctcccgtagttttttctcctcatggatttgaatgaaatgccaataacacgtccactttcaacgtgtagtttacgcggagcactttcgaggcctggccgggttgggcctacttctcacctgggcctatcttctgaactcgctaggttcttatcaacatttgggggataactttgtatatttttttcatttggcttttctttaccagtttctgatttttattctcaatatatttttgctaaacctatttcacaaatcaccaccgactgaagtgtgtgtttactgatgcggccctgagctccatggcgaaaggagtgactttgcagggcgtgagaccgcagtctgcttagagcacaggaagtgacaacttagggagccccgtagggcgctgcaggccccggggaccccagcacgtgggtctaaagagagacggagtctagctctcctgccacccagagtggcttccatctcagcactctgtgggtctggtgatggaagatgcagtctctgctgatcacatgtgccctctgccagggcacctactgagaggtgcggtcctgggggtggaggcctgcctggcaggtgtgcgtgcctcgtacgtgtgttatgggcactggtctaggccaggtatgacacccactctcctgtgagatttcactttagtttttaaaaggtccagttctacagagtgagacctatctatctgagtactacatatgttttaagacttggttctttttttgagggatccttgaccctgggaagtctggagcaccctgagaagggggcaccatgtgtgcctttgcccacgtgtcctgaggggctgcttgtctgggagggagggagagaacattcagcagcaggtgcttttttatggccttttcttaaaataacctaagggggacacatccatcttgcagagaagtttacagaactccccttgaaaactgctgctgaggctcctgttaaattttctgtggcatcttttatgccttggtaaaaactgcagtgtctttggacctgagagtggctactccgtggttttgtgacctgtaagcgtggggttcaggggtgtgtggccctgcagggtcccacgcctccctgagcactgactggaagtttcactggctggtggctgtcccttctcccatcagggtccccagcaaagttaactacacagaggacccaggggaaacgagctgtgtagccactgacttgctcgcgcggccgtggcctctgaggggcactcgccggttaagacagggtgggagtagtgctttccagttcagactctaacttctcccaaagtgtcctaagaaaatactggatcggctcatagatttatgctccttatgatgccctaacttggaaggttgttctagggacaggccgggcagtgtccccacacacaccttagagtcgaaggccccagggccccgctgtcacttgcccaaaagatcccttccggcaggtaagggactaccaatgcttacgtcaaaacagcagaatcggctttgcagtgcactttggggagcagatattaacttatttttgtgttggacagtagtgaaatcttgtgatttttaatcgctttgataatacttccaaattttatgatttttctgaaggaaataatgcaaacattttaaatatgtttctccccctttccaaaaactgttaaactaatgagcaagtaacactaactttgaatgtctctacaatacccgttgataactcagtggagccaggctttggggtagcggccctgagcttgcagggtttctcgccactggggctgaccacgcccccagctgtgaccgtgggtgtggctggctctcggccctgcccagctttgttctgaggacgtggtgacttcctgaacatcagcttcaatcctccatcattaatgtgaagcaaaacacaaaaaccgccccaatccctcaggattccttggcatccgaaaccagcatctgcacctaaacccatacccacccgtgtgcgcccacagggggatgtgtccgaatgggcagcttaaaatgtggtcacctgtgggggaaactcttcaggcacctgaagtgagaacccagctgtccgtcctcaggccggcctttcttccggcgacacccgtccatggctggctgggtccccttcgcagtgtttgtctgtcttgacatctaaaccccggcgtgtgcagtgcccatcttccaggactaccttattttccagaattaaacctgttttataattcaagttaatgcaaatgactgtcagttgccaaatatcttgatcctatgagtgtagttgatgactgtttgttagtcagtagagtaaaatgctgtgtccacggggtgtcacagcctcaccataccctgttgaggtgtgaaatgccccgtcagaaattaaatacaaacttaaatgtgcctattggtgtctaaacttcatacaatgtaaggtcagattccttttaggaatactgggtgctgtcaccaggtttgatagttagacttaaaaacttgaaattcactttttggggggagggatatactgaaatagagagttgagacttgccagttgggggaaaatagcatttaaaatggaaagctgtgtttggaaaattgtgtatgagtatttttgtattaaaaacattttaaaggcttttttcttaa

SEQ ID NO: 440510 - DNA, 12047 bp, Homo sapiens
agagatgggtctcgccatcaccatgttgcccagtctggtctccaactcctgggctcaagcgatcctcctgccttggtctcccaaagtgctgggattacaggtgtgagcccccacacccggcctgagtgagtgggttctgaatggtgactgttgttgtccatagccttccccctgcttctgagagtggagtccctcccctcatgttggagacctcccaaggtccatgtggtcctataggggctgttcagcctccctagccccttaacgtgtcaggtaatactgtatatattccatgaaatgtgaataattagttatataattcctaagcacttattttaaaaaacagcaatgtgatgcttaactcttcccacctctgttcctgtcccccttagaaaaccactgataactctttttttttttgagacggagtcttgccctgtcgcccaggctggagtgtagtggcctgatctcggctcggctcattgtaacctccgcctcgggtttgagcgattctcctgcctcagcctcctgagtagctgggattataggcgtgcaccaccacgcctggctaattttttgtatctttagtagggacgggtttcaccatgttggccagagtggtcttgaactcctgaccttgtgatccgctcgcctcagcctcccaaagtgctgggattacaggcatgagccaccgtgcctgtcctagaaccactggtaactcttaactgagacaagatttcgccatgttgcccaggctggtctcgaacttctgagctcaagcgatctacctgcctcgtcctcccaaagtgttggaattgcaggtgtgagccactgcacccggcccttgcctcatgtttgaatgataatttacctgggcataaaattctggacacttgtggtggcacgagctgtctgcttttctgtggagactgcgggttgcagacaccagcagccccctattgctgcacgtcaggtgtcctccacctcagtactgtggacatctcgggccgcatagccctgttgcgcgggcatcctgtgcgttgcaggagatgcagcagcatccatgaccgcaacccatcagagtgttctaagaacggaagcatctgggctggatggaatttagcatcaagcagagtcccctttctgttcagagtgttgtaaagtgcataaagatgaagcaggcaccagaaatcctcggcagtgccaacgggaagactccgagctgcgaggtgaaccgcgagtgttctgtgttcctcagcaaagcccagctctccagtagcctgcaggagggggtcatgcagaagtttaacggccacgacgccctgccctttattccagccgacaagctgaaagatcttacttcccgggtgtttaatggagaacccggcgcacacgatgccaaactgcgttttgagtcccaggaaatgaaagggattgggacaccccctaacactacccctatcaaaaatggctctccagaaattaagctgaaaatcaccaaaacatacatgaatgggaagcctctctttgaatcttccatttgtggtgacagtgctgctgatgtgtctcagtcagaagaaaatggacaaaaaccagaaaacaaggcgagaaggaacaggaagaggagcataaaatatgactccttgctggagcagggccttgtcgaagcagctcttgtgtctaagatctcaagtccttcagataaaaagattccagctaagaaagagtcttgtccaaacactggaagagacaaagaccacctgttgaaatacaacgttggtgatttggtgtggtccaaagtgtcgggttacccttggtggccttgcatggtttctgcagatccactccttcacagctataccaaacttaaaggtcagaaaaagagtgcacgccagtatcacgtacagttctttggtgacgccccagaaagagcttggatatttgagaagagcctcgtagcttttgaaggagaaggacagtttgaaaaattatgccaggaaagtgccaagcaggcacccacgaaagctgagaaaattaagctattgaaaccaatttcagggaaattgagggcccagtgggaaatgggcattgttcaagcagaagaagctgcaagcatgtcagtggaggagcggaaagccaagttcacctttctctatgtgggggaccagcttcatctcaaccctcaagtagccaaggaggctggcattgctgcagagtctttgggagaaatggcagaatcctcaggagtcagtgaagaagctgctgaaaaccccaagtctgtgagagaagagtgcattcccatgaagagaaggcggagggccaaactgtgtagctctgcagagaccctggagagtcaccccgacatagggaagagtactcctcaaaagacggcagaggctgaccccagaagaggagtagggtctcctcctgggaggaagaagaccacagtctccatgccacgaagcaggaagggagatgcagcatcccagtttttggtcttctgtcaaaaacacagggatgaggtggtagctgagcacccagatgcttcaggtgaggagattgaagagctgctcaggtcacagtggagtctgctgagtgagaagcagagagcacgctacaacaccaagtttgccctggtggcccctgtccaggctgaagaagactctggtaatgtaaatgggaaaaaaagaaaccacacaaagaggatacaggaccctacagaagatgctgaagctgaggacacacccaggaaaagactcaggacggacaagcacagtcttcggaagagagacacaatcactgacaaaacggccagaacaagctcttacaaggccatggaggcagcctcctcgctcaagagccaggcagcaacgaaaaatctgtctgatgcatgtaaaccactgaagaagcgaaatcgggcttccacggcagcatcttcagctcttgggtttagcaaaagttcatctccttctgcatccttaactgagaatgagggtaaaataataataataacgataaccatggcattggtatgaaggccatttagctgcccacgctgcagtgtgagtaatgctcagacttcataagcgcagcattggtgctcactgccagtgcagatgttttagggcctcttggctaactcagattcatgaaatggacaaacagtgcactatgttagtttatttgagcactttttatacacacgcacacagtgtctgtgtacatgtacagatatacttcagtcttgatgcagtttcatagttcttaaaatctgtctgaagaatgttgtgttctgtgtagccctcacactgtaagagttcacatggaagtaagtctgcgttggttctgaaagggcacagtgtcagttgagctgacatatactgggtggggtggaaggcgactcacacaccacacctgattcctgttgcttccagacctaggctcatggaggaagccaaagatttctttgttctcatgcatttcatggctttggtcctttaaattctggcacatttttagttacttgagtgttgaggtgagtcagaactaccattgtaatatgactcctgtgttctggacttgcagagtacatgatagcaaaataaagccatttggggctgctgcctgccatcattgtaacatgacacttagactttattatcaaacctaaattttttgccgttgccaaaaacaacaaatagccacagaacgtaggtgtgacacttttttgttcggaggtagttttggtttcctgatttttagggattaccttcatagagctttggagttttaatttcttgttatttggttctccgtgatgctgtttttctcattgtagacatgggtcctgtttttgtcatgtttatgaggagatgataactgggggcccttttggaacagggtagtgaggcaagggttggacaggccccttactcttgctgagtcagaaggcggcacttctggccaggtctctgccatggtccccaggaaggatggggtgtgcctcagttgtttccactcattagaggagtgtaggccttccagtgcaggaaggtcagggacctaggcaacctgggcggggctcatagagctctgcggcttgccactctgaatcctcagcgaccactcctccgagtgggattttctgcagggactcaaaccaactcagtggtggtcgagacctgttcacggatggtgggactggggctgctttacagtttgatacgtgtagataattaagcattttgtgatgtttggacacactggagaaaaggcagtaagaattatttactgaaacatctaggagcttactgaaatatgaaaaggcaaattttatacaaattatttttcctttttcctttctttcttgtccaagttcaggttaaaatcttagaaaattaaatgaaaggtcatttacagttccaaagaagaatattaaacatttttcacttaagttgagatttttgctttaaagagcttttaatgagtttttctgttatcataattttggtccggttattcacttgagttgttgcttatactgttgtcaggtacagtagagagaacatggagcctgctgagatcttctctgttattcctgatcctaagtcatgtatatcgaaggctttgatttagagtaatgcatgaggccagtgtagcggggtcgaggcctgcccatgagtcaggggagctcagtctccctggcctaggcagttgtcctgaccttgagaagacatagatgaagcattttatcatcattagacttaaattttaattcttcagaatgtcagaagttgataggttgttaaatacatttatataatacattaaatatgtgaaattaatacaccttcctacattttgaaggtgatgcatagatcccatagtgtgcatcatgttccttatatgaaaacgtttaaattactgggtcttttccattaaactacttttgtatggcttagataaatcttccattagtgttcatttttatagaattatgctgttaaaactactttaggtgaacaaataaacttgtctattatatattaacgcgactgaactacagtaaatgtttgtgatgtttccaatgctgaatgcctgttagcatatgaggcaaagtgtagtgttataaaaaacagcctgttgactgctgggcccgattctgatatgagttaggtgaccatgagaattgctgtttgaggtccacactgacacacacccattgggtcacaccccctttgcatgtttgtatttcctccctttcatcacatttgtttgaaataaggtacttttatagggttggtatttcagaacactttaggtcatgttgtagtttaaattcttcttgaaaaaggtatatgtgataaataaaaatttttattggaataattattacatggtactacatcaccctgaggaagagaataaattaaaattacacacttgcatgacaaaggcctgtgaaggaattaatgtgatttaagtgttttgtaacttcattttttattcctttagtagagcaaattcttatttttttcgccttcactggtaacagcttttgtgggagcccacaccagtcaagttggatttgaacccagctgctctgtactgcacttagaatgatgtaatattccaggatgctgctgcaggtggcgtatcatcgtacacactcagtgacatttctatcacaatcattttatggaagatgtgtgataatctgtttttactggtattaataaacacatacaatgaagaaaacagataacaaattttaagaccaaggtaagataactaatcaaggccatttaatccgtcacattcatctcataatagaaacacgttcatattccagtggtcaatgtagatttcaagttgaaaggcagtccctttagttgggggctgtccagagctgcagcagggctttgcacggaaggggtggccctgttagagttgcttctcctctagtttgtaacttactggacttttgtggaaaatatcagcgtcgctaccctcagaaacaaactaacagcacacgttaggaggagtcctcatcagctgttctcattgccagtgagatatattcagtattgtagatactacactaatttccaacataagaggcaggaagagttttgattctatccttttttactaaacagttttattatgacactagatacagtaaatttttagaaaaaaataccatttacagtattattgtgaaccatttaacccttttgatccaaggccccggaccaaggggatactgtaatcaggttatgtacaccaacctctgcatcagttgcttctatagagcatcagccctcatgtttcattgtcttaatgtcggggagcagcctggtgtcctgccccaggtgtccgcatttttgcatggtaaggaaaaggcttacttgcccttcagctcataaaagcagaaggtgtgctattcacagtaccatgcgagtagcccacagttaattcccggcagattctttggctgtgttttatctttaatgaacgtttctgactaatattttgttgtaaaccattaagtaatgtaacgcatgtaagatgcttagggtgcctggccaggactccgtggtttcctgttgtgacagtaataatggttataataataaaaatgataaaattgccatcattctatttttatccaaaagtataaattttgctttggcatgaaaagtggtcctcttgactgcattatgcatgcgaggatgaaataaacctagaagtggcagaacactggatttgtgtgtgtggcgctttagggtgctggactgtatggctgagggctggttgggttcctctattggctctgctcaaatgttgcaggatacatagccccaaagatggtctaggagcaatctaagctgtgttactccaaaggacatgaaaaagctcaagagtaaaattaaaattctcaaaaaaaaaccccacgaaatttaaagatggggaaaaaaagatggtataaaaatggctctggttcaataagcagtcacccaaagtaaagactctatcttgaaaggcttttggtgaaaatgaagggatttcatttgaaattacagcatgatgaattttgcatgggtggccagccagctagcccataactgatagatgcattagaagtcagccagcgcataggtgctccctctatattatggagaaagcaaaaccctgcaaatgaccaaatggtgtccaaagagcagcatgacattggcatcagctgaataaccaggggcacatgggggaacgtggatgggaatgatagtgtatctcagcggggggtggggtgacatcgttccctggggacattgggaaggtgggcaggggcaagtgaactcagcactctgcagtgagagggacagtcccatgtgtggcagcattgtcccacttcagatgccaggagtgggctcatcctagaggagcggagttttccgagaggaccatctcctggtttcctgaaggaggtgggtggaaacggctcttgtttgaaagaacttagggaggaccattggcttgccaagagtacagaaattcattatgctgctaatttaacgtggaattccttcatttcataagaacctcaaaataatggtgatacattctagccttaagacatttgaattgccggttgttgaggtgaattttgtttgtcatacatggaaccattttagtcccatttgactcacttcagaccatcttccacacactatgtctgtgcttggagaggggaggtggctctccagtgtaaaacttgaggcattcactagaggtgaaaacttgtcagaatatataaaagcttagattgtagctgttctaaaaacgtaagtactccattgtaatagggtggcatcttcaggtagtgcacatattggcaatagaggtcctgaattgtttttctaagactgatctgagagccattgggccatcaagcctttatatatctgcttctaaaattgccccacctgctctagatggatctttgggcctttcctcagtgttcatgcaaaaattaaatgtcttttttcagcatactgactccaggtgtagttacatctcagtgctgtcttgagtatatattttatctcttatacctgtatctcccaactagaaacagctccagtgtttttaagagaatgtttcttaaaaccaataggaaacttaagcgaggtttcatgacacaacctttcatgtcgtgaaaggcagagggtgactgtgtgtgatgtgcagagtccttggacaggagtcgggggctcctctgtcccactgctgcttcttgagtgggtggagtggtgcttagaggatctccgagaggtccccgcagctctagggagatctgattttgtgttttttgtttaagtacttcacacagaagcctaggtagatttaaaatggggtgctcagggactggggaacaagacggggtggggtggggagatgggcatttggagagtctcatgtagctggagacgttaagagctgagcacaccacaggaaaggagggaggatgctgtgtgagagccatgctgtcaggagcaagcttgctgctcctgtgctgccctggccctggccttgcttgcccatggtgtgtgtgtccagaggtgtgtgtgaggctgccagaacaagtgctgggtctgtcacagagaagtttaaaaaagaaaactaagattataaattagcatctagttccaaaaccaaaaaaagtgcctgtggatgtatataaaattaagatgataagaaagtgctcctgagaaggctcttgccagaagcctgatgtgagtgtgtggcacctgtgatggcagggctgtgagctgggcttctgtcctcctctgtgtcccggcatggaagccagtataagcatttccaaatgagggaaaagtccttggctcgtttgatccagttgagttgaaagggttgccttggcagcagaggctcctctgatggctgacatcagtcactgcgtctgggcctgagacgtgcatggagggctgtaaagccacggattcccctcgctggagaggctcctgtctgatagcggtagatgaaaaataaggtcgttatgactttggcaacttgcttcatttctttttcatttgacttacaacacacttctctaacatctagcccttttaaatttttaattaatttcaaagcttcctctggccaggtagacttttgtatacagaccaggtgagagcccttttgccttagtgtgaaaatgtaacattttatgcttttaaaatcaatagattcatcaccttagttttttaaaaaaaatctataaatagggtaattgctgaggtgtgcggtttatctttgagatgataaagctaaattatagtcttttgccagagaaactgaggtaactgtcattagaaaaggtttcttaaaatactcacaaagctgttattggcttcttaacttctaaaatttggggggtcttgcatttatttattatttatttatttatttatttagagacagagtctcaccctgttggccaggctggagtgcagtaagtggcacaatctcggctcactgcaacctccgcctccttggttccagcaattcttctgcctcagcctcccgagtagctgggactacaagcggctgccaccacacctggctatttttttttgtatttttagtagagacagggtttcgccatattggccaggctggtcttgaactcctgacctcgtgatccacccgcctcaccctcccaaaatgctgggattacaggcgtaagccactgcacctggcggggtcttgcttattttaaaagaaatattctgattcatattttaggactttttgtcaacgaaattggttttgatccctttgggtaccatttttattgttttatgtagaatgttagaaattaccactaatttacctggcagtgatgtcaaattgactgtaattagcaggtagaaaattatttgtattatattcatctgattcctatactggatgagcaaggagcatgcttcctttgggacattcttacagcagggtgtctctccaacagcccgacagcctcatctttttggttggatacctttgaactccatggttacgtgttaggtccacatttgtgtttttttctagcctacctatagttgttggcctttttgcatataactctcgggtaatattttgaagcatgctgaccatccaggcatatagtattttcaagaaatgactgaggtaggggtgggggtcctggtccggctgatgggggtttgctcagcactgtgccagtggaagcaggtgtattgtgggcagttttgtcattgtcctcaagtccttcgcagacagtgcacagcctgctgtctgcagtcggccagaccaggctcctccccagcacactccctgtgggatggccgctgctcaggacacagtgggacaaagttgggttgataggatattttagattcattttacctttgacaagggcaggccttgaattgggagcagcagccacctggcctcactctggccacaggtgacacttggtccttgctgccacctgcttggggctatgtggctacggctacacaaaagcctgtgcaggttagaagacgactgtggtgtgcagtggtgctctgggagtggagacttcctctgttctcagagactcacccccagccctgaccctagaatttagggatagccaggaagtttctagtttgtgtaacctagaagggtcactttaataaaaattgttatgaactatagtattttagatgatgagtgacttattttaattccactttaacattttactgtgctgttaacttggaagacctgtttgaaattagtcttgatttcacactcatttaatctgctgagcacagggctgttgtcatttgtaaacgcaaacactgtggaggtacttctcgccatcagcttccttctttacaaaaccatcatttcaacatgaaaattatgtcagtttatagaaatatttattgttcaaggtctgtaattgtatttcaaaaacgatgtcgtattcaagttgtgaagggatttgttttgtcaaaaaattaaaaactcaatgtgtatgacgccactctgaagagtaggtgagcgctttgcagtcacagaaggtggcatctgactgcggctcatacaggtcaccctgaagggccacgtgcttttagcagttggctggaatgtgttcactaggttccgttatgtttggtaatatcatcttgaaaagtccctgtaatagatcaaggagactgcattccctgccctgaaggaatgtatttctaaggcaaataggcaacttggtactatcttattctgagtagagagtggagaaagtattttcagactgaagaaaactttgaaaagtcaggagctaagctgctcggagctcagtgccgcagcatggctgtggtggacgcgggaaacaacgggaaagttcttgacagagtctgtgtccgctcagtccctgcacttttcctttccaaatgcatctcgttggatatggaatagatcgtagatgttgtagactgagatttgggactatgttgggaccgtacaggtgaatgtgccacctccacaaatggcttctccgagtgagtcacgtcacctggtgcgtggaggtggagcctgcggctggagtaaggcttgctgtgggacgccctcgtactttgctctccttgcgggtggttgccgagccgagagcattggatcctccccgactgtggctagttgtctgtccggtggctgggagggggtgtggtgggaaaaagtcggaatctctgcaatctgtgtcatggactgtactattgtaaggtctatattctgtatgtgggtcccagaccctgatcaggaaatgagcctcatgtgtgtcgttaacatttatatatttccattcaaaatatgtattcagtgtttatttcctcaaaacagactttgttaatgtaggaaatctctccaagtggaaacgtgctaactttttctgtaaatctgaaataaaaggtgctgttccttcctctgacccaggactgctt

SEQ ID NO: 440511 - DNA, 10005 bp, Homo sapiens
  misc_feature (12)..(12): n is a, c, g, or t
  misc_feature (86)..(86): n is a, c, g, or t
gggaggcgcggnggcggggtcggcgccgcgcgcgagagcctcggcctggccgcgctgcgcccgccgccgccgccgccccctccccncctgggccctaccgccgcacggccccggccccctcccagcctgccgctccggagagccgcccgccgaggatgcgacgcaccgcagtgttctaagaacggaagcatctgggctggatggaatttagcatcaagcagagtcccctttctgttcagagtgttgtaaagtgcataaagatgaagcaggcaccagaaatcctcggcagtgccaacgggaagactccgagctgcgaggtgaaccgcgagtgttctgtgttcctcagcaaagcccagctctccagtagcctgcaggagggggtcatgcagaagtttaacggccacgacgccctgccctttattccagccgacaagctgaaagatcttacttcccgggtgtttaatggagaacccggcgcacacgatgccaaactgcgttttgagtcccaggaaatgaaagggattgggacaccccctaacactacccctatcaaaaatggctctccagaaattaagctgaaaatcaccaaaacatacatgaatgggaagcctctctttgaatcttccatttgtggtgacagtgctgctgatgtgtctcagtcagaagaaaatggacaaaaaccagaaaacaaggcgagaaggaacaggaagaggagcataaaatatgactccttgctggagcagggccttgtcgaagcagctcttgtgtctaagatctcaagtccttcagataaaaagattccagctaagaaagagtcttgtccaaacactggaagagacaaagaccacctgttgaaatacaacgttggtgatttggtgtggtccaaagtgtcgggttacccttggtggccttgcatggtttctgcagatccactccttcacagctataccaaacttaaaggtcagaaaaagagtgcacgccagtatcacgtacagttctttggtgacgccccagaaagagcttggatatttgagaagagcctcgtagcttttgaaggagaaggacagtttgaaaaattatgccaggaaagtgccaagcaggcacccacgaaagctgagaaaattaagctattgaaaccaatttcagggaaattgagggcccagtgggaaatgggcattgttcaagcagaagaagctgcaagcatgtcagtggaggagcggaaagccaagttcacctttctctatgtgggggaccagcttcatctcaaccctcaagtagccaaggaggctggcattgctgcagagtctttgggagaaatggcagaatcctcaggagtcagtgaagaagctgctgaaaaccccaagtctgtgagagaagagtgcattcccatgaagagaaggcggagggccaaactgtgtagctctgcagagaccctggagagtcaccccgacatagggaagagtactcctcaaaagacggcagaggctgaccccagaagaggagtagggtctcctcctgggaggaagaagaccacagtctccatgccacgaagcaggaagggagatgcagcatcccagtttttggtcttctgtcaaaaacacagggatgaggtggtagctgagcacccagatgcttcaggtgaggagattgaagagctgctcaggtcacagtggagtctgctgagtgagaagcagagagcacgctacaacaccaagtttgccctggtggcccctgtccaggctgaagaagactctggtaatgtaaatgggaaaaaaagaaaccacacaaagaggatacaggaccctacagaagatgctgaagctgaggacacacccaggaaaagactcaggacggacaagcacagtcttcggaagagagacacaatcactgacaaaacggccagaacaagctcttacaaggccatggaggcagcctcctcgctcaagagccaggcagcaacgaaaaatctgtctgatgcatgtaaaccactgaagaagcgaaatcgggcttccacggcagcatcttcagctcttgggtttagcaaaagttcatctccttctgcatccttaactgagaatgagggtaaaataataataataacgataaccatggcattggtatgaaggccatttagctgcccacgctgcagtgtgagtaatgctcagacttcataagcgcagcattggtgctcactgccagtgcagatgttttagggcctcttggctaactcagattcatgaaatggacaaacagtgcactatgttagtttatttgagcactttttatacacacgcacacagtgtctgtgtacatgtacagatatacttcagtcttgatgcagtttcatagttcttaaaatctgtctgaagaatgttgtgttctgtgtagccctcacactgtaagagttcacatggaagtaagtctgcgttggttctgaaagggcacagtgtcagttgagctgacatatactgggtggggtggaaggcgactcacacaccacacctgattcctgttgcttccagacctaggctcatggaggaagccaaagatttctttgttctcatgcatttcatggctttggtcctttaaattctggcacatttttagttacttgagtgttgaggtgagtcagaactaccattgtaatatgactcctgtgttctggacttgcagagtacatgatagcaaaataaagccatttggggctgctgcctgccatcattgtaacatgacacttagactttattatcaaacctaaattttttgccgttgccaaaaacaacaaatagccacagaacgtaggtgtgacacttttttgttcggaggtagttttggtttcctgatttttagggattaccttcatagagctttggagttttaatttcttgttatttggttctccgtgatgctgtttttctcattgtagacatgggtcctgtttttgtcatgtttatgaggagatgataactgggggcccttttggaacagggtagtgaggcaagggttggacaggccccttactcttgctgagtcagaaggcggcacttctggccaggtctctgccatggtccccaggaaggatggggtgtgcctcagttgtttccactcattagaggagtgtaggccttccagtgcaggaaggtcagggacctaggcaacctgggcggggctcatagagctctgcggcttgccactctgaatcctcagcgaccactcctccgagtgggattttctgcagggactcaaaccaactcagtggtggtcgagacctgttcacggatggtgggactggggctgctttacagtttgatacgtgtagataattaagcattttgtgatgtttggacacactggagaaaaggcagtaagaattatttactgaaacatctaggagcttactgaaatatgaaaaggcaaattttatacaaattatttttcctttttcctttctttcttgtccaagttcaggttaaaatcttagaaaattaaatgaaaggtcatttacagttccaaagaagaatattaaacatttttcacttaagttgagatttttgctttaaagagcttttaatgagtttttctgttatcataattttggtccggttattcacttgagttgttgcttatactgttgtcaggtacagtagagagaacatggagcctgctgagatcttctctgttattcctgatcctaagtcatgtatatcgaaggctttgatttagagtaatgcatgaggccagtgtagcggggtcgaggcctgcccatgagtcaggggagctcagtctccctggcctaggcagttgtcctgaccttgagaagacatagatgaagcattttatcatcattagacttaaattttaattcttcagaatgtcagaagttgataggttgttaaatacatttatataatacattaaatatgtgaaattaatacaccttcctacattttgaaggtgatgcatagatcccatagtgtgcatcatgttccttatatgaaaacgtttaaattactgggtcttttccattaaactacttttgtatggcttagataaatcttccattagtgttcatttttatagaattatgctgttaaaactactttaggtgaacaaataaacttgtctattatatattaacgcgactgaactacagtaaatgtttgtgatgtttccaatgctgaatgcctgttagcatatgaggcaaagtgtagtgttataaaaaacagcctgttgactgctgggcccgattctgatatgagttaggtgaccatgagaattgctgtttgaggtccacactgacacacacccattgggtcacaccccctttgcatgtttgtatttcctccctttcatcacatttgtttgaaataaggtacttttatagggttggtatttcagaacactttaggtcatgttgtagtttaaattcttcttgaaaaaggtatatgtgataaataaaaatttttattggaataattattacatggtactacatcaccctgaggaagagaataaattaaaattacacacttgcatgacaaaggcctgtgaaggaattaatgtgatttaagtgttttgtaacttcattttttattcctttagtagagcaaattcttatttttttcgccttcactggtaacagcttttgtgggagcccacaccagtcaagttggatttgaacccagctgctctgtactgcacttagaatgatgtaatattccaggatgctgctgcaggtggcgtatcatcgtacacactcagtgacatttctatcacaatcattttatggaagatgtgtgataatctgtttttactggtattaataaacacatacaatgaagaaaacagataacaaattttaagaccaaggtctcggacagcccgggagacgagccctcggagtccccatacgaaagtgcagacgaaacacaaactgaagtatctgtctcatccaaaaagtctgagcgaggagtgactgccaaaaaggagtatgtgtgccagctgtgtgagaagccgggcagcctcctgctctgtgaaggaccctgctgcggagctttccacctcgcctgccttgggctttcccggaggccagaagggaggttcacctgcagcgagtgtgcctcagggattcactcatgtttcgtgtgtaaagagagcaagacagatgttaagcgctgtgtggtaactcagtgtggaaaattttaccatgaggcttgtgtgaaaaaataccctctgactgtatttgagagccgaggtttccgctgccccctccacagctgtgtgagctgccatgcttccaacccttcaaacccaaggccgtcaaaaggtaaaatgatgcggtgtgtccgctgccccgttgcctatcacagcggggatgcttgtctggcagcaggatgctcagtgatcgcctccaacagcatcatctgcactgcccacttcactgctcggaaggggaagcgacaccacgcccacgtcaacgtgagctggtgcttcgtgtgctccaaaggggggagccttctgtgctgtgagtcctgcccagcggccttccaccctgactgcctgaacatcgagatgcctgacggcagctggttctgcaatgactgcagggctgggaagaagctgcacttccaggatatcatttgggtgaaacttgggaactacagatggtggccggcagaagtttgccatcccaaaaatgttcccccaaatattcagaaaatgaagcacgagattggagaattccctgtgtttttctttgggtctaaagattattactggacgcatcaggcgcgagtgttcccgtacatggagggggaccggggcagccgctaccagggggtcagagggatcggaagagtcttcaaaaacgcactgcaagaagctgaagctcgttttcgtgaaattaagcttcagagggaagcccgagaaacacaggagagcgagcgcaagcccccaccatacaagcacatcaaggtgaataagccttacgggaaagtccagatctacacagcggatatttcagaaatccctaagtgcaactgcaagcccacagatgagaatccttgtggctttgattcggagtgtctgaacaggatgctgatgtttgagtgccacccgcaggtgtgtcccgcgggcgagttctgccagaaccagtgcttcaccaagcgccagtacccagagaccaagatcatcaagacagatggcaaagggtggggcctggtcgccaagagggacatcagaaagggagaatttgttaacgagtacgttggggagctgatcgacgaggaggagtgcatggcgagaatcaagcacgcacacgagaacgacatcacccacttctacatgctcactatagacaagcagctggtgctgtgtgaccgcaagttctgcaccaaggcctaccacctgtcctgcctgggccttggcaagcggcccttcgggaagtgggaatgtccttggcatcattgtgacgtgtgtggcaaaccttcgacttcattttgccacctctgccccaattcgttctgtaaggagcaccaggacgggacagccttcagctgcaccccggacgggcggtcctactgctgtgagcatgacttaggggcggcatcggtcagaagcaccaagactgagaagccccccccagagccagggaagccgaaggggaagaggcggcggcggaggggctggcggagagtcacagagggcaaatagcgccaggcggccgcttggccggatccaggggcggtgcagggcggccggccctgcctgcgggagagggcgagcatgaactggcccggaggacccagctcgagccgccaggacacagacgtacaggcctcctcgggagggagcgcctccccaccactgagccatcctcagcagcgtccgctgcgtctgcactgatgaccgtctgagcccagctcagcgttcctggacaaacagcctcactcctcagcgttaccgccacacttgaatttctccgaatgtcaaggttccctcccactctatttttttaggttaaagttaattggcatatggaatgttttaatctcctctgaaatgtgtagcgtaggcttttcccaagggtcgctagaaactcgtcttcgcgttgccccctttctggctctcagcgccgtcgccactcgggagaggctgggtgaggcccgtgtgaggactgaccctggattcctcgaaactgccattgtgatcattactctgctctttggaaatggctgtatcatttttttgtactaatgtgaattgttcctcagaaacgcttcttttccatcctagtgagaagctggccctgcaggtggtggcagcaatggtgttgtaagatttcctcccgtagttttttctcctcatggatttgaatgaaatgccaataacacgtccactttcaacgtgtagtttacgcggagcactttcgaggcctggccgggttgggcctacttctcacctgggcctatcttctgaactcgctaggttcttatcaacatttgggggataactttgtatatttttttcatttggcttttctttaccagtttctgatttttattctcaatatatttttgctaaacctatttcacaaatcaccaccgactgaagtgtgtgtttactgatgcggccctgagctccatggcgaaaggagtgactttgcagggcgtgagaccgcagtctgcttagagcacaggaagtgacaacttagggagccccgtagggcgctgcaggccccggggaccccagcacgtgggtctaaagagagacggagtctagctctcctgccacccagagtggcttccatctcagcactctgtgggtctggtgatggaagatgcagtctctgctgatcacatgtgccctctgccagggcacctactgagaggtgcggtcctgggggtggaggcctgcctggcaggtgtgcgtgcctcgtacgtgtgttatgggcactggtctaggccaggtatgacacccactctcctgtgagatttcactttagtttttaaaaggtccagttctacagagtgagacctatctatctgagtactacatatgttttaagacttggttctttttttgagggatccttgaccctgggaagtctggagcaccctgagaagggggcaccatgtgtgcctttgcccacgtgtcctgaggggctgcttgtctgggagggagggagagaacattcagcagcaggtgcttttttatggccttttcttaaaataacctaagggggacacatccatcttgcagagaagtttacagaactccccttgaaaactgctgctgaggctcctgttaaattttctgtggcatcttttatgccttggtaaaaactgcagtgtctttggacctgagagtggctactccgtggttttgtgacctgtaagcgtggggttcaggggtgtgtggccctgcagggtcccacgcctccctgagcactgactggaagtttcactggctggtggctgtcccttctcccatcagggtccccagcaaagttaactacacagaggacccaggggaaacgagctgtgtagccactgacttgctcgcgcggccgtggcctctgaggggcactcgccggttaagacagggtgggagtagtgctttccagttcagactctaacttctcccaaagtgtcctaagaaaatactggatcggctcatagatttatgctccttatgatgccctaacttggaaggttgttctagggacaggccgggcagtgtccccacacacaccttagagtcgaaggccccagggccccgctgtcacttgcccaaaagatcccttccggcaggtaagggactaccaatgcttacgtcaaaacagcagaatcggctttgcagtgcactttggggagcagatattaacttatttttgtgttggacagtagtgaaatcttgtgatttttaatcgctttgataatacttccaaattttatgatttttctgaaggaaataatgcaaacattttaaatatgtttctccccctttccaaaaactgttaaactaatgagcaagtaacactaactttgaatgtctctacaatacccgttgataactcagtggagccaggctttggggtagcggccctgagcttgcagggtttctcgccactggggctgaccacgcccccagctgtgaccgtgggtgtggctggctctcggccctgcccagctttgttctgaggacgtggtgacttcctgaacatcagcttcaatcctccatcattaatgtgaagcaaaacacaaaaaccgccccaatccctcaggattccttggcatccgaaaccagcatctgcacctaaacccatacccacccgtgtgcgcccacagggggatgtgtccgaatgggcagcttaaaatgtggtcacctgtgggggaaactcttcaggcacctgaagtgagaacccagctgtccgtcctcaggccggcctttcttccggcgacacccgtccatggctggctgggtccccttcgcagtgtttgtctgtcttgacatctaaaccccggcgtgtgcagtgcccatcttccaggactaccttattttccagaattaaacctgttttataattcaagttaatgcaaatgactgtcagttgccaaatatcttgatcctatgagtgtagttgatgactgtttgttagtcagtagagtaaaatgctgtgtccacggggtgtcacagcctcaccataccctgttgaggtgtgaaatgccccgtcagaaattaaatacaaacttaaatgtgcctattggtgtctaaacttcatacaatgtaaggtcagattccttttaggaatactgggtgctgtcaccaggtttgatagttagacttaaaaacttgaaattcactttttggggggagggatatactgaaatagagagttgagacttgccagttgggggaaaatagcatttaaaatggaaagctgtgtttggaaaattgtgtatgagtatttttgtattaaaaacattttaaaggcttttttcttaa

SEQ ID NO: 440512 - DNA, 9919 bp, Homo sapiens
  misc_feature (12)..(12): n is a, c, g, or t
  misc_feature (86)..(86): n is a, c, g, or t
gggaggcgcggnggcggggtcggcgccgcgcgcgagagcctcggcctggccgcgctgcgcccgccgccgccgccgccccctccccncctgggccctaccgccgcacggccccggccccctcccagcctgccgctccggagagccgcccgccgaggatgcgacgcaccgcagtgttctaagaacggaagcatctgggctggatggaatttagcatcaagcagagtcccctttctgttcagagtgttgtaaagtgcataaagatgaagcaggcaccagaaatcctcggcagtgccaacgggaagactccgagctgcgaggtgaaccgcgagtgttctgtgttcctcagcaaagcccagctctccagtagcctgcaggagggggtcatgcagaagtttaacggccacgacgccctgccctttattccagccgacaagctgaaagatcttacttcccgggtgtttaatggagaacccggcgcacacgatgccaaactgcgttttgagtcccaggaaatgaaagggattgggacaccccctaacactacccctatcaaaaatggctctccagaaattaagctgaaaatcaccaaaacatacatgaatgggaagcctctctttgaatcttccatttgtggtgacagtgctgctgatgtgtctcagtcagaagaaaatggacaaaaaccagaaaacaaggcgagaaggaacaggaagaggagcataaaatatgactccttgctggagcagggccttgtcgaagcagctcttgtgtctaagatctcaagtccttcagataaaaagattccagctaagaaagagtcttgtccaaacactggaagagacaaagaccacctgttgaaatacaacgttggtgatttggtgtggtccaaagtgtcgggttacccttggtggccttgcatggtttctgcagatccactccttcacagctataccaaacttaaaggtcagaaaaagagtgcacgccagtatcacgtacagttctttggtgacgccccagaaagagcttggatatttgagaagagcctcgtagcttttgaaggagaaggacagtttgaaaaattatgccaggaaagtgccaagcaggcacccacgaaagctgagaaaattaagctattgaaaccaatttcagggaaattgagggcccagtgggaaatgggcattgttcaagcagaagaagctgcaagcatgtcagtggaggagcggaaagccaagttcacctttctctatgtgggggaccagcttcatctcaaccctcaagtagccaaggaggctggcattgctgcagagtctttgggagaaatggcagaatcctcaggagtcagtgaagaagctgctgaaaaccccaagtctgtgagagaagagtgcattcccatgaagagaaggcggagggccaaactgtgtagctctgcagagaccctggagagtcaccccgacatagggaagagtactcctcaaaagacggcagaggctgaccccagaagaggagtagggtctcctcctgggaggaagaagaccacagtctccatgccacgaagcaggaagggagatgcagcatcccagtttttggtcttctgtcaaaaacacagggatgaggtggtagctgagcacccagatgcttcaggtgaggagattgaagagctgctcaggtcacagtggagtctgctgagtgagaagcagagagcacgctacaacaccaagtttgccctggtggcccctgtccaggctgaagaagactctggtaatgtaaatgggaaaaaaagaaaccacacaaagaggatacaggaccctacagaagatgctgaagctgaggacacacccaggaaaagactcaggacggacaagcacagtcttcggaagagagacacaatcactgacaaaacggccagaacaagctcttacaaggccatggaggcagcctcctcgctcaagagccaggcagcaacgaaaaatctgtctgatgcatgtaaaccactgaagaagcgaaatcgggcttccacggcagcatcttcagctcttgggtttagcaaaagttcatctccttctgcatccttaactgagaatgagggtaaaataataataataacgataaccatggcattggtatgaaggccatttagctgcccacgctgcagtgtgagtaatgctcagacttcataagcgcagcattggtgctcactgccagtgcagatgttttagggcctcttggctaactcagattcatgaaatggacaaacagtgcactatgttagtttatttgagcactttttatacacacgcacacagtgtctgtgtacatgtacagatatacttcagtcttgatgcagtttcatagttcttaaaatctgtctgaagaatgttgtgttctgtgtagccctcacactgtaagagttcacatggaagtaagtctgcgttggttctgaaagggcacagtgtcagttgagctgacatatactgggtggggtggaaggcgactcacacaccacacctgattcctgttgcttccagacctaggctcatggaggaagccaaagatttctttgttctcatgcatttcatggctttggtcctttaaattctggcacatttttagttacttgagtgttgaggtgagtcagaactaccattgtaatatgactcctgtgttctggacttgcagagtacatgatagcaaaataaagccatttggggctgctgcctgccatcattgtaacatgacacttagactttattatcaaacctaaattttttgccgttgccaaaaacaacaaatagccacagaacgtaggtgtgacacttttttgttcggaggtagttttggtttcctgatttttagggattaccttcatagagctttggagttttaatttcttgttatttggttctccgtgatgctgtttttctcattgtagacatgggtcctgtttttgtcatgtttatgaggagatgataactgggggcccttttggaacagggtagtgaggcaagggttggacaggccccttactcttgctgagtcagaaggcggcacttctggccaggtctctgccatggtccccaggaaggatggggtgtgcctcagttgtttccactcattagaggagtgtaggccttccagtgcaggaaggtcagggacctaggcaacctgggcggggctcatagagctctgcggcttgccactctgaatcctcagcgaccactcctccgagtgggattttctgcagggactcaaaccaactcagtggtggtcgagacctgttcacggatggtgggactggggctgctttacagtttgatacgtgtagataattaagcattttgtgatgtttggacacactggagaaaaggcagtaagaattatttactgaaacatctaggagcttactgaaatatgaaaaggcaaattttatacaaattatttttcctttttcctttctttcttgtccaagttcaggttaaaatcttagaaaattaaatgaaaggtcatttacagttccaaagaagaatattaaacatttttcacttaagttgagatttttgctttaaagagcttttaatgagtttttctgttatcataattttggtccggttattcacttgagttgttgcttatactgttgtcaggtacagtagagagaacatggagcctgctgagatcttctctgttattcctgatcctaagtcatgtatatcgaaggctttgatttagagtaatgcatgaggccagtgtagcggggtcgaggcctgcccatgagtcaggggagctcagtctccctggcctaggcagttgtcctgaccttgagaagacatagatgaagcattttatcatcattagacttaaattttaattcttcagaatgtcagaagttgataggttgttaaatacatttatataatacattaaatatgtgaaattaatacaccttcctacattttgaaggtgatgcatagatcccatagtgtgcatcatgttccttatatgaaaacgtttaaattactgggtcttttccattaaactacttttgtatggcttagataaatcttccattagtgttcatttttatagaattatgctgttaaaactactttaggtgaacaaataaacttgtctattatatattaacgcgactgaactacagtaaatgtttgtgatgtttccaatgctgaatgcctgttagcatatgaggcaaagtgtagtgttataaaaaacagcctgttgactgctgggcccgattctgatatgagttaggtgaccatgagaattgctgtttgaggtccacactgacacacacccattgggtcacaccccctttgcatgtttgtatttcctccctttcatcacatttgtttgaaataaggtacttttatagggttggtatttcagaacactttaggtcatgttgtagtttaaattcttcttgaaaaaggtatatgtgataaataaaaatttttattggaataattattacatggtactacatcaccctgaggaagagaataaattaaaattacacacttgcatgacaaaggcctgtgaaggaattaatgtgatttaagtgttttgtaacttcattttttattcctttagtagagcaaattcttatttttttcgccttcactggtaacagcttttgtgggagcccacaccagtcaagttggatttgaacccagctgctctgtactgcacttagaatgatgtaatattccaggatgctgctgcaggtggcgtatcatcgtacacactcagtgacatttctatcacaatcattttatggaagatgtgtgataatctgtttttactggtattaataaacacatacaatgaagaaaacagataacaaattttaagaccaaggtctcggacagcccgggagacgagccctcggagtccccatacgaaagtgcagacgaaacacaaactgaagtatctgtctcatccaaaaagtctgagcgaggagtgactgccaaaaaggagtatgtgtgccagctgtgtgagaagccgggcagcctcctgctctgtgaaggaccctgctgcggagctttccacctcgcctgccttgggctttcccggaggccagaagggaggttcacctgcagcgagtgtgcctcagggattcactcatgtttcgtgtgtaaagagagcaagacagatgttaagcgctgtgtggtaactcagtgtggaaaattttaccatgaggcttgtgtgaaaaaataccctctgactgtatttgagagccgaggtttccgctgccccctccacagctgtgtgagctgccatgcttccaacccttcaaacccaaggccgtcaaaaggtaaaatgatgcggtgtgtccgctgccccgttgcctatcacagcggggatgcttgtctggcagcaggatgctcagtgatcgcctccaacagcatcatctgcactgcccacttcactgctcggaaggggaagcgacaccacgcccacgtcaacgtgagctggtgcttcgtgtgctccaaaggggggagccttctgtgctgtgagtcctgcccagcggccttccaccctgactgcctgaacatcgagatgcctgacggcagctggttctgcaatgactgcagggctgggaagaagctgcacttccaggatatcatttgggtgaaacttgggaactacagatggtggccggcagaagtttgccatcccaaaaatgttcccccaaatattcagaaaatgaagcacgagattggagaattccctgtgtttttctttgggtctaaagattattactggacgcatcaggcgcgagtgttcccgtacatggagggggaccggggcagccgctaccagggggtcagagggatcggaagagtcttcaaaaacgcactgcaagaagctgaagctcgttttcgtgaaattaagcttcagagggaagcccgagaaacacaggagagcgagcgcaagcccccaccatacaagcacatcaaggtgaataagccttacgggaaagtccagatctacacagcggatatttcagaaatccctaagtgcaactgcaagcccacagatgagaatccttgtggctttgattcggagtgtctgaacaggatgctgatgtttgagtgccacccgcaggtgtgtcccgcgggcgagttctgccagaaccagtgcttcaccaagcgccagtacccagagaccaagatcatcaagacagatggcaaagggtggggcctggtcgccaagagggacatcagaaagggagaatttgttaacgagtacgttggggagctgatcgacgaggaggagtgcatggcgagaatcaagcacgcacacgagaacgacatcacccacttctacatgctcactatagacaaggaccgtataatagacgctggccccaaaggaaactactctcgatttatgaatcacagctgccagcccaactgtgagaccctcaagtggacagtgaatggggacactcgtgtgggcctgtttgccgtctgtgacattcctgcagcatgacttaggggcggcatcggtcagaagcaccaagactgagaagccccccccagagccagggaagccgaaggggaagaggcggcggcggaggggctggcggagagtcacagagggcaaatagcgccaggcggccgcttggccggatccaggggcggtgcagggcggccggccctgcctgcgggagagggcgagcatgaactggcccggaggacccagctcgagccgccaggacacagacgtacaggcctcctcgggagggagcgcctccccaccactgagccatcctcagcagcgtccgctgcgtctgcactgatgaccgtctgagcccagctcagcgttcctggacaaacagcctcactcctcagcgttaccgccacacttgaatttctccgaatgtcaaggttccctcccactctatttttttaggttaaagttaattggcatatggaatgttttaatctcctctgaaatgtgtagcgtaggcttttcccaagggtcgctagaaactcgtcttcgcgttgccccctttctggctctcagcgccgtcgccactcgggagaggctgggtgaggcccgtgtgaggactgaccctggattcctcgaaactgccattgtgatcattactctgctctttggaaatggctgtatcatttttttgtactaatgtgaattgttcctcagaaacgcttcttttccatcctagtgagaagctggccctgcaggtggtggcagcaatggtgttgtaagatttcctcccgtagttttttctcctcatggatttgaatgaaatgccaataacacgtccactttcaacgtgtagtttacgcggagcactttcgaggcctggccgggttgggcctacttctcacctgggcctatcttctgaactcgctaggttcttatcaacatttgggggataactttgtatatttttttcatttggcttttctttaccagtttctgatttttattctcaatatatttttgctaaacctatttcacaaatcaccaccgactgaagtgtgtgtttactgatgcggccctgagctccatggcgaaaggagtgactttgcagggcgtgagaccgcagtctgcttagagcacaggaagtgacaacttagggagccccgtagggcgctgcaggccccggggaccccagcacgtgggtctaaagagagacggagtctagctctcctgccacccagagtggcttccatctcagcactctgtgggtctggtgatggaagatgcagtctctgctgatcacatgtgccctctgccagggcacctactgagaggtgcggtcctgggggtggaggcctgcctggcaggtgtgcgtgcctcgtacgtgtgttatgggcactggtctaggccaggtatgacacccactctcctgtgagatttcactttagtttttaaaaggtccagttctacagagtgagacctatctatctgagtactacatatgttttaagacttggttctttttttgagggatccttgaccctgggaagtctggagcaccctgagaagggggcaccatgtgtgcctttgcccacgtgtcctgaggggctgcttgtctgggagggagggagagaacattcagcagcaggtgcttttttatggccttttcttaaaataacctaagggggacacatccatcttgcagagaagtttacagaactccccttgaaaactgctgctgaggctcctgttaaattttctgtggcatcttttatgccttggtaaaaactgcagtgtctttggacctgagagtggctactccgtggttttgtgacctgtaagcgtggggttcaggggtgtgtggccctgcagggtcccacgcctccctgagcactgactggaagtttcactggctggtggctgtcccttctcccatcagggtccccagcaaagttaactacacagaggacccaggggaaacgagctgtgtagccactgacttgctcgcgcggccgtggcctctgaggggcactcgccggttaagacagggtgggagtagtgctttccagttcagactctaacttctcccaaagtgtcctaagaaaatactggatcggctcatagatttatgctccttatgatgccctaacttggaaggttgttctagggacaggccgggcagtgtccccacacacaccttagagtcgaaggccccagggccccgctgtcacttgcccaaaagatcccttccggcaggtaagggactaccaatgcttacgtcaaaacagcagaatcggctttgcagtgcactttggggagcagatattaacttatttttgtgttggacagtagtgaaatcttgtgatttttaatcgctttgataatacttccaaattttatgatttttctgaaggaaataatgcaaacattttaaatatgtttctccccctttccaaaaactgttaaactaatgagcaagtaacactaactttgaatgtctctacaatacccgttgataactcagtggagccaggctttggggtagcggccctgagcttgcagggtttctcgccactggggctgaccacgcccccagctgtgaccgtgggtgtggctggctctcggccctgcccagctttgttctgaggacgtggtgacttcctgaacatcagcttcaatcctccatcattaatgtgaagcaaaacacaaaaaccgccccaatccctcaggattccttggcatccgaaaccagcatctgcacctaaacccatacccacccgtgtgcgcccacagggggatgtgtccgaatgggcagcttaaaatgtggtcacctgtgggggaaactcttcaggcacctgaagtgagaacccagctgtccgtcctcaggccggcctttcttccggcgacacccgtccatggctggctgggtccccttcgcagtgtttgtctgtcttgacatctaaaccccggcgtgtgcagtgcccatcttccaggactaccttattttccagaattaaacctgttttataattcaagttaatgcaaatgactgtcagttgccaaatatcttgatcctatgagtgtagttgatgactgtttgttagtcagtagagtaaaatgctgtgtccacggggtgtcacagcctcaccataccctgttgaggtgtgaaatgccccgtcagaaattaaatacaaacttaaatgtgcctattggtgtctaaacttcatacaatgtaaggtcagattccttttaggaatactgggtgctgtcaccaggtttgatagttagacttaaaaacttgaaattcactttttggggggagggatatactgaaatagagagttgagacttgccagttgggggaaaatagcatttaaaatggaaagctgtgtttggaaaattgtgtatgagtatttttgtattaaaaacattttaaaggcttttttcttaa

SEQ ID NO: 440513 - DNA, 8574 bp, Homo sapiens
  misc_feature (12)..(12): n is a, c, g, or t
  misc_feature (86)..(86): n is a, c, g, or t
gggaggcgcggnggcggggtcggcgccgcgcgcgagagcctcggcctggccgcgctgcgcccgccgccgccgccgccccctccccncctgggccctaccgccgcacggccccggccccctcccagcctgccgctccggagagccgcccgccgaggatgcgacgcaccgcagtgttctaagaacggaagcatctgggctggatggaatttagcatcaagcagagtcccctttctgttcagagtgttgtaaagtgcataaagatgaagcaggcaccagaaatcctcggcagtgccaacgggaagactccgagctgcgaggtgaaccgcgagtgttctgtgttcctcagcaaagcccagctctccagtagcctgcaggagggggtcatgcagaagtttaacggccacgacgccctgccctttattccagccgacaagctgaaagatcttacttcccgggtgtttaatggagaacccggcgcacacgatgccaaactgcgttttgagtcccaggaaatgaaagggattgggacaccccctaacactacccctatcaaaaatggctctccagaaattaagctgaaaatcaccaaaacatacatgaatgggaagcctctctttgaatcttccatttgtggtgacagtgctgctgatgtgtctcagtcagaagaaaatggacaaaaaccagaaaacaaggcgagaaggaacaggaagaggagcataaaatatgactccttgctggagcagggccttgtcgaagcagctcttgtgtctaagatctcaagtccttcagataaaaagattccagctaagaaagagtcttgtccaaacactggaagagacaaagaccacctgttgaaatacaacgttggtgatttggtgtggtccaaagtgtcgggttacccttggtggccttgcatggtttctgcagatccactccttcacagctataccaaacttaaaggtcagaaaaagagtgcacgccagtatcacgtacagttctttggtgacgccccagaaagagcttggatatttgagaagagcctcgtagcttttgaaggagaaggacagtttgaaaaattatgccaggaaagtgccaagcaggcacccacgaaagctgagaaaattaagctattgaaaccaatttcagggaaattgagggcccagtgggaaatgggcattgttcaagcagaagaagctgcaagcatgtcagtggaggagcggaaagccaagttcacctttctctatgtgggggaccagcttcatctcaaccctcaagtagccaaggaggctggcattgctgcagagtctttgggagaaatggcagaatcctcaggagtcagtgaagaagctgctgaaaaccccaagtctgtgagagaagagtgcattcccatgaagagaaggcggagggccaaactgtgtagctctgcagagaccctggagagtcaccccgacatagggaagagtactcctcaaaagacggcagaggctgaccccagaagaggagtagggtctcctcctgggaggaagaagaccacagtctccatgccacgaagcaggaagggagatgcagcatcccagtttttggtcttctgtcaaaaacacagggatgaggtggtagctgagcacccagatgcttcaggtgaggagattgaagagctgctcaggtcacagtggagtctgctgagtgagaagcagagagcacgctacaacaccaagtttgccctggtggcccctgtccaggctgaagaagactctggtaatgtaaatgggaaaaaaagaaaccacacaaagaggatacaggaccctacagaagatgctgaagctgaggacacacccaggaaaagactcaggacggacaagcacagtcttcggaagagagacacaatcactgacaaaacggccagaacaagctcttacaaggccatggaggcagcctcctcgctcaagagccaggcagcaacgaaaaatctgtctgatgcatgtaaaccactgaagaagcgaaatcgggcttccacggcagcatcttcagctcttgggtttagcaaaagttcatctccttctgcatccttaactgagaatgagcttttgtgggagcccacaccagtcaagttggatttgaacccagctgctctgtactgcacttagaatgatgtaatattccaggatgctgctgcaggtggcgtatcatcgtacacactcagtgacatttctatcacaatcattttatggaagatgtgtgataatctgtttttactggtattaataaacacatacaatgaagaaaacagataacaaattttaagaccaaggtaagataactaatcaaggccatttaatccgtcacattcatctcataatagaaacacgttcatattccagtggtcaatgtagatttcaagttgaaaggcagtccctttagttgggggctgtccagagctgcagcagggctttgcacggaaggggtggccctgttagagttgcttctcctctagtttgtaacttactggacttttgtggaaaatatcagcgtcgctaccctcagaaacaaactaacagcacacgttaggaggagtcctcatcagctgttctcattgccagtgagatatattcagtattgtagatactacactaatttccaacataagaggcaggaagagttttgattctatccttttttactaaacagttttattatgacactagatacagtaaatttttagaaaaaaataccatttacagtattattgtgaaccatttaacccttttgatccaaggccccggaccaaggggatactgtaatcaggttatgtacaccaacctctgcatcagttgcttctatagagcatcagccctcatgtttcattgtcttaatgtcggggagcagcctggtgtcctgccccaggtgtccgcatttttgcatggtaaggaaaaggcttacttgcccttcagctcataaaagcagaaggtgtgctattcacagtaccatgcgagtagcccacagttaattcccggcagattctttggctgtgttttatctttaatgaacgtttctgactaatattttgttgtaaaccattaagtaatgtaacgcatgtaagatgcttagggtgcctggccaggactccgtggtttcctgttgtgacagtaataatggttataataataaaaatgataaaattgccatcattctatttttatccaaaagtataaattttgctttggcatgaaaagtggtcctcttgactgcattatgcatgcgaggatgaaataaacctagaagtggcagaacactggatttgtgtgtgtggcgctttagggtgctggactgtatggctgagggctggttgggttcctctattggctctgctcaaatgttgcaggatacatagccccaaagatggtctaggagcaatctaagctgtgttactccaaaggacatgaaaaagctcaagagtaaaattaaaattctcaaaaaaaaaccccacgaaatttaaagatggggaaaaaaagatggtataaaaatggctctggttcaataagcagtcacccaaagtaaagactctatcttgaaaggcttttggtgaaaatgaagggatttcatttgaaattacagcatgatgaattttgcatgggtggccagccagctagcccataactgatagatgcattagaagtcagccagcgcataggtgctccctctatattatggagaaagcaaaaccctgcaaatgaccaaatggtgtccaaagagcagcatgacattggcatcagctgaataaccaggggcacatgggggaacgtggatgggaatgatagtgtatctcagcggggggtggggtgacatcgttccctggggacattgggaaggtgggcaggggcaagtgaactcagcactctgcagtgagagggacagtcccatgtgtggcagcattgtcccacttcagatgccaggagtgggctcatcctagaggagcggagttttccgagaggaccatctcctggtttcctgaaggaggtgggtggaaacggctcttgtttgaaagaacttagggaggaccattggcttgccaagagtacagaaattcattatgctgctaatttaacgtggaattccttcatttcataagaacctcaaaataatggtgatacattctagccttaagacatttgaattgccggttgttgaggtgaattttgtttgtcatacatggaaccattttagtcccatttgactcacttcagaccatcttccacacactatgtctgtgcttggagaggggaggtggctctccagtgtaaaacttgaggcattcactagaggtgaaaacttgtcagaatatataaaagcttagattgtagctgttctaaaaacgtaagtactccattgtaatagggtggcatcttcaggtagtgcacatattggcaatagaggtcctgaattgtttttctaagactgatctgagagccattgggccatcaagcctttatatatctgcttctaaaattgccccacctgctctagatggatctttgggcctttcctcagtgttcatgcaaaaattaaatgtcttttttcagcatactgactccaggtgtagttacatctcagtgctgtcttgagtatatattttatctcttatacctgtatctcccaactagaaacagctccagtgtttttaagagaatgtttcttaaaaccaataggaaacttaagcgaggtttcatgacacaacctttcatgtcgtgaaaggcagagggtgactgtgtgtgatgtgcagagtccttggacaggagtcgggggctcctctgtcccactgctgcttcttgagtgggtggagtggtgcttagaggatctccgagaggtccccgcagctctagggagatctgattttgtgttttttgtttaagtacttcacacagaagcctaggtagatttaaaatggggtgctcagggactggggaacaagacggggtggggtggggagatgggcatttggagagtctcatgtagctggagacgttaagagctgagcacaccacaggaaaggagggaggatgctgtgtgagagccatgctgtcaggagcaagcttgctgctcctgtgctgccctggccctggccttgcttgcccatggtgtgtgtgtccagaggtgtgtgtgaggctgccagaacaagtgctgggtctgtcacagagaagtttaaaaaagaaaactaagattataaattagcatctagttccaaaaccaaaaaaagtgcctgtggatgtatataaaattaagatgataagaaagtgctcctgagaaggctcttgccagaagcctgatgtgagtgtgtggcacctgtgatggcagggctgtgagctgggcttctgtcctcctctgtgtcccggcatggaagccagtataagcatttccaaatgagggaaaagtccttggctcgtttgatccagttgagttgaaagggttgccttggcagcagaggctcctctgatggctgacatcagtcactgcgtctgggcctgagacgtgcatggagggctgtaaagccacggattcccctcgctggagaggctcctgtctgatagcggtagatgaaaaataaggtcgttatgactttggcaacttgcttcatttctttttcatttgacttacaacacacttctctaacatctagcccttttaaatttttaattaatttcaaagcttcctctggccaggtagacttttgtatacagaccaggtgagagcccttttgccttagtgtgaaaatgtaacattttatgcttttaaaatcaatagattcatcaccttagttttttaaaaaaaatctataaatagggtaattgctgaggtgtgcggtttatctttgagatgataaagctaaattatagtcttttgccagagaaactgaggtaactgtcattagaaaaggtttcttaaaatactcacaaagctgttattggcttcttaacttctaaaatttggggggtcttgcatttatttattatttatttatttatttatttagagacagagtctcaccctgttggccaggctggagtgcagtaagtggcacaatctcggctcactgcaacctccgcctccttggttccagcaattcttctgcctcagcctcccgagtagctgggactacaagcggctgccaccacacctggctatttttttttgtatttttagtagagacagggtttcgccatattggccaggctggtcttgaactcctgacctcgtgatccacccgcctcaccctcccaaaatgctgggattacaggcgtaagccactgcacctggcggggtcttgcttattttaaaagaaatattctgattcatattttaggactttttgtcaacgaaattggttttgatccctttgggtaccatttttattgttttatgtagaatgttagaaattaccactaatttacctggcagtgatgtcaaattgactgtaattagcaggtagaaaattatttgtattatattcatctgattcctatactggatgagcaaggagcatgcttcctttgggacattcttacagcagggtgtctctccaacagcccgacagcctcatctttttggttggatacctttgaactccatggttacgtgttaggtccacatttgtgtttttttctagcctacctatagttgttggcctttttgcatataactctcgggtaatattttgaagcatgctgaccatccaggcatatagtattttcaagaaatgactgaggtaggggtgggggtcctggtccggctgatgggggtttgctcagcactgtgccagtggaagcaggtgtattgtgggcagttttgtcattgtcctcaagtccttcgcagacagtgcacagcctgctgtctgcagtcggccagaccaggctcctccccagcacactccctgtgggatggccgctgctcaggacacagtgggacaaagttgggttgataggatattttagattcattttacctttgacaagggcaggccttgaattgggagcagcagccacctggcctcactctggccacaggtgacacttggtccttgctgccacctgcttggggctatgtggctacggctacacaaaagcctgtgcaggttagaagacgactgtggtgtgcagtggtgctctgggagtggagacttcctctgttctcagagactcacccccagccctgaccctagaatttagggatagccaggaagtttctagtttgtgtaacctagaagggtcactttaataaaaattgttatgaactatagtattttagatgatgagtgacttattttaattccactttaacattttactgtgctgttaacttggaagacctgtttgaaattagtcttgatttcacactcatttaatctgctgagcacagggctgttgtcatttgtaaacgcaaacactgtggaggtacttctcgccatcagcttccttctttacaaaaccatcatttcaacatgaaaattatgtcagtttatagaaatatttattgttcaaggtctgtaattgtatttcaaaaacgatgtcgtattcaagttgtgaagggatttgttttgtcaaaaaattaaaaactcaatgtgtatgacgccactctgaagagtaggtgagcgctttgcagtcacagaaggtggcatctgactgcggctcatacaggtcaccctgaagggccacgtgcttttagcagttggctggaatgtgttcactaggttccgttatgtttggtaatatcatcttgaaaagtccctgtaatagatcaaggagactgcattccctgccctgaaggaatgtatttctaaggcaaataggcaacttggtactatcttattctgagtagagagtggagaaagtattttcagactgaagaaaactttgaaaagtcaggagctaagctgctcggagctcagtgccgcagcatggctgtggtggacgcgggaaacaacgggaaagttcttgacagagtctgtgtccgctcagtccctgcacttttcctttccaaatgcatctcgttggatatggaatagatcgtagatgttgtagactgagatttgggactatgttgggaccgtacaggtgaatgtgccacctccacaaatggcttctccgagtgagtcacgtcacctggtgcgtggaggtggagcctgcggctggagtaaggcttgctgtgggacgccctcgtactttgctctccttgcgggtggttgccgagccgagagcattggatcctccccgactgtggctagttgtctgtccggtggctgggagggggtgtggtgggaaaaagtcggaatctctgcaatctgtgtcatggactgtactattgtaaggtctatattctgtatgtgggtcccagaccctgatcaggaaatgagcctcatgtgtgtcgttaacatttatatatttccattcaaaatatgtattcagtgtttatttcctcaaaacagactttgttaatgtaggaaatctctccaagtggaaacgtgctaactttttctgtaaatctgaaataaaaggtgctgttccttcctctgacccaggactgctt

SEQ ID NO: 440514 - DNA, 7256 bp, Homo sapiens
  misc_feature (6861)..(6861): n is a, c, g, or t
  misc_feature (6865)..(6865): n is a, c, g, or t
  misc_feature (6874)..(6874): n is a, c, g, or t
  misc_feature (6884)..(6884): n is a, c, g, or t
  misc_feature (6890)..(6890): n is a, c, g, or t
  misc_feature (6892)..(6892): n is a, c, g, or t
agagatgggtctcgccatcaccatgttgcccagtctggtctccaactcctgggctcaagcgatcctcctgccttggtctcccaaagtgctgggattacaggtgtgagcccccacacccggcctgagtgagtgggttctgaatggtgactgttgttgtccatagccttccccctgcttctgagagtggagtccctcccctcatgttggagacctcccaaggtccatgtggtcctataggggctgttcagcctccctagccccttaacgtgtcaggtaatactgtatatattccatgaaatgtgaataattagttatataattcctaagcacttattttaaaaaacagcaatgtgatgcttaactcttcccacctctgttcctgtcccccttagaaaaccactgataactctttttttttttgagacggagtcttgccctgtcgcccaggctggagtgtagtggcctgatctcggctcggctcattgtaacctccgcctcgggtttgagcgattctcctgcctcagcctcctgagtagctgggattataggcgtgcaccaccacgcctggctaattttttgtatctttagtagggacgggtttcaccatgttggccagagtggtcttgaactcctgaccttgtgatccgctcgcctcagcctcccaaagtgctgggattacaggcatgagccaccgtgcctgtcctagaaccactggtaactcttaactgagacaagatttcgccatgttgcccaggctggtctcgaacttctgagctcaagcgatctacctgcctcgtcctcccaaagtgttggaattgcaggtgtgagccactgcacccggcccttgcctcatgtttgaatgataatttacctgggcataaaattctggacacttgtggtggcacgagctgtctgcttttctgtggagactgcgggttgcagacaccagcagccccctattgctgcacgtcaggtgtcctccacctcagtactgtggacatctcgggccgcatagccctgttgcgcgggcatcctgtgcgttgcaggagatgcagcagcatccatgaccgcaacccatcagagtgttctaagaacggaagcatctgggctggatggaatttagcatcaagcagagtcccctttctgttcagagtgttgtaaagtgcataaagatgaagcaggcaccagaaatcctcggcagtgccaacgggaagactccgagctgcgaggtgaaccgcgagtgttctgtgttcctcagcaaagcccagctctccagtagcctgcaggagggggtcatgcagaagtttaacggccacgacgccctgccctttattccagccgacaagctgaaagatcttacttcccgggtgtttaatggagaacccggcgcacacgatgccaaactgcgttttgagtcccaggaaatgaaagggattgggacaccccctaacactacccctatcaaaaatggctctccagaaattaagctgaaaatcaccaaaacatacatgaatgggaagcctctctttgaatcttccatttgtggtgacagtgctgctgatgtgtctcagtcagaagaaaatggacaaaaaccagaaaacaaggcgagaaggaacaggaagaggagcataaaatatgactccttgctggagcagggccttgtcgaagcagctcttgtgtctaagatctcaagtccttcagataaaaagattccagctaagaaagagtcttgtccaaacactggaagagacaaagaccacctgttgaaatacaacgttggtgatttggtgtggtccaaagtgtcgggttacccttggtggccttgcatggtttctgcagatccactccttcacagctataccaaacttaaaggtcagaaaaagagtgcacgccagtatcacgtacagttctttggtgacgccccagaaagagcttggatatttgagaagagcctcgtagcttttgaaggagaaggacagtttgaaaaattatgccaggaaagtgccaagcaggcacccacgaaagctgagaaaattaagctattgaaaccaatttcagggaaattgagggcccagtgggaaatgggcattgttcaagcagaagaagctgcaagcatgtcagtggaggagcggaaagccaagttcacctttctctatgtgggggaccagcttcatctcaaccctcaagtagccaaggaggctggcattgctgcagagtctttgggagaaatggcagaatcctcaggagtcagtgaagaagctgctgaaaaccccaagtctgtgagagaagagtgcattcccatgaagagaaggcggagggccaaactgtgtagctctgcagagaccctggagagtcaccccgacatagggaagagtactcctcaaaagacggcagaggctgaccccagaagaggagtagggtctcctcctgggaggaagaagaccacagtctccatgccacgaagcaggaagggagatgcagcatcccagtttttggtcttctgtcaaaaacacagggatgaggtggtagctgagcacccagatgcttcaggtgaggagattgaagagctgctcaggtcacagtggagtctgctgagtgagaagcagagagcacgctacaacaccaagtttgccctggtggcccctgtccaggctgaagaagactctggtaatgtaaatgggaaaaaaagaaaccacacaaagaggatacaggaccctacagaagatgctgaagctgaggacacacccaggaaaagactcaggacggacaagcacagtcttcggaagagagacacaatcactgacaaaacggccagaacaagctcttacaaggccatggaggcagcctcctcgctcaagagccaggcagcaacgaaaaatctgtctgatgcatgtaaaccactgaagaagcgaaatcgggcttccacggcagcatcttcagctcttgggtttagcaaaagttcatctccttctgcatccttaactgagaatgagggtaaaataataataataacgataaccatggcattggtatgaaggccatttagctgcccacgctgcagtgtgagtaatgctcagacttcataagcgcagcattggtgctcactgccagtgcagatgttttagggcctcttggctaactcagattcatgaaatggacaaacagtgcactatgttagtttatttgagcactttttatacacacgcacacagtgtctgtgtacatgtacagatatacttcagtcttgatgcagtttcatagttcttaaaatctgtctgaagaatgttgtgttctgtgtagccctcacactgtaagagttcacatggaagtaagtctgcgttggttctgaaagggcacagtgtcagttgagctgacatatactgggtggggtggaaggcgactcacacaccacacctgattcctgttgcttccagacctaggctcatggaggaagccaaagatttctttgttctcatgcatttcatggctttggtcctttaaattctggcacatttttagttacttgagtgttgaggtgagtcagaactaccattgtaatatgactcctgtgttctggacttgcagagtacatgatagcaaaataaagccatttggggctgctgcctgccatcattgtaacatgacacttagactttattatcaaacctaaattttttgccgttgccaaaaacaacaaatagccacagaacgtaggtgtgacacttttttgttcggaggtagttttggtttcctgatttttagggattaccttcatagagctttggagttttaatttcttgttatttggttctccgtgatgctgtttttctcattgtagacatgggtcctgtttttgtcatgtttatgaggagatgataactgggggcccttttggaacagggtagtgaggcaagggttggacaggccccttactcttgctgagtcagaaggcggcacttctggccaggtctctgccatggtccccaggaaggatggggtgtgcctcagttgtttccactcattagaggagtgtaggccttccagtgcaggaaggtcagggacctaggcaacctgggcggggctcatagagctctgcggcttgccactctgaatcctcagcgaccactcctccgagtgggattttctgcagggactcaaaccaactcagtggtggtcgagacctgttcacggatggtgggactggggctgctttacagtttgatacgtgtagataattaagcattttgtgatgtttggacacactggagaaaaggcagtaagaattatttactgaaacatctaggagcttactgaaatatgaaaaggcaaattttatacaaattatttttcctttttcctttctttcttgtccaagttcaggttaaaatcttagaaaattaaatgaaaggtcatttacagttccaaagaagaatattaaacatttttcacttaagttgagatttttgctttaaagagcttttaatgagtttttctgttatcataattttggtccggttattcacttgagttgttgcttatactgttgtcaggtacagtagagagaacatggagcctgctgagatcttctctgttattcctgatcctaagtcatgtatatcgaaggctttgatttagagtaatgcatgaggccagtgtagcggggtcgaggcctgcccatgagtcaggggagctcagtctccctggcctaggcagttgtcctgaccttgagaagacatagatgaagcattttatcatcattagacttaaattttaattcttcagaatgtcagaagttgataggttgttaaatacatttatataatacattaaatatgtgaaattaatacaccttcctacattttgaaggtgatgcatagatcccatagtgtgcatcatgttccttatatgaaaacgtttaaattactgggtcttttccattaaactacttttgtatggcttagataaatcttccattagtgttcatttttatagaattatgctgttaaaactactttaggtgaacaaataaacttgtctattatatattaacgcgactgaactacagtaaatgtttgtgatgtttccaatgctgaatgcctgttagcatatgaggcaaagtgtagtgttataaaaaacagcctgttgactgctgggcccgattctgatatgagttaggtgaccatgagaattgctgtttgaggtccacactgacacacacccattgggtcacaccccctttgcatgtttgtatttcctccctttcatcacatttgtttgaaataaggtacttttatagggttggtatttcagaacactttaggtcatgttgtagtttaaattcttcttgaaaaaggtatatgtgataaataaaaatttttattggaataattattacatggtactacatcaccctgaggaagagaataaattaaaattacacacttgcatgacaaaggcctgtgaaggaattaatgtgatttaagtgttttgtaacttcattttttattcctttagtagagcaaattcttatttttttcgccttcactggtaacagcttttgtgggagcccacaccagtcaagttggatttgaacccagctgctctgtactgcacttagaatgatgtaatattccaggatgctgctgcaggtggcgtatcatcgtacacactcagtgacatttctatcacaatcattttatggaagatgtgtgataatctgtttttactggtattaataaacacatacaatgaagaaaacagataacaaattttaagaccaaggtaagataactaatcaaggccatttaatccgtcacattcatctcataatagaaacacgttcatattccagtggtcaatgtagatttcaagttgaaaggcagtccctttagttgggggctgtccagagctgcagcagggctttgcacggaaggggtggccctgttagagttgcttctcctctagtttgtaacttactggacttttgtggaaaatatcagcgtcgctaccctcagaaacaaactaacagcacacgttaggaggagtcctcatcagctgttctcattgccagtgagatatattcagtattgtagatactacactaatttccaacataagaggcaggaagagttttgattctatccttttttactaaacagttttattatgacactagatacagtaaatttttagaaaaaaataccatttacagtattattgtgaaccatttaacccttttgatccaaggccccggaccaaggggatactgtaatcaggttatgtacaccaacctctgcatcagttgcttctatagagcatcagccctcatgtttcattgtcttaatgtcggggagcagcctggtgtcctgccccaggtgtccgcatttttgcatggtaaggaaaaggcttacttgcccttcagctcataaaagcagaaggtgtgctattcacagtaccatgcgagtagcccacagttaattcccggcagattctttggctgtgttttatctttaatgaacgtttctgactaatattttgttgtaaaccattaagtaatgtaacgcatgtaagatgcttagggtgcctggccaggactccgtggtttcctgttgtgacagtaataatggttataataataaaaatgataaaattgccatcattctatttttatccaaaagtataaattttgctttggcatgaaaagtggtcctcttgactgcattatgcatgcgaggatgaaataaacctagaagtggcagaacaaaaaaaaaaaaaaaaaaaaaaaaaaaaaaaaaaaaaaaaaaaaaaaaaaaaaaaaaaaaaaaaaaaaaaaaaaaaaaaaaaaaaaaaaaacaaaaaatnaaanaaaaaaaanaaaaaaaaanaaaaananaaaaaaaaaaaaaaaaaaaaaagagggggggggcggcgcaaccacaaatcactcccccagacgggacagacaagctaggcagcaaccatatagtttctatagagtaagggggaggactaaagaaaaagggtagtatacaaagattagaaaagcggaggcggtgagcaaccactaaaataaacgagaggaggagacgaggacacacaaaaggcggacagcacatacaagaagaaacacacaacaactgtgggggagatgaacaaggaggagaaacacacaagcaacaaagaaaaacggggaggagaagaaaaaaaagagaaggataagggggagaaaacaaaaacaaagatggcgagaagtaaaa

SEQ ID NO: 440515 - DNA, 8965 bp, Homo sapiens
  misc_feature (12)..(12): n is a, c, g, or t
  misc_feature (86)..(86): n is a, c, g, or t
  misc_feature (8615)..(8615): n is a, c, g, or t
  misc_feature (8619)..(8619): n is a, c, g, or t
  misc_feature (8628)..(8628): n is a, c, g, or t
  misc_feature (8638)..(8638): n is a, c, g, or t
  misc_feature (8644)..(8644): n is a, c, g, or t
  misc_feature (8646)..(8646): n is a, c, g, or t
gggaggcgcggnggcggggtcggcgccgcgcgcgagagcctcggcctggccgcgctgcgcccgccgccgccgccgccccctccccncctgggccctaccgccgcacggccccggccccctcccagcctgccgctccggagagccgcccgccgaggatgcgacgcaccgcagtgttctaagaacggaagcatctgggctggatggaatttagcatcaagcagagtcccctttctgttcagagtgttgtaaagtgcataaagatgaagcaggcaccagaaatcctcggcagtgccaacgggaagactccgagctgcgaggtgaaccgcgagtgttctgtgttcctcagcaaagcccagctctccagtagcctgcaggagggggtcatgcagaagtttaacggccacgacgccctgccctttattccagccgacaagctgaaagatcttacttcccgggtgtttaatggagaacccggcgcacacgatgccaaactgcgttttgagtcccaggaaatgaaagggattgggacaccccctaacactacccctatcaaaaatggctctccagaaattaagctgaaaatcaccaaaacatacatgaatgggaagcctctctttgaatcttccatttgtggtgacagtgctgctgatgtgtctcagtcagaagaaaatggacaaaaaccagaaaacaaggcgagaaggaacaggaagaggagcataaaatatgactccttgctggagcagggccttgtcgaagcagctcttgtgtctaagatctcaagtccttcagataaaaagattccagctaagaaagagtcttgtccaaacactggaagagacaaagaccacctgttgaaatacaacgttggtgatttggtgtggtccaaagtgtcgggttacccttggtggccttgcatggtttctgcagatccactccttcacagctataccaaacttaaaggtcagaaaaagagtgcacgccagtatcacgtacagttctttggtgacgccccagaaagagcttggatatttgagaagagcctcgtagcttttgaaggagaaggacagtttgaaaaattatgccaggaaagtgccaagcaggcacccacgaaagctgagaaaattaagctattgaaaccaatttcagggaaattgagggcccagtgggaaatgggcattgttcaagcagaagaagctgcaagcatgtcagtggaggagcggaaagccaagttcacctttctctatgtgggggaccagcttcatctcaaccctcaagtagccaaggaggctggcattgctgcagagtctttgggagaaatggcagaatcctcaggagtcagtgaagaagctgctgaaaaccccaagtctgtgagagaagagtgcattcccatgaagagaaggcggagggccaaactgtgtagctctgcagagaccctggagagtcaccccgacatagggaagagtactcctcaaaagacggcagaggctgaccccagaagaggagtagggtctcctcctgggaggaagaagaccacagtctccatgccacgaagcaggaagggagatgcagcatcccagtttttggtcttctgtcaaaaacacagggatgaggtggtagctgagcacccagatgcttcaggtgaggagattgaagagctgctcaggtcacagtggagtctgctgagtgagaagcagagagcacgctacaacaccaagtttgccctggtggcccctgtccaggctgaagaagactctggtaatgtaaatgggaaaaaaagaaaccacacaaagaggatacaggaccctacagaagatgctgaagctgaggacacacccaggaaaagactcaggacggacaagcacagtcttcggaagagagacacaatcactgacaaaacggccagaacaagctcttacaaggccatggaggcagcctcctcgctcaagagccaggcagcaacgaaaaatctgtctgatgcatgtaaaccactgaagaagcgaaatcgggcttccacggcagcatcttcagctcttgggtttagcaaaagttcatctccttctgcatccttaactgagaatgagggtaaaataataataataacgataaccatggcattggtatgaaggccatttagctgcccacgctgcagtgtgagtaatgctcagacttcataagcgcagcattggtgctcactgccagtgcagatgttttagggcctcttggctaactcagattcatgaaatggacaaacagtgcactatgttagtttatttgagcactttttatacacacgcacacagtgtctgtgtacatgtacagatatacttcagtcttgatgcagtttcatagttcttaaaatctgtctgaagaatgttgtgttctgtgtagccctcacactgtaagagttcacatggaagtaagtctgcgttggttctgaaagggcacagtgtcagttgagctgacatatactgggtggggtggaaggcgactcacacaccacacctgattcctgttgcttccagacctaggctcatggaggaagccaaagatttctttgttctcatgcatttcatggctttggtcctttaaattctggcacatttttagttacttgagtgttgaggtgagtcagaactaccattgtaatatgactcctgtgttctggacttgcagagtacatgatagcaaaataaagccatttggggctgctgcctgccatcattgtaacatgacacttagactttattatcaaacctaaattttttgccgttgccaaaaacaacaaatagccacagaacgtaggtgtgacacttttttgttcggaggtagttttggtttcctgatttttagggattaccttcatagagctttggagttttaatttcttgttatttggttctccgtgatgctgtttttctcattgtagacatgggtcctgtttttgtcatgtttatgaggagatgataactgggggcccttttggaacagggtagtgaggcaagggttggacaggccccttactcttgctgagtcagaaggcggcacttctggccaggtctctgccatggtccccaggaaggatggggtgtgcctcagttgtttccactcattagaggagtgtaggccttccagtgcaggaaggtcagggacctaggcaacctgggcggggctcatagagctctgcggcttgccactctgaatcctcagcgaccactcctccgagtgggattttctgcagggactcaaaccaactcagtggtggtcgagacctgttcacggatggtgggactggggctgctttacagtttgatacgtgtagataattaagcattttgtgatgtttggacacactggagaaaaggcagtaagaattatttactgaaacatctaggagcttactgaaatatgaaaaggcaaattttatacaaattatttttcctttttcctttctttcttgtccaagttcaggttaaaatcttagaaaattaaatgaaaggtcatttacagttccaaagaagaatattaaacatttttcacttaagttgagatttttgctttaaagagcttttaatgagtttttctgttatcataattttggtccggttattcacttgagttgttgcttatactgttgtcaggtacagtagagagaacatggagcctgctgagatcttctctgttattcctgatcctaagtcatgtatatcgaaggctttgatttagagtaatgcatgaggccagtgtagcggggtcgaggcctgcccatgagtcaggggagctcagtctccctggcctaggcagttgtcctgaccttgagaagacatagatgaagcattttatcatcattagacttaaattttaattcttcagaatgtcagaagttgataggttgttaaatacatttatataatacattaaatatgtgaaattaatacaccttcctacattttgaaggtgatgcatagatcccatagtgtgcatcatgttccttatatgaaaacgtttaaattactgggtcttttccattaaactacttttgtatggcttagataaatcttccattagtgttcatttttatagaattatgctgttaaaactactttaggtgaacaaataaacttgtctattatatattaacgcgactgaactacagtaaatgtttgtgatgtttccaatgctgaatgcctgttagcatatgaggcaaagtgtagtgttataaaaaacagcctgttgactgctgggcccgattctgatatgagttaggtgaccatgagaattgctgtttgaggtccacactgacacacacccattgggtcacaccccctttgcatgtttgtatttcctccctttcatcacatttgtttgaaataaggtacttttatagggttggtatttcagaacactttaggtcatgttgtagtttaaattcttcttgaaaaaggtatatgtgataaataaaaatttttattggaataattattacatggtactacatcaccctgaggaagagaataaattaaaattacacacttgcatgacaaaggcctgtgaaggaattaatgtgatttaagtgttttgtaacttcattttttattcctttagtagagcaaattcttatttttttcgccttcactggtaacagcttttgtgggagcccacaccagtcaagttggatttgaacccagctgctctgtactgcacttagaatgatgtaatattccaggatgctgctgcaggtggcgtatcatcgtacacactcagtgacatttctatcacaatcattttatggaagatgtgtgataatctgtttttactggtattaataaacacatacaatgaagaaaacagataacaaattttaagaccaaggtctcggacagcccgggagacgagccctcggagtccccatacgaaagtgcagacgaaacacaaactgaagtatctgtctcatccaaaaagtctgagcgaggagtgactgccaaaaaggagtatgtgtgccagctgtgtgagaagccgggcagcctcctgctctgtgaaggaccctgctgcggagctttccacctcgcctgccttgggctttcccggaggccagaagggaggttcacctgcagcgagtgtgcctcaggtgtcgcccggcacagtctggggtctgtgaggatgatgagaggacacctgcacagccgtggcccttcctgcctactcaccgggcccaaggagtctcctatctcacgtcagaacacttcctgggtcaggaagacacctggagagtctcccaggccatggcagccccacagcagcacctcacttatgggagtgtctgtctgcctgcccagaatgataagtgactgctccaccactggccagctgctctcaaggaggaaaggcctcttttcataggagccccttctttcaagcttcttgccagttagactgggcctccccagccaggctgcctagtaagattctcctgtatttcaggtgaagctggagctcagatcgcagcaaggtaatccttgatggctggatctttttgctggagaatgcttggactagtgagcaaggttggaaacagggccaggtgctttagcagcgtggctgcctctgaagaggagttgcttgattttagtggctcagaactgcaatttaattcttgttctttgcacctctctctccaccccttctttaactttttgttagggattcactcatgtttcgtgtgtaaagagagcaagacagatgttaagcgctgtgtggtaactcagtgtggaaaattttaccatgaggcttgtgtgaaaaaataccctctgactgtatttgagagccgaggtttccgctgccccctccacagctgtgtgagctgccatgcttccaacccttcaaacccaaggccgtcaaaaggtaaaatgatgcggtgtgtccgctgccccgttgcctatcacagcggggatgcttgtctggcagcaggatgctcagtgatcgcctccaacagcatcatctgcactgcccacttcactgctcggaaggggaagcgacaccacgcccacgtcaacgtgagctggtgcttcgtgtgctccaaaggggggagccttctgtgctgtgagtcctgcccagcggccttccaccctgactgcctgaacatcgagatgcctgacggcagctggttctgcaatgactgcagggctgggaagaagctgcacttccaggatatcatttgggtgaaacttgggaactacagatggtggccggcagaagtttgccatcccaaaaatgttcccccaaatattcagaaaatgaagcacgagattggagaattccctgtgtttttctttgggtctaaagattattactggacgcatcaggcgcgagtgttcccgtacatggagggggaccggggcagccgctaccagggggtcagagggatcggaagagtcttcaaaaacgcactgcaagaagctgaagctcgttttcgtgaaattaagcttcagagggaagcccgagaaacacaggagagcgagcgcaagcccccaccatacaagcacatcaaggtgaataagccttacgggaaagtccagatctacacagcggatatttcagaaatccctaagtgcaactgcaagcccacagatgagaatccttgtggctttgattcggagtgtctgaacaggatgctgatgtttgagtgccacccgcaggtgtgtcccgcgggcgagttctgccagaaccagtgcttcaccaagcgccagtacccagagaccaagatcatcaagacagatggcaaagggtggggcctggtcgccaagagggacatcagaaagggagaatttgttaacgagtacgttggggagctgatcgacgaggaggagtgcatggcgagaatcaagcacgcacacgagaacgacatcacccacttctacatgctcactatagacaaggaccgtataatagacgctggccccaaaggaaactactctcgatttatgaatcacagctgccagcccaactgtgagaccctcaagtggacagtgaatggggacactcgtgtgggcctgtttgccgtctgtgacattcctgcagggacggagctgacttttaactacaacctcgattgtctgggcaatgaaaaaacggtctgccggtgtggagcctccaattgcagtggattcctcggggatagaccaaagacctcgacgaccctttcatcagaggaaaagggcaaaaagaccaagaagaaaacgaggcggcgcagagcaaaaggggaagggaagaggcagtcagaggacgagtgcttccgctgcggtgatggcgggcagctggtgctgtgtgaccgcaagttctgcaccaaggcctaccacctgtcctgcctgggccttggcaagcggcccttcgggaagtgggaatgtccttggcatcattgtgacgtgtgtggcaaaccttcgacttcattttgccacctctgccccaattcgttctgtaaggagcaccaggacgggacagccttcagctgcaccccggacgggcggtcctactgctgtgagcatgacttaggggcggcatcggtcagaagcaccaagactgagaagccccccccagagccagggaagccgaaggggaagaggcggcggcggaggggctggcggagagtcacagagggcaaatagcgccaggcggccgcttggccggatccaggggcggtgcagggcggccggccctgcctgcgggagagggcgagcatgaactggcccggaggacccagctcgagccgccaggacacagacgtacaggcctcctcgggagggagcgcctccccaccactgagccatcctcagcagcgtccgctgcgtctgcactgatgaccgtctgagcccagctcagcgttcctggacaaacagcctcactcctcagcgttaccgccacacttgaatttctccgaatgtcaaggttccctcccactctatttttttaggttaaagttaattggcatatggaatgttttaatctcctctgaaatgtgtagcgtaggcttttcccaagggtcgctagaaactcgtcttcgcgttgccccctttctggctctcagcgccgtcgccactcgggagaggctgggtgaggcccgtgtgaggactgaccctggattcctcgaaactgccattgtgatcattactctgctctttggaaatggctgtatcatttttttgtactaatgtgaattgttcctcagaaacgcttcttttccatcctagtgagaagctggccctgcaggtggtggcagcaatggtgttgtaagatttcctcccgtagttttttctcctcatggatttgaatgaaatgccaataacacgtccactttcaacgtgtagtttacgcggagcactttcgaggcctggccgggttgggcctacttctcacctgggcctatcttctgaactcgctaggttcttatcaacatttgggggataactttgtatatttttttcatttggcttttctttaccagtttctgatttttattctcaatatatttttgctaaacctatttcacaaatcaaaaaaaaaaaaaaaaaaaaaaaaaaaaaaaaaaaaaaaaaaaaaaaaaaaaaaaaaaaaaacaaaaaatnaaanaaaaaaaanaaaaaaaaanaaaaananaaaaaaaaaaaaaaaacttggggcccctttggcccaatcacttttaaacttggccaattttttttgacgcgccccaatttgggtctcattgggaaattgccccttatgggggccttcttaacattacctggcgcggtttttaaaagctataaatggggaaaccccggggggtccccaaattaaaagctttgcacaaaatccccctttccccggtgggcaaatcccaaaggccccgtcccgagcggtctttccaaaaggttgccccctctaataggcaaagggatattttacggcgttaaattttggtaaacataccgtt

SEQ ID NO: 440516 - DNA, 4236 bp, Homo sapiens
gctcggtcctctccacgtggtcctgacctgtcctctgtgagcaagagaaacaggactggtttgggggtgtcctgtctcagtggacacaggacaccacggttttcagtacaacaaggaacacaacttgttcaatgtgctttatgatggtgaaaattccctttaaaaataacatgcgattgctaacacttgaccgaatatatcacttgaccttacagggaccgtataatagacgctggccccaaaggaaactactctcgatttatgaatcacagctgccagcccaactgtgagaccctcaagtggacagtgaatggggacactcgtgtgggcctgtttgccgtctgtgacattcctgcagggacggagctgacttttaactacaacctcgattgtctgggcaatgaaaaaacggtctgccggtgtggagcctccaattgcagtggattcctcggggatagaccaaagacctcgacgaccctttcatcagaggaaaagggcaaaaagaccaagaagaaaacgaggcggcgcagagcaaaaggggaagggaagaggcagtcagaggacgagtgcttccgctgcggtgatggcgggcagctggtgctgtgtgaccgcaagttctgcaccaaggcctaccacctgtcctgcctgggccttggcaagcggcccttcgggaagtgggaatgtccttggcatcattgtgacgtgtgtggcaaaccttcgacttcattttgccacctctgccccaattcgttctgtaaggagcaccaggacgggacagccttcagctgcaccccggacgggcggtcctactgctgtgagcatgacttaggggcggcatcggtcagaagcaccaagactgagaagccccccccagagccagggaagccgaaggggaagaggcggcggcggaggggctggcggagagtcacagagggcaaatagcgccaggcggccgcttggccggatccaggggcggtgcagggcggccggccctgcctgcgggagagggcgagcatgaactggcccggaggacccagctcgagccgccaggacacagacgtacaggcctcctcgggagggagcgcctccccaccactgagccatcctcagcagcgtccgctgcgtctgcactgatgaccgtctgagcccagctcagcgttcctggacaaacagcctcactcctcagcgttaccgccacacttgaatttctccgaatgtcaaggttccctcccactctatttttttaggttaaagttaattggcatatggaatgttttaatctcctctgaaatgtgtagcgtaggcttttcccaagggtcgctagaaactcgtcttcgcgttgccccctttctggctctcagcgccgtcgccactcgggagaggctgggtgaggcccgtgtgaggactgaccctggattcctcgaaactgccattgtgatcattactctgctctttggaaatggctgtatcatttttttgtactaatgtgaattgttcctcagaaacgcttcttttccatcctagtgagaagctggccctgcaggtggtggcagcaatggtgttgtaagatttcctcccgtagttttttctcctcatggatttgaatgaaatgccaataacacgtccactttcaacgtgtagtttacgcggagcactttcgaggcctggccgggttgggcctacttctcacctgggcctatcttctgaactcgctaggttcttatcaacatttgggggataactttgtatatttttttcatttggcttttctttaccagtttctgatttttattctcaatatatttttgctaaacctatttcacaaatcaccaccgactgaagtgtgtgtttactgatgcggccctgagctccatggcgaaaggagtgactttgcagggcgtgagaccgcagtctgcttagagcacaggaagtgacaacttagggagccccgtagggcgctgcaggccccggggaccccagcacgtgggtctaaagagagacggagtctagctctcctgccacccagagtggcttccatctcagcactctgtgggtctggtgatggaagatgcagtctctgctgatcacatgtgccctctgccagggcacctactgagaggtgcggtcctgggggtggaggcctgcctggcaggtgtgcgtgcctcgtacgtgtgttatgggcactggtctaggccaggtatgacacccactctcctgtgagatttcactttagtttttaaaaggtccagttctacagagtgagacctatctatctgagtactacatatgttttaagacttggttctttttttgagggatccttgaccctgggaagtctggagcaccctgagaagggggcaccatgtgtgcctttgcccacgtgtcctgaggggctgcttgtctgggagggagggagagaacattcagcagcaggtgcttttttatggccttttcttaaaataacctaagggggacacatccatcttgcagagaagtttacagaactccccttgaaaactgctgctgaggctcctgttaaattttctgtggcatcttttatgccttggtaaaaactgcagtgtctttggacctgagagtggctactccgtggttttgtgacctgtaagcgtggggttcaggggtgtgtggccctgcagggtcccacgcctccctgagcactgactggaagtttcactggctggtggctgtcccttctcccatcagggtccccagcaaagttaactacacagaggacccaggggaaacgagctgtgtagccactgacttgctcgcgcggccgtggcctctgaggggcactcgccggttaagacagggtgggagtagtgctttccagttcagactctaacttctcccaaagtgtcctaagaaaatactggatcggctcatagatttatgctccttatgatgccctaacttggaaggttgttctagggacaggccgggcagtgtccccacacacaccttagagtcgaaggccccagggccccgctgtcacttgcccaaaagatcccttccggcaggtaagggactaccaatgcttacgtcaaaacagcagaatcggctttgcagtgcactttggggagcagatattaacttatttttgtgttggacagtagtgaaatcttgtgatttttaatcgctttgataatacttccaaattttatgatttttctgaaggaaataatgcaaacattttaaatatgtttctccccctttccaaaaactgttaaactaatgagcaagtaacactaactttgaatgtctctacaatacccgttgataactcagtggagccaggctttggggtagcggccctgagcttgcagggtttctcgccactggggctgaccacgcccccagctgtgaccgtgggtgtggctggctctcggccctgcccagctttgttctgaggacgtggtgacttcctgaacatcagcttcaatcctccatcattaatgtgaagcaaaacacaaaaaccgccccaatccctcaggattccttggcatccgaaaccagcatctgcacctaaacccatacccacccgtgtgcgcccacagggggatgtgtccgaatgggcagcttaaaatgtggtcacctgtgggggaaactcttcaggcacctgaagtgagaacccagctgtccgtcctcaggccggcctttcttccggcgacacccgtccatggctggctgggtccccttcgcagtgtttgtctgtcttgacatctaaaccccggcgtgtgcagtgcccatcttccaggactaccttattttccagaattaaacctgttttataattcaagttaatgcaaatgactgtcagttgccaaatatcttgatcctatgagtgtagttgatgactgtttgttagtcagtagagtaaaatgctgtgtccacggggtgtcacagcctcaccataccctgttgaggtgtgaaatgccccgtcagaaattaaatacaaacttaaatgtgcctattggtgtctaaacttcatacaatgtaaggtcagattccttttaggaatactgggtgctgtcaccaggtttgatagttagacttaaaaacttgaaattcactttttggggggagggatatactgaaatagagagttgagacttgccagttgggggaaaatagcatttaaaatggaaagctgtgtttggaaaattgtgtatgagtatttttgtattaaaaacattttaaaggcttttttcttaa

SEQ ID NO: 440517 - DNA, 4039 bp, Homo sapiens
ctacgggtaatgatgacacacgatagagaaaagtgttggccatgggtgcgagagggtggtccctaacgtgacagagcttttacagagtcatgccagagaagatgaatacccgagttgaaaatcagtcccttgggagagggcaggtcacatggaaatcagcacagcagcccctgcctgtccacgccgcgctgggggacactcctgcacccggcacagctcctctcagttgccgaaacataaagagacgctaacaggtggtccttaggggcctggcaggtactgtggagtcaacaggccctgccagggagcccgcccgggctgtggtagacagtttgtctgcccgtcctgttcgctggagccagcactattttgtgttcatttgacctgacagttgtaagtcatcttcaaccacgataatgttgaagtcgtgattccatcacttctgtgtgctcacatcttgtgttctgttgcagggaagtgggaatgtccttggcatcattgtgacgtgtgtggcaaaccttcgacttcattttgccacctctgccccaattcgttctgtaaggagcaccaggacgggacagccttcagctgcaccccggacgggcggtcctactgctgtgagcatgacttaggggcggcatcggtcagaagcaccaagactgagaagccccccccagagccagggaagccgaaggggaagaggcggcggcggaggggctggcggagagtcacagagggcaaatagcgccaggcggccgcttggccggatccaggggcggtgcagggcggccggccctgcctgcgggagagggcgagcatgaactggcccggaggacccagctcgagccgccaggacacagacgtacaggcctcctcgggagggagcgcctccccaccactgagccatcctcagcagcgtccgctgcgtctgcactgatgaccgtctgagcccagctcagcgttcctggacaaacagcctcactcctcagcgttaccgccacacttgaatttctccgaatgtcaaggttccctcccactctatttttttaggttaaagttaattggcatatggaatgttttaatctcctctgaaatgtgtagcgtaggcttttcccaagggtcgctagaaactcgtcttcgcgttgccccctttctggctctcagcgccgtcgccactcgggagaggctgggtgaggcccgtgtgaggactgaccctggattcctcgaaactgccattgtgatcattactctgctctttggaaatggctgtatcatttttttgtactaatgtgaattgttcctcagaaacgcttcttttccatcctagtgagaagctggccctgcaggtggtggcagcaatggtgttgtaagatttcctcccgtagttttttctcctcatggatttgaatgaaatgccaataacacgtccactttcaacgtgtagtttacgcggagcactttcgaggcctggccgggttgggcctacttctcacctgggcctatcttctgaactcgctaggttcttatcaacatttgggggataactttgtatatttttttcatttggcttttctttaccagtttctgatttttattctcaatatatttttgctaaacctatttcacaaatcaccaccgactgaagtgtgtgtttactgatgcggccctgagctccatggcgaaaggagtgactttgcagggcgtgagaccgcagtctgcttagagcacaggaagtgacaacttagggagccccgtagggcgctgcaggccccggggaccccagcacgtgggtctaaagagagacggagtctagctctcctgccacccagagtggcttccatctcagcactctgtgggtctggtgatggaagatgcagtctctgctgatcacatgtgccctctgccagggcacctactgagaggtgcggtcctgggggtggaggcctgcctggcaggtgtgcgtgcctcgtacgtgtgttatgggcactggtctaggccaggtatgacacccactctcctgtgagatttcactttagtttttaaaaggtccagttctacagagtgagacctatctatctgagtactacatatgttttaagacttggttctttttttgagggatccttgaccctgggaagtctggagcaccctgagaagggggcaccatgtgtgcctttgcccacgtgtcctgaggggctgcttgtctgggagggagggagagaacattcagcagcaggtgcttttttatggccttttcttaaaataacctaagggggacacatccatcttgcagagaagtttacagaactccccttgaaaactgctgctgaggctcctgttaaattttctgtggcatcttttatgccttggtaaaaactgcagtgtctttggacctgagagtggctactccgtggttttgtgacctgtaagcgtggggttcaggggtgtgtggccctgcagggtcccacgcctccctgagcactgactggaagtttcactggctggtggctgtcccttctcccatcagggtccccagcaaagttaactacacagaggacccaggggaaacgagctgtgtagccactgacttgctcgcgcggccgtggcctctgaggggcactcgccggttaagacagggtgggagtagtgctttccagttcagactctaacttctcccaaagtgtcctaagaaaatactggatcggctcatagatttatgctccttatgatgccctaacttggaaggttgttctagggacaggccgggcagtgtccccacacacaccttagagtcgaaggccccagggccccgctgtcacttgcccaaaagatcccttccggcaggtaagggactaccaatgcttacgtcaaaacagcagaatcggctttgcagtgcactttggggagcagatattaacttatttttgtgttggacagtagtgaaatcttgtgatttttaatcgctttgataatacttccaaattttatgatttttctgaaggaaataatgcaaacattttaaatatgtttctccccctttccaaaaactgttaaactaatgagcaagtaacactaactttgaatgtctctacaatacccgttgataactcagtggagccaggctttggggtagcggccctgagcttgcagggtttctcgccactggggctgaccacgcccccagctgtgaccgtgggtgtggctggctctcggccctgcccagctttgttctgaggacgtggtgacttcctgaacatcagcttcaatcctccatcattaatgtgaagcaaaacacaaaaaccgccccaatccctcaggattccttggcatccgaaaccagcatctgcacctaaacccatacccacccgtgtgcgcccacagggggatgtgtccgaatgggcagcttaaaatgtggtcacctgtgggggaaactcttcaggcacctgaagtgagaacccagctgtccgtcctcaggccggcctttcttccggcgacacccgtccatggctggctgggtccccttcgcagtgtttgtctgtcttgacatctaaaccccggcgtgtgcagtgcccatcttccaggactaccttattttccagaattaaacctgttttataattcaagttaatgcaaatgactgtcagttgccaaatatcttgatcctatgagtgtagttgatgactgtttgttagtcagtagagtaaaatgctgtgtccacggggtgtcacagcctcaccataccctgttgaggtgtgaaatgccccgtcagaaattaaatacaaacttaaatgtgcctattggtgtctaaacttcatacaatgtaaggtcagattccttttaggaatactgggtgctgtcaccaggtttgatagttagacttaaaaacttgaaattcactttttggggggagggatatactgaaatagagagttgagacttgccagttgggggaaaatagcatttaaaatggaaagctgtgtttggaaaattgtgtatgagtatttttgtattaaaaacattttaaaggcttttttcttaa

SEQ ID NO: 440518 - DNA, 6685 bp, Homo sapiens
  misc_feature (12)..(12): n is a, c, g, or t
  misc_feature (86)..(86): n is a, c, g, or t
gggaggcgcggnggcggggtcggcgccgcgcgcgagagcctcggcctggccgcgctgcgcccgccgccgccgccgccccctccccncctgggccctaccgccgcacggccccggccccctcccagcctgccgctccggagagccgcccgccgaggatgcgacgcaccgcagtgttctaagaacggaagcatctgggctggatggaatttagcatcaagcagagtcccctttctgttcagagtgttgtaaagtgcataaagatgaagcaggcaccagaaatcctcggcagtgccaacgggaagactccgagctgcgaggtgaaccgcgagtgttctgtgttcctcagcaaagcccagctctccagtagcctgcaggagggggtcatgcagaagtttaacggccacgacgccctgccctttattccagccgacaagctgaaagatcttacttcccgggtgtttaatggagaacccggcgcacacgatgccaaactgcgttttgagtcccaggaaatgaaagggattgggacaccccctaacactacccctatcaaaaatggctctccagaaattaagctgaaaatcaccaaaacatacatgaatgggaagcctctctttgaatcttccatttgtggtgacagtgctgctgatgtgtctcagtcagaagaaaatggacaaaaaccagaaaacaaggcgagaaggaacaggaagaggagcataaaatatgactccttgctggagcagggccttgtcgaagcagctcttgtgtctaagatctcaagtccttcagataaaaagattccagctaagaaagagtcttgtccaaacactggaagagacaaagaccacctgttgaaatacaacgttggtgatttggtgtggtccaaagtgtcgggttacccttggtggccttgcatggtttctgcagatccactccttcacagctataccaaacttaaaggtcagaaaaagagtgcacgccagtatcacgtacagttctttggtgacgccccagaaagagcttggatatttgagaagagcctcgtagcttttgaaggagaaggacagtttgaaaaattatgccaggaaagtgccaagcaggcacccacgaaagctgagaaaattaagctattgaaaccaatttcagggaaattgagggcccagtgggaaatgggcattgttcaagcagaagaagctgcaagcatgtcagtggaggagcggaaagccaagttcacctttctctatgtgggggaccagcttcatctcaaccctcaagtagccaaggaggctggcattgctgcagagtctttgggagaaatggcagaatcctcaggagtcagtgaagaagctgctgaaaaccccaagtctgtgagagaagagtgcattcccatgaagagaaggcggagggccaaactgtgtagctctgcagagaccctggagagtcaccccgacatagggaagagtactcctcaaaagacggcagaggctgaccccagaagaggagtagggtctcctcctgggaggaagaagaccacagtctccatgccacgaagcaggaagggagatgcagcatcccagtttttggtcttctgtcaaaaacacagggatgaggtggtagctgagcacccagatgcttcaggtgaggagattgaagagctgctcaggtcacagtggagtctgctgagtgagaagcagagagcacgctacaacaccaagtttgccctggtggcccctgtccaggctgaagaagactctggtaatgtaaatgggaaaaaaagaaaccacacaaagaggatacaggaccctacagaagatgctgaagctgaggacacacccaggaaaagactcaggacggacaagcacagtcttcggaagagagacacaatcactgacaaaacggccagaacaagctcttacaaggccatggaggcagcctcctcgctcaagagccaggcagcaacgaaaaatctgtctgatgcatgtaaaccactgaagaagcgaaatcgggcttccacggcagcatcttcagctcttgggtttagcaaaagttcatctccttctgcatccttaactgagaatgagggtaaaataataataataacgataaccatggcattggtatgaaggccatttagctgcccacgctgcagtgtgagtaatgctcagacttcataagcgcagcattggtgctcactgccagtgcagatgttttagggcctcttggctaactcagattcatgaaatggacaaacagtgcactatgttagtttatttgagcactttttatacacacgcacacagtgtctgtgtacatgtacagatatacttcagtcttgatgcagtttcatagttcttaaaatctgtctgaagaatgttgtgttctgtgtagccctcacactgtaagagttcacatggaagtaagtctgcgttggttctgaaagggcacagtgtcagttgagctgacatatactgggtggggtggaaggcgactcacacaccacacctgattcctgttgcttccagacctaggctcatggaggaagccaaagatttctttgttctcatgcatttcatggctttggtcctttaaattctggcacatttttagttacttgagtgttgaggtgagtcagaactaccattgtaatatgactcctgtgttctggacttgcagagtacatgatagcaaaataaagccatttggggctgctgcctgccatcattgtaacatgacacttagactttattatcaaacctaaattttttgccgttgccaaaaacaacaaatagccacagaacgtaggtgtgacacttttttgttcggaggtagttttggtttcctgatttttagggattaccttcatagagctttggagttttaatttcttgttatttggttctccgtgatgctgtttttctcattgtagacatgggtcctgtttttgtcatgtttatgaggagatgataactgggggcccttttggaacagggtagtgaggcaagggttggacaggccccttactcttgctgagtcagaaggcggcacttctggccaggtctctgccatggtccccaggaaggatggggtgtgcctcagttgtttccactcattagaggagtgtaggccttccagtgcaggaaggtcagggacctaggcaacctgggcggggctcatagagctctgcggcttgccactctgaatcctcagcgaccactcctccgagtgggattttctgcagggactcaaaccaactcagtggtggtcgagacctgttcacggatggtgggactggggctgctttacagtttgatacgtgtagataattaagcattttgtgatgtttggacacactggagaaaaggcagtaagaattatttactgaaacatctaggagcttactgaaatatgaaaaggcaaattttatacaaattatttttcctttttcctttctttcttgtccaagttcaggttaaaatcttagaaaattaaatgaaaggtcatttacagttccaaagaagaatattaaacatttttcacttaagttgagatttttgctttaaagagcttttaatgagtttttctgttatcataattttggtccggttattcacttgagttgttgcttatactgttgtcaggtacagtagagagaacatggagcctgctgagatcttctctgttattcctgatcctaagtcatgtatatcgaaggctttgatttagagtaatgcatgaggccagtgtagcggggtcgaggcctgcccatgagtcaggggagctcagtctccctggcctaggcagttgtcctgaccttgagaagacatagatgaagcattttatcatcattagacttaaattttaattcttcagaatgtcagaagttgataggttgttaaatacatttatataatacattaaatatgtgaaattaatacaccttcctacattttgaaggtgatgcatagatcccatagtgtgcatcatgttccttatatgaaaacgtttaaattactgggtcttttccattaaactacttttgtatggcttagataaatcttccattagtgttcatttttatagaattatgctgttaaaactactttaggtgaacaaataaacttgtctattatatattaacgcgactgaactacagtaaatgtttgtgatgtttccaatgctgaatgcctgttagcatatgaggcaaagtgtagtgttataaaaaacagcctgttgactgctgggcccgattctgatatgagttaggtgaccatgagaattgctgtttgaggtccacactgacacacacccattgggtcacaccccctttgcatgtttgtatttcctccctttcatcacatttgtttgaaataaggtacttttatagggttggtatttcagaacactttaggtcatgttgtagtttaaattcttcttgaaaaaggtatatgtgataaataaaaatttttattggaataattattacatggtactacatcaccctgaggaagagaataaattaaaattacacacttgcatgacaaaggcctgtgaaggaattaatgtgatttaagtgttttgtaacttcattttttattcctttagtagagcaaattcttatttttttcgccttcactggtaacagcttttgtgggagcccacaccagtcaagttggatttgaacccagctgctctgtactgcacttagaatgatgtaatattccaggatgctgctgcaggtggcgtatcatcgtacacactcagtgacatttctatcacaatcattttatggaagatgtgtgataatctgtttttactggtattaataaacacatacaatgaagaaaacagataacaaattttaagaccaaggtctcggacagcccgggagacgagccctcggagtccccatacgaaagtgcagacgaaacacaaactgaagtatctgtctcatccaaaaagtctgagcgaggagtgactgccaaaaaggagtatgtgtgccagctgtgtgagaagccgggcagcctcctgctctgtgaaggaccctgctgcggagctttccacctcgcctgccttgggctttcccggaggccagaagggaggttcacctgcagcgagtgtgcctcagggattcactcatgtttcgtgtgtaaagagagcaagacagatgttaagcgctgtgtggtaactcagtgtggaaaattttaccatgaggcttgtgtgaaaaaataccctctgactgtatttgagagccgaggtttccgctgccccctccacagctgtgtgagctgccatgcttccaacccttcaaacccaaggccgtcaaaaggtaaaatgatgcggtgtgtccgctgccccgttgcctatcacagcggggatgcttgtctggcagcaggatgctcagtgatcgcctccaacagcatcatctgcactgcccacttcactgctcggaaggggaagcgacaccacgcccacgtcaacgtgagctggtgcttcgtgtgctccaaaggggggagccttctgtgctgtgagtcctgcccagcggccttccaccctgactgcctgaacatcgagatgcctgacggcagctggttctgcaatgactgcagggctgggaagaagctgcacttccaggatatcatttgggtgaaacttgggaactacagatggtggccggcagaagtttgccatcccaaaaatgttcccccaaatattcagaaaatgaagcacgagattggagaattccctgtgtttttctttgggtctaaagattattactggacgcatcaggcgcgagtgttcccgtacatggagggggaccggggcagccgctaccagggggtcagagggatcggaagagtcttcaaaaacgcactgcaagaagctgaagctcgttttcgtgaaattaagcttcagagggaagcccgagaaacacaggagagcgagcgcaagcccccaccatacaagcacatcaaggtgaataagccttacgggaaagtccagatctacacagcggatatttcagaaatccctaagtgcaactgcaagcccacagatgagaatccttgtggctttgattcggagtgtctgaacaggatgctgatgtttgagtgccacccgcaggtgtgtcccgcgggcgagttctgccagaaccagtgcttcaccaagcgccagtacccagagaccaagatcatcaagacagatggcaaagggtggggcctggtcgccaagagggacatcagaaagggagaatttgttaacgagtacgttggggagctgatcgacgaggaggagtgcatggcgagaatcaagcacgcacacgagaacgacatcacccacttctacatgctcactatagacaaggaccgtataatagacgctggccccaaaggaaactactctcgatttatgaatcacagctgccagcccaactgtgagaccctcaagtggacagtgaatggggacactcgtgtgggcctgtttgccgtctgtgacattcctgcagggacggagctgacttttaactacaacctcgattgtctgggcaatgaaaaaacggtctgccggtgtggagcctccaattgcagtggattcctcggggatagaccaaagaccttgacgaccctttcatcagaggataagggctaaaagaccgagaagttgtgtcgccggagagctgtggcgcgcg

SEQ ID NO: 440519 - DNA, 4136 bp, Homo sapiens
  misc_feature (12)..(12): n is a, c, g, or t
  misc_feature (86)..(86): n is a, c, g, or t
gggaggcgcggnggcggggtcggcgccgcgcgcgagagcctcggcctggccgcgctgcgcccgccgccgccgccgccccctccccncctgggccctaccgccgcacggccccggccccctcccagcctgccgctccggagagccgcccgccgaggatgcgacgcaccgcagtgttctaagaacggaagcatctgggctggatggaatttagcatcaagcagagtcccctttctgttcagagtgttgtaaagtgcataaagatgaagcaggcaccagaaatcctcggcagtgccaacgggaagactccgagctgcgaggtgaaccgcgagtgttctgtgttcctcagcaaagcccagctctccagtagcctgcaggagggggtcatgcagaagtttaacggccacgacgccctgccctttattccagccgacaagctgaaagatcttacttcccgggtgtttaatggagaacccggcgcacacgatgccaaactgcgttttgagtcccaggaaatgaaagggattgggacaccccctaacactacccctatcaaaaatggctctccagaaattaagctgaaaatcaccaaaacatacatgaatgggaagcctctctttgaatcttccatttgtggtgacagtgctgctgatgtgtctcagtcagaagaaaatggacaaaaaccagaaaacaaggcgagaaggaacaggaagaggagcataaaatatgactccttgctggagcagggccttgtcgaagcagctcttgtgtctaagatctcaagtccttcagataaaaagattccagctaagaaagagtcttgtccaaacactggaagagacaaagaccacctgttgaaatacaacgttggtgatttggtgtggtccaaagtgtcgggttacccttggtggccttgcatggtttctgcagatccactccttcacagctataccaaacttaaaggtcagaaaaagagtgcacgccagtatcacgtacagttctttggtgacgccccagaaagagcttggatatttgagaagagcctcgtagcttttgaaggagaaggacagtttgaaaaattatgccaggaaagtgccaagcaggcacccacgaaagctgagaaaattaagctattgaaaccaatttcagggaaattgagggcccagtgggaaatgggcattgttcaagcagaagaagctgcaagcatgtcagtggaggagcggaaagccaagttcacctttctctatgtgggggaccagcttcatctcaaccctcaagtagccaaggaggctggcattgctgcagagtctttgggagaaatggcagaatcctcaggagtcagtgaagaagctgctgaaaaccccaagtctgtgagagaagagtgcattcccatgaagagaaggcggagggccaaactgtgtagctctgcagagaccctggagagtcaccccgacatagggaagagtactcctcaaaagacggcagaggctgaccccagaagaggagtagggtctcctcctgggaggaagaagaccacagtctccatgccacgaagcaggaagggagatgcagcatcccagtttttggtcttctgtcaaaaacacagggatgaggtggtagctgagcacccagatgcttcaggtgaggagattgaagagctgctcaggtcacagtggagtctgctgagtgagaagcagagagcacgctacaacaccaagtttgccctggtggcccctgtccaggctgaagaagactctggtaatgtaaatgggaaaaaaagaaaccacacaaagaggatacaggaccctacagaagatgctgaagctgaggacacacccaggaaaagactcaggacggacaagcacagtcttcggaagagagacacaatcactgacaaaacggccagaacaagctcttacaaggccatggaggcagcctcctcgctcaagagccaggcagcaacgaaaaatctgtctgatgcatgtaaaccactgaagaagcgaaatcgggcttccacggcagcatcttcagctcttgggtttagcaaaagttcatctccttctgcatccttaactgagaatgagggtaaaataataataataacgataaccatggcattggtatgaaggccatttagctgcccacgctgcagtgtgagtaatgctcagacttcataagcgcagcattggtgctcactgccagtgcagatgttttagggcctcttggctaactcagattcatgaaatggacaaacagtgcactatgttagtttatttgagcactttttatacacacgcacacagtgtctgtgtacatgtacagatatacttcagtcttgatgcagtttcatagttcttaaaatctgtctgaagaatgttgtgttctgtgtagccctcacactgtaagagttcacatggaagtaagtctgcgttggttctgaaagggcacagtgtcagttgagctgacatatactgggtggggtggaaggcgactcacacaccacacctgattcctgttgcttccagacctaggctcatggaggaagccaaagatttctttgttctcatgcatttcatggctttggtcctttaaattctggcacatttttagttacttgagtgttgaggtgagtcagaactaccattgtaatatgactcctgtgttctggacttgcagagtacatgatagcaaaataaagccatttggggctgctgcctgccatcattgtaacatgacacttagactttattatcaaacctaaattttttgccgttgccaaaaacaacaaatagccacagaacgtaggtgtgacacttttttgttcggaggtagttttggtttcctgatttttagggattaccttcatagagctttggagttttaatttcttgttatttggttctccgtgatgctgtttttctcattgtagacatgggtcctgtttttgtcatgtttatgaggagatgataactgggggcccttttggaacagggtagtgaggcaagggttggacaggccccttactcttgctgagtcagaaggcggcacttctggccaggtctctgccatggtccccaggaaggatggggtgtgcctcagttgtttccactcattagaggagtgtaggccttccagtgcaggaaggtcagggacctaggcaacctgggcggggctcatagagctctgcggcttgccactctgaatcctcagcgaccactcctccgagtgggattttctgcagggactcaaaccaactcagtggtggtcgagacctgttcacggatggtgggactggggctgctttacagtttgatacgtgtagataattaagcattttgtgatgtttggacacactggagaaaaggcagtaagaattatttactgaaacatctaggagcttactgaaatatgaaaaggcaaattttatacaaattatttttcctttttcctttctttcttgtccaagttcaggttaaaatcttagaaaattaaatgaaaggtcatttacagttccaaagaagaatattaaacatttttcacttaagttgagatttttgctttaaagagcttttaatgagtttttctgttatcataattttggtccggttattcacttgagttgttgcttatactgttgtcaggtacagtagagagaacatggagcctgctgagatcttctctgttattcctgatcctaagtcatgtatatcgaaggctttgatttagagtaatgcatgaggccagtgtagcggggtcgaggcctgcccatgagtcaggggagctcagtctccctggcctaggcagttgtcctgaccttgagaagacatagatgaagcattttatcatcattagacttaaattttaattcttcagaatgtcagaagttgataggttgttaaatacatttatataatacattaaatatgtgaaattaatacaccttcctacattttgaaggtgatgcatagatcccatagtgtgcatcatgttccttatatgaaaacgtttaaattactgggtcttttccattaaactacttttgtatggcttagataaatcttccattagtgttcatttttatagaattatgctgttaaaactactttaggtgaacaaataaacttgtctattatatatta

SEQ ID NO: 440520 - DNA, 2626 bp, Homo sapiens
  misc_feature (12)..(12): n is a, c, g, or t
  misc_feature (86)..(86): n is a, c, g, or t
gggaggcgcggnggcggggtcggcgccgcgcgcgagagcctcggcctggccgcgctgcgcccgccgccgccgccgccccctccccncctgggccctaccgccgcacggccccggccccctcccagcctgccgctccggagagccgcccgccgaggatgcgacgcaccgcagtgttctaagaacggaagcatctgggctggatggaatttagcatcaagcagagtcccctttctgttcagagtgttgtaaagtgcataaagatgaagcaggcaccagaaatcctcggcagtgccaacgggaagactccgagctgcgaggtgaaccgcgagtgttctgtgttcctcagcaaagcccagctctccagtagcctgcaggagggggtcatgcagaagtttaacggccacgacgccctgccctttattccagccgacaagctgaaagatcttacttcccgggtgtttaatggagaacccggcgcacacgatgccaaactgcgttttgagtcccaggaaatgaaagggattgggacaccccctaacactacccctatcaaaaatggctctccagaaattaagctgaaaatcaccaaaacatacatgaatgggaagcctctctttgaatcttccatttgtggtgacagtgctgctgatgtgtctcagtcagaagaaaatggacaaaaaccagaaaacaaggcgagaaggaacaggaagaggagcataaaatatgactccttgctggagcagggccttgtcgaagcagctcttgtgtctaagatctcaagtccttcagataaaaagattccagctaagaaagagtcttgtccaaacactggaagagacaaagaccacctgttgaaatacaacgttggtgatttggtgtggtccaaagtgtcgggttacccttggtggccttgcatggtttctgcagatccactccttcacagctataccaaacttaaaggtcagaaaaagagtgcacgccagtatcacgtacagttctttggtgacgccccagaaagagcttggatatttgagaagagcctcgtagcttttgaaggagaaggacagtttgaaaaattatgccaggaaagtgccaagcaggcacccacgaaagctgagaaaattaagctattgaaaccaatttcagggaaattgagggcccagtgggaaatgggcattgttcaagcagaagaagctgcaagcatgtcagtggaggagcggaaagccaagttcacctttctctatgtgggggaccagcttcatctcaaccctcaagtagccaaggaggctggcattgctgcagagtctttgggagaaatggcagaatcctcaggagtcagtgaagaagctgctgaaaaccccaagtctgtgagagaagagtgcattcccatgaagagaaggcggagggccaaactgtgtagctctgcagagaccctggagagtcaccccgacatagggaagagtactcctcaaaagacggcagaggctgaccccagaagaggagtagggtctcctcctgggaggaagaagaccacagtctccatgccacgaagcaggaagggagatgcagcatcccagtttttggtcttctgtcaaaaacacagggatgaggtggtagctgagcacccagatgcttcaggtgaggagattgaagagctgctcaggtcacagtggagtctgctgagtgagaagcagagagcacgctacaacaccaagtttgccctggtggcccctgtccaggctgaagaagactctggtaatgtaaatgggaaaaaaagaaaccacacaaagaggatacaggaccctacagaagatgctgaagctgaggacacacccaggaaaagactcaggacggacaagcacagtcttcggaagagagacacaatcactgacaaaacggccagaacaagctcttacaaggccatggaggcagcctcctcgctcaagagccaggcaggtaatgtggtcagcgccctttccttcttggcttctgggtgcccaggctgggctgggtgggtgggctgagagtgtgaaaggggaaggctggggctggtgaaggggaacagggcaggggaggaatccacaattaagctaggagtgaaaaagaaggaaaggaggttctcctgtggttgaaaactaaactgttttaatgtgtatgttattttgaagggtttggctaaattttattgaagttactttttacttggctctattatttgcaatttaaaattttactagaaaagtgatttcaaccagaagttttcaggtttcttacttgatggtgccagttgctactgtaaattctgtcacccttcagtaccctgaccctctgcatgtaagctaacagtaagggctcgttatttatatttcacatgctaaagaaactagcttaaaacctttatgaaaaataattgtcaaaaaaataagaggggaaattacacttccttttaccttttagttatctttttgaaatacctgtttgatcccttattgaagaagtcataccttctccaactcttaattaaaaggaaaacaaaaccctggggaggagagtggcaatggctctgtttttcttgttttgcatgaggtgcttgactggcttttaaaaatcagttaaacagacttta

SEQ ID NO: 440521 - DNA, 2473 bp, Homo sapiens
  misc_feature (12)..(12): n is a, c, g, or t
  misc_feature (86)..(86): n is a, c, g, or t
gggaggcgcggnggcggggtcggcgccgcgcgcgagagcctcggcctggccgcgctgcgcccgccgccgccgccgccccctccccncctgggccctaccgccgcacggccccggccccctcccagcctgccgctccggagagccgcccgccgaggatgcgacgcaccgcagtgttctaagaacggaagcatctgggctggatggaatttagcatcaagcagagtcccctttctgttcagagtgttgtaaagtgcataaagatgaagcaggcaccagaaatcctcggcagtgccaacgggaagactccgagctgcgaggtgaaccgcgagtgttctgtgttcctcagcaaagcccagctctccagtagcctgcaggagggggtcatgcagaagtttaacggccacgacgccctgccctttattccagccgacaagctgaaagatcttacttcccgggtgtttaatggagaacccggcgcacacgatgccaaactgcgttttgagtcccaggaaatgaaagggattgggacaccccctaacactacccctatcaaaaatggctctccagaaattaagctgaaaatcaccaaaacatacatgaatgggaagcctctctttgaatcttccatttgtggtgacagtgctgctgatgtgtctcagtcagaagaaaatggacaaaaaccagaaaacaaggcgagaaggaacaggaagaggagcataaaatatgactccttgctggagcagggccttgtcgaagcagctcttgtgtctaagatctcaagtccttcagataaaaagattccagctaagaaagagtcttgtccaaacactggaagagacaaagaccacctgttgaaatacaacgttggtgatttggtgtggtccaaagtgtcgggttacccttggtggccttgcatggtttctgcagatccactccttcacagctataccaaacttaaaggtcagaaaaagagtgcacgccagtatcacgtacagttctttggtgacgccccagaaagagcttggatatttgagaagagcctcgtagcttttgaaggagaaggacagtttgaaaaattatgccaggaaagtgccaagcaggcacccacgaaagctgagaaaattaagctattgaaaccaatttcagggaaattgagggcccagtgggaaatgggcattgttcaagcagaagaagctgcaagcatgtcagtggaggagcggaaagccaagttcacctttctctatgtgggggaccagcttcatctcaaccctcaagtagccaaggaggctggcattgctgcagagtctttgggagaaatggcagaatcctcaggagtcagtgaagaagctgctgaaaaccccaagtctgtgagagaagagtgcattcccatgaagagaaggcggagggccaaactgtgtagctctgcagagaccctggagagtcaccccgacatagggaagagtactcctcaaaagacggcagaggctgaccccagaagaggagtagggtctcctcctgggaggaagaagaccacagtctccatgccacgaagcaggaagggagatgcagcatcccagtttttggtcttctgtcaaaaacacagggatgaggtcagtactaagttgtgtttcatgctagcaagtttcagaatttgaggaacatcccttcagtgcagaatcatctgtttctcagcattatcaggagactctaacatgagccttgcatagattttagatctaataaataagtattagggaacagccattctgacccttgagggaaaagatactcgacttgcactctggggtcttaaagttagcactttctccagcagtctgttctgaagcttccagtgcaggatatgctcatctgtaaagctcattgtgtccactggcactgagggtgttgatttatttccctgacatttaaaagggtagcaatgtgattaagacatttatataattttcttaattgtttgcataaaatgcacagtctgttagtacataataaaggctgtaaagaactgaaggagttgggttccccacttcccacttttggttatgttacttggagtggatcatattctcatgcttaaaaggctttttttaagtgttcattttaattttacttccataggaattttccattcagtagtctaaatctatgtggtgattaaaggtatcaaaaacaatagtgttggccaggcacagtggctcacacctgtaatcccaacactttgggaagctgaggcgggtggatcatgaggtcaggaatttgagactatcctggccaacatgatgaaaccccgtctctactaaaaatacaaaaaaaaattagctgggcatggtgacgcgtgcttgtaatcccagcttctcaggaggctgaggcaggaaaattgcttgaaccagggagtcggaggttgcagtgagccaagattacaccactgcactccagcctggcgacagaatgagac

SEQ ID NO: 440522 - DNA, 2160 bp, Homo sapiens
  misc_feature (12)..(12): n is a, c, g, or t
  misc_feature (86)..(86): n is a, c, g, or t
gggaggcgcggnggcggggtcggcgccgcgcgcgagagcctcggcctggccgcgctgcgcccgccgccgccgccgccccctccccncctgggccctaccgccgcacggccccggccccctcccagcctgccgctccggagagccgcccgccgaggatgcgacgcaccgcagtgttctaagaacggaagcatctgggctggatggaatttagcatcaagcagagtcccctttctgttcagagtgttgtaaagtgcataaagatgaagcaggcaccagaaatcctcggcagtgccaacgggaagactccgagctgcgaggtgaaccgcgagtgttctgtgttcctcagcaaagcccagctctccagtagcctgcaggagggggtcatgcagaagtttaacggccacgacgccctgccctttattccagccgacaagctgaaagatcttacttcccgggtgtttaatggagaacccggcgcacacgatgccaaactgcgttttgagtcccaggaaatgaaagggattgggacaccccctaacactacccctatcaaaaatggctctccagaaattaagctgaaaatcaccaaaacatacatgaatgggaagcctctctttgaatcttccatttgtggtgacagtgctgctgatgtgtctcagtcagaagaaaatggacaaaaaccagaaaacaaggcgagaaggaacaggaagaggagcataaaatatgactccttgctggagcagggccttgtcgaagcagctcttgtgtctaagatctcaagtccttcagataaaaagattccagctaagaaagagtcttgtccaaacactggaagagacaaagaccacctgttgaaatacaacgttggtgatttggtgtggtccaaagtgtcgggttacccttggtggccttgcatggtttctgcagatccactccttcacagctataccaaacttaaaggtcagaaaaagagtgcacgccagtatcacgtacagttctttggtgacgccccagaaagagcttggatatttgagaagagcctcgtagcttttgaaggagaaggacagtttgaaaaattatgccaggaaagtgccaagcaggcacccacgaaagctgagaaaattaagctattgaaaccaatttcagggaaattgagggcccagtgggaaatgggcattgttcaagcagaagaagctgcaagcatgtcagtggaggagcggaaagccaagttcacctttctctatgtgggggaccagcttcatctcaaccctcaagtagccaaggaggctggcattgctgcagagtctttgggagaaatggcagaatcctcaggagtcagtgaagaagctgctgaaaaccccaagtctgtgagagaagagtgcattcccatgaagagaaggcggagggccaaactgtgtagctctgcagagaccctggagagtcaccccgacatagggaagagtactcctcaaaagacggcagaggctgaccccagaagaggagtagggtctcctcctgggaggaagaagaccacagtctccatgccacgaagcaggaagggagatgcagcatcccagtttttggtcttctgtcaaaaacacagggatgaggtcagtactaagttgtgtttcatgctagcaagtttcagaatttgaggaacatcccttcagtgcagaatcatctgtttctcagcattatcaggagactctaacatgagccttgcatagattttagatctaataaataagtattagggaacagccattctgacccttgagggaaaagatactcgacttgcactctggggtcttaaaatatccttcctaatgtggataagaagataccgagaacaggccaggcacagtggctcatgcctgtaatttcagtactttgggaggccaaggcgggaggattgcttcagctcaggagtttgagaccagcctgggcaacatggtgaaaccccatctctacaaaaattagccgggtgtggtggcacatgcctgtagtcccagctgcttgggagactgagacaggaggatcccttgagtcctggaggcaggaggatcccttgagtcctgaaggtggggtttgcagtgagtcgtgatggcatcactgcaccgtagcctgggtgacagcagagcgagactgtgtctcaaaaaa

SEQ ID NO: 440523 - DNA, 601 bp, Homo sapiens
agggagatgcagcatcccagtttttggtcttctgtcaaaaacacagggatgaggtcagtactaagttgtgtttcatgctagcaagtttcagaatttgaggaacatcccttcagtgcagaatcatctgtttctcagcattatcaggagactctaacatgagccttgcatagattttagatctaataaataagtattagggaacagccattctgacccttgagggaaaagatactcgacttgcactctggggtcttaaaatatccttcctaatgtggataagaagataccgagaacaggccaggcacagtggctcatgcctgtaatttcagtactttgggaggccaaggcgggaggattgcttcagctcaggagtttgagaccagcctgggcaacatggtgaaaccccatctctacaaaaattagccgggtgtggtggcacatgcctgtagtcccagctgcttgggagactgagacaggaggatcccttgagtcctggaggcaggaggatcccttgagtcctgaaggtggggtttgcagtgagtcgtgatggcatcactgcaccgtagcctgggtgacagcagagcgagactgtgtctcaaaa

SEQ ID NO: 440524 - DNA, 451 bp, Homo sapiens
tggagtctgctgagtgagaagcagagagcacgctacaacaccaagtttgccctggtggcccctgtccaggctgaagaagactctggtaaacatagcattatgctgatgtcctctgcttgggttgatgtgtgtagtgtagcaagctgagctctgatcttggaaccgtagggaagtgtgtccactctccctgtttctgacccgtggggtttgggccagcggtccaagtgcgtgtggtcacagtaaaaacagcttctgccatctgcgtttactggcttatgagagctattcaatgtagtgccttctggcctgtggctcccttgctctcctacccaagttgagcagccactgtggtcactgctgctgatggggctgtgtgaagagaggacacaagaaggaaggggagggaaggtcgtctcttggattccaggcttacatgatgtggtagggtcag

SEQ ID NO: 440525 - DNA, 322 bp, Homo sapiens
gagtctcttgtaagttaattagtttccctctttggcatgtggcatggaagggataagaagtatagaatttgttttgaggttaacaggctcagacaacaccaagggaaacaactgcaaaatagcagtagatttgactagtttcatcccagattctaactttcattctctaacattttattttaaaaactaggtcagaaaaagagtgcacgccagtatcacgtacagttctttggtgacgccccagaaagagcttggatatttgagaagagcctcgtagcttttgaaggagaaggacagtttgaaaaattatgccaggaaagtg

SEQ ID NO: 440526 - DNA, 8504 bp, Homo sapiens
agagatgggtctcgccatcaccatgttgcccagtctggtctccaactcctgggctcaagcgatcctcctgccttggtctcccaaagtgctgggattacaggtgtgagcccccacacccggcctgagtgagtgggttctgaatggtgactgttgttgtccatagccttccccctgcttctgagagtggagtccctcccctcatgttggagacctcccaaggtccatgtggtcctataggggctgttcagcctccctagccccttaacgtgtcaggtaatactgtatatattccatgaaatgtgaataattagttatataattcctaagcacttattttaaaaaacagcaatgtgatgcttaactcttcccacctctgttcctgtcccccttagaaaaccactgataactctttttttttttgagacggagtcttgccctgtcgcccaggctggagtgtagtggcctgatctcggctcggctcattgtaacctccgcctcgggtttgagcgattctcctgcctcagcctcctgagtagctgggattataggcgtgcaccaccacgcctggctaattttttgtatctttagtagggacgggtttcaccatgttggccagagtggtcttgaactcctgaccttgtgatccgctcgcctcagcctcccaaagtgctgggattacaggcatgagccaccgtgcctgtcctagaaccactggtaactcttaactgagacaagatttcgccatgttgcccaggctggtctcgaacttctgagctcaagcgatctacctgcctcgtcctcccaaagtgttggaattgcaggtgtgagccactgcacccggcccttgcctcatgtttgaatgataatttacctgggcataaaattctggacacttgtggtggcacgagctgtctgcttttctgtggagactgcgggttgcagacaccagcagccccctattgctgcacgtcaggtgtcctccacctcagtactgtggacatctcgggccgcatagccctgttgcgcgggcatcctgtgcgttgcaggagatgcagcagcatccatgaccgcaacccatcagagtgttctaagaacggaagcatctgggctggatggaatttagcatcaagcagagtcccctttctgttcagagtgttgtaaagtgcataaagatgaagcaggcaccagaaatcctcggcagtgccaacgggaagactccgagctgcgaggtgaaccgcgagtgttctgtgttcctcagcaaagcccagctctccagtagcctgcaggagggggtcatgcagaagtttaacggccacgacgccctgccctttattccagccgacaagctgaaagatcttacttcccgggtgtttaatggagaacccggcgcacacgatgccaaactgcgttttgagtcccaggaaatgaaagggattgggacaccccctaacactacccctatcaaaaatggctctccagaaattaagctgaaaatcaccaaaacatacatgaatgggaagcctctctttgaatcttccatttgtggtgacagtgctgctgatgtgtctcagtcagaagaaaatggacaaaaaccagaaaacaaggcgagaaggaacaggaagaggagcataaaatatgactccttgctggagcagggccttgtcgaagcagctcttgtgtctaagatctcaagtccttcagataaaaagattccagctaagaaagagtcttgtccaaacactggaagagacaaagaccacctgttgaaatacaacgttggtgatttggtgtggtccaaagtgtcgggttacccttggtggccttgcatggtttctgcagatccactccttcacagctataccaaacttaaaggtcagaaaaagagtgcacgccagtatcacgtacagttctttggtgacgccccagaaagagcttggatatttgagaagagcctcgtagcttttgaaggagaaggacagtttgaaaaattatgccaggaaagtgccaagcaggcacccacgaaagctgagaaaattaagctattgaaaccaatttcagggaaattgagggcccagtgggaaatgggcattgttcaagcagaagaagctgcaagcatgtcagtggaggagcggaaagccaagttcacctttctctatgtgggggaccagcttcatctcaaccctcaagtagccaaggaggctggcattgctgcagagtctttgggagaaatggcagaatcctcaggagtcagtgaagaagctgctgaaaaccccaagtctgtgagagaagagtgcattcccatgaagagaaggcggagggccaaactgtgtagctctgcagagaccctggagagtcaccccgacatagggaagagtactcctcaaaagacggcagaggctgaccccagaagaggagtagggtctcctcctgggaggaagaagaccacagtctccatgccacgaagcaggaagggagatgcagcatcccagtttttggtcttctgtcaaaaacacagggatgaggtggtagctgagcacccagatgcttcaggtgaggagattgaagagctgctcaggtcacagtggagtctgctgagtgagaagcagagagcacgctacaacaccaagtttgccctggtggcccctgtccaggctgaagaagactctggtaatgtaaatgggaaaaaaagaaaccacacaaagaggatacaggaccctacagaagatgctgaagctgaggacacacccaggaaaagactcaggacggacaagcacagtcttcggaagagagacacaatcactgacaaaacggccagaacaagctcttacaaggccatggaggcagcctcctcgctcaagagccaggcagcaacgaaaaatctgtctgatgcatgtaaaccactgaagaagcgaaatcgggcttccacggcagcatcttcagctcttgggtttagcaaaagttcatctccttctgcatccttaactgagaatgaggtctcggacagcccgggagacgagccctcggagtccccatacgaaagtgcagacgaaacacaaactgaagtatctgtctcatccaaaaagtctgagcgaggagtgactgccaaaaaggagtatgtgtgccagctgtgtgagaagccgggcagcctcctgctctgtgaaggaccctgctgcggagctttccacctcgcctgccttgggctttcccggaggccagaagggaggttcacctgcagcgagtgtgcctcagggattcactcatgtttcgtgtgtaaagagagcaagacagatgttaagcgctgtgtggtaactcagtgtggaaaattttaccatgaggcttgtgtgaaaaaataccctctgactgtatttgagagccgaggtttccgctgccccctccacagctgtgtgagctgccatgcttccaacccttcaaacccaaggccgtcaaaaggtaaaatgatgcggtgtgtccgctgccccgttgcctatcacagcggggatgcttgtctggcagcaggatgctcagtgatcgcctccaacagcatcatctgcactgcccacttcactgctcggaaggggaagcgacaccacgcccacgtcaacgtgagctggtgcttcgtgtgctccaaaggggggagccttctgtgctgtgagtcctgcccagcggccttccaccctgactgcctgaacatcgagatgcctgacggcagctggttctgcaatgactgcagggctgggaagaagctgcacttccaggatatcatttgggtgaaacttgggaactacagatggtggccggcagaagtttgccatcccaaaaatgttcccccaaatattcagaaaatgaagcacgagattggagaattccctgtgtttttctttgggtctaaagattattactggacgcatcaggcgcgagtgttcccgtacatggagggggaccggggcagccgctaccagggggtcagagggatcggaagagtcttcaaaaacgcactgcaagaagctgaagctcgttttcgtgaaattaagcttcagagggaagcccgagaaacacaggagagcgagcgcaagcccccaccatacaagcacatcaaggtgaataagccttacgggaaagtccagatctacacagcggatatttcagaaatccctaagtgcaactgcaagcccacagatgagaatccttgtggctttgattcggagtgtctgaacaggatgctgatgtttgagtgccacccgcaggtgtgtcccgcgggcgagttctgccagaaccagtgcttcaccaagcgccagtacccagagaccaagatcatcaagacagatggcaaagggtggggcctggtcgccaagagggacatcagaaagggagaatttgttaacgagtacgttggggagctgatcgacgaggaggagtgcatggcgagaatcaagcacgcacacgagaacgacatcacccacttctacatgctcactatagacaaggaccgtataatagacgctggccccaaaggaaactactctcgatttatgaatcacagctgccagcccaactgtgagaccctcaagtggacagtgaatggggacactcgtgtgggcctgtttgccgtctgtgacattcctgcagggacggagctgacttttaactacaacctcgattgtctgggcaatgaaaaaacggtctgccggtgtggagcctccaattgcagtggattcctcggggatagaccaaagacctcgacgaccctttcatcagaggaaaagggcaaaaagaccaagaagaaaacgaggcggcgcagagcaaaaggggaagggaagaggcagtcagaggacgagtgcttccgctgcggtgatggcgggcagctggtgctgtgtgaccgcaagttctgcaccaaggcctaccacctgtcctgcctgggccttggcaagcggcccttcgggaagtgggaatgtccttggcatcattgtgacgtgtgtggcaaaccttcgacttcattttgccacctctgccccaattcgttctgtaaggagcaccaggacgggacagccttcagctgcaccccggacgggcggtcctactgctgtgagcatgacttaggggcggcatcggtcagaagcaccaagactgagaagccccccccagagccagggaagccgaaggggaagaggcggcggcggaggggctggcggagagtcacagagggcaaatagcgccaggcggccgcttggccggatccaggggcggtgcagggcggccggccctgcctgcgggagagggcgagcatgaactggcccggaggacccagctcgagccgccaggacacagacgtacaggcctcctcgggagggagcgcctccccaccactgagccatcctcagcagcgtccgctgcgtctgcactgatgaccgtctgagcccagctcagcgttcctggacaaacagcctcactcctcagcgttaccgccacacttgaatttctccgaatgtcaaggttccctcccactctatttttttaggttaaagttaattggcatatggaatgttttaatctcctctgaaatgtgtagcgtaggcttttcccaagggtcgctagaaactcgtcttcgcgttgccccctttctggctctcagcgccgtcgccactcgggagaggctgggtgaggcccgtgtgaggactgaccctggattcctcgaaactgccattgtgatcattactctgctctttggaaatggctgtatcatttttttgtactaatgtgaattgttcctcagaaacgcttcttttccatcctagtgagaagctggccctgcaggtggtggcagcaatggtgttgtaagatttcctcccgtagttttttctcctcatggatttgaatgaaatgccaataacacgtccactttcaacgtgtagtttacgcggagcactttcgaggcctggccgggttgggcctacttctcacctgggcctatcttctgaactcgctaggttcttatcaacatttgggggataactttgtatatttttttcatttggcttttctttaccagtttctgatttttattctcaatatatttttgctaaacctatttcacaaatcaccaccgactgaagtgtgtgtttactgatgcggccctgagctccatggcgaaaggagtgactttgcagggcgtgagaccgcagtctgcttagagcacaggaagtgacaacttagggagccccgtagggcgctgcaggccccggggaccccagcacgtgggtctaaagagagacggagtctagctctcctgccacccagagtggcttccatctcagcactctgtgggtctggtgatggaagatgcagtctctgctgatcacatgtgccctctgccagggcacctactgagaggtgcggtcctgggggtggaggcctgcctggcaggtgtgcgtgcctcgtacgtgtgttatgggcactggtctaggccaggtatgacacccactctcctgtgagatttcactttagtttttaaaaggtccagttctacagagtgagacctatctatctgagtactacatatgttttaagacttggttctttttttgagggatccttgaccctgggaagtctggagcaccctgagaagggggcaccatgtgtgcctttgcccacgtgtcctgaggggctgcttgtctgggagggagggagagaacattcagcagcaggtgcttttttatggccttttcttaaaataacctaagggggacacatccatcttgcagagaagtttacagaactccccttgaaaactgctgctgaggctcctgttaaattttctgtggcatcttttatgccttggtaaaaactgcagtgtctttggacctgagagtggctactccgtggttttgtgacctgtaagcgtggggttcaggggtgtgtggccctgcagggtcccacgcctccctgagcactgactggaagtttcactggctggtggctgtcccttctcccatcagggtccccagcaaagttaactacacagaggacccaggggaaacgagctgtgtagccactgacttgctcgcgcggccgtggcctctgaggggcactcgccggttaagacagggtgggagtagtgctttccagttcagactctaacttctcccaaagtgtcctaagaaaatactggatcggctcatagatttatgctccttatgatgccctaacttggaaggttgttctagggacaggccgggcagtgtccccacacacaccttagagtcgaaggccccagggccccgctgtcacttgcccaaaagatcccttccggcaggtaagggactaccaatgcttacgtcaaaacagcagaatcggctttgcagtgcactttggggagcagatattaacttatttttgtgttggacagtagtgaaatcttgtgatttttaatcgctttgataatacttccaaattttatgatttttctgaaggaaataatgcaaacattttaaatatgtttctccccctttccaaaaactgttaaactaatgagcaagtaacactaactttgaatgtctctacaatacccgttgataactcagtggagccaggctttggggtagcggccctgagcttgcagggtttctcgccactggggctgaccacgcccccagctgtgaccgtgggtgtggctggctctcggccctgcccagctttgttctgaggacgtggtgacttcctgaacatcagcttcaatcctccatcattaatgtgaagcaaaacacaaaaaccgccccaatccctcaggattccttggcatccgaaaccagcatctgcacctaaacccatacccacccgtgtgcgcccacagggggatgtgtccgaatgggcagcttaaaatgtggtcacctgtgggggaaactcttcaggcacctgaagtgagaacccagctgtccgtcctcaggccggcctttcttccggcgacacccgtccatggctggctgggtccccttcgcagtgtttgtctgtcttgacatctaaaccccggcgtgtgcagtgcccatcttccaggactaccttattttccagaattaaacctgttttataattcaagttaatgcaaatgactgtcagttgccaaatatcttgatcctatgagtgtagttgatgactgtttgttagtcagtagagtaaaatgctgtgtccacggggtgtcacagcctcaccataccctgttgaggtgtgaaatgccccgtcagaaattaaatacaaacttaaatgtgcctattggtgtctaaacttcatacaatgtaaggtcagattccttttaggaatactgggtgctgtcaccaggtttgatagttagacttaaaaacttgaaattcactttttggggggagggatatactgaaatagagagttgagacttgccagttgggggaaaatagcatttaaaatggaaagctgtgtttggaaaattgtgtatgagtatttttgtattaaaaacattttaaaggcttttttcttaa

SEQ ID NO: 440527 - DNA, 3602 bp, Homo sapiens
gagtagcattgtggttatatgtaagactttatgtttagagatttgtgctaaacttcttatggatgaaatgatatgtctgggatttgcttcagaataatctggcagggggacgtggaaccaggtatggatagagccacgctggccccaggttgatgtttttgggggccaagtagcgaggacatggggttcattgtacagtttgtctgcttttgtttatgttcagatttttccatgatagaaagttaagccagaaggacaaaggaattcagaagattcatctttagaacttcacttatttgaggggtaatttttaagcagtaaaaagatcaagggtttatgatttgaaactttacaaaccaaaattattttacagcaacgaaaaatctgtctgatgcatgtaaaccactgaagaagcgaaatcgggcttccacggcagcatcttcagctcttgggtttagcaaaagttcatctccttctgcatccttaactgagaatgaggtctcggacagcccgggagacgagccctcggagtccccatacgaaagtgcagacgaaacacaaactgaagtatctgtctcatccaaaaagtctgagcgaggagtgactgccaaaaaggagtatgtgtgccagctgtgtgagaagccgggcagcctcctgctctgtgaaggaccctgctgcggagctttccacctcgcctgccttgggctttcccggaggccagaagggaggttcacctgcagcgagtgtgcctcagggattcactcatgtttcgtgtgtaaagagagcaagacagatgttaagcgctgtgtggtaactcagtgtggaaaattttaccatgaggcttgtgtgaaaaaataccctctgactgtatttgagagccgaggtttccgctgccccctccacagctgtgtgagctgccatgcttccaacccttcaaacccaaggccgtcaaaaggtaaaatgatgcggtgtgtccgctgccccgttgcctatcacagcggggatgcttgtctggcagcaggatgctcagtgatcgcctccaacagcatcatctgcactgcccacttcactgctcggaaggggaagcgacaccacgcccacgtcaacgtgagctggtgcttcgtgtgctccaaaggggggagccttctgtgctgtgagtcctgcccagcggccttccaccctgactgcctgaacatcgagatgcctgacggcagctggttctgcaatgactgcagggctgggaagaagctgcacttccaggatatcatttgggtgaaacttgggaactacagatggtggccggcagaagtttgccatcccaaaaatgttcccccaaatattcagaaaatgaagcacgagattggagaattccctgtgtttttctttgggtctaaagattattactggacgcatcaggcgcgagtgttcccgtacatggagggggaccggggcagccgctaccagggggtcagagggatcggaagagtcttcaaaaacgcactgcaagaagctgaagctcgttttcgtgaaattaagcttcagagggaagcccgagaaacacaggagagcgagcgcaagcccccaccatacaagcacatcaaggtgaataagccttacgggaaagtccagatctacacagcggatatttcagaaatccctaagtgcaactgcaagcccacagatgagaatccttgtggctttgattcggagtgtctgaacaggatgctgatgtttgagtgccacccgcaggtgtgtcccgcgggcgagttctgccagaaccagtgcttcaccaagcgccagtacccagagaccaagatcatcaagacagatggcaaagggtggggcctggtcgccaagagggacatcagaaagggagaatttgttaacgagtacgttggggagctgatcgacgaggaggagtgcatggcgagaatcaagcacgcacacgagaacgacatcacccacttctacatgctcactatagacaaggaccgtataatagacgctggccccaaaggaaactactctcgatttatgaatcacagctgccagcccaactgtgagaccctcaagtggacagtgaatggggacactcgtgtgggcctgtttgccgtctgtgacattcctgcagggacggagctgacttttaactacaacctcgattgtctgggcaatgaaaaaacggtctgccggtgtggagcctccaattgcagtggattcctcggggatagaccaaagacctcgacgaccctttcatcagaggaaaagggcaaaaagaccaagaagaaaacgaggcggcgcagagcaaaaggggaagggaagaggcagtcagaggacgagtgcttccgctgcggtgatggcgggcagctggtgctgtgtgaccgcaagttctgcaccaaggcctaccacctgtcctgcctgggccttggcaagcggcccttcgggaagtgggaatgtccttggcatcattgtgacgtgtgtggcaaaccttcgacttcattttgccacctctgccccaattcgttctgtaaggagcaccaggacgggacagccttcagctgcaccccggacgggcggtcctactgctgtgagcatgacttaggggcggcatcggtcagaagcaccaagactgagaagccccccccagagccagggaagccgaaggggaagaggcggcggcggaggggctggcggagagtcacagagggcaaatagcgccaggcggccgcttggccggatccaggggcggtgcagggcggccggccctgcctgcgggagagggcgagcatgaactggcccggaggacccagctcgagccgccaggacacagacgtacaggcctcctcgggagggagcgcctccccaccactgagccatcctcagcagcgtccgctgcgtctgcactgatgaccgtctgagcccagctcagcgttcctggacaaacagcctcactcctcagcgttaccgccacacttgaatttctccgaatgtcaaggttccctcccactctatttttttaggttaaagttaattggcatatggaatgttttaatctcctctgaaatgtgtagcgtaggcttttcccaagggtcgctagaaactcgtcttcgcgttgccccctttctggctctcagcgccgtcgccactcgggagaggctgggtgaggcccgtgtgaggactgaccctggattcctcgaaactgccattgtgatcattactctgctctttggaaatggctgtatcatttttttgtactaatgtgaattgttcctcagaaacgcttcttttccatcctagtgagaagctggccctgcaggtggtggcagcaatggtgttgtaagatttcctcccgtagttttttctcctcatggatttgaatgaaatgccaataacacgtccactttcaacgtgtagtttacgcggagcactttcgaggcctggccgggttgggcctacttctcacctgggcctatcttctgaactcgctaggttcttatcaacatttgggggataactttgtatatttttttcatttggcttttctttaccagtttctgatttttattctcaatatatttttgctaaacctatttcacaaatca

SEQ ID NO: 440528 - DNA, 307 bp, Homo sapiens
  misc_feature (6)..(6): n is a, c, g, or t
  misc_feature (108)..(108): n is a, c, g, or t
  misc_feature (289)..(289): n is a, c, g, or t
gccggncccggcatgtgctgtaggccagcgaaggagatctggtctcccacaatgaaggtcttgcttccctggttctgggacagcagggtctcaaaaggcttcagttgnccgggcagtgccttcacatagtcatccttgccgcctcatagttggtgtagatgagggagaatttgttaacgagtacgttggggagctgatcgacgaggaggagtgcatggcgagaatcaagcacgcacacgagaacgacatcacccacttctacatgctcactatagacaaggaccgtatnatagacgctggcctacgg

SEQ ID NO: 440529 - DNA, 8082 bp, Homo sapiens
  misc_feature (12)..(12): n is a, c, g, or t
  misc_feature (86)..(86): n is a, c, g, or t
gggaggcgcggnggcggggtcggcgccgcgcgcgagagcctcggcctggccgcgctgcgcccgccgccgccgccgccccctccccncctgggccctaccgccgcacggccccggccccctcccagcctgccgctccggagagccgcccgccgaggatgcgacgcaccgcagtgttctaagaacggaagcatctgggctggatggaatttagcatcaagcagagtcccctttctgttcagagtgttgtaaagtgcataaagatgaagcaggcaccagaaatcctcggcagtgccaacgggaagactccgagctgcgaggtgaaccgcgagtgttctgtgttcctcagcaaagcccagctctccagtagcctgcaggagggggtcatgcagaagtttaacggccacgacgccctgccctttattccagccgacaagctgaaagatcttacttcccgggtgtttaatggagaacccggcgcacacgatgccaaactgcgttttgagtcccaggaaatgaaagggattgggacaccccctaacactacccctatcaaaaatggctctccagaaattaagctgaaaatcaccaaaacatacatgaatgggaagcctctctttgaatcttccatttgtggtgacagtgctgctgatgtgtctcagtcagaagaaaatggacaaaaaccagaaaacaaggcgagaaggaacaggaagaggagcataaaatatgactccttgctggagcagggccttgtcgaagcagctcttgtgtctaagatctcaagtccttcagataaaaagattccagctaagaaagagtcttgtccaaacactggaagagacaaagaccacctgttgaaatacaacgttggtgatttggtgtggtccaaagtgtcgggttacccttggtggccttgcatggtttctgcagatccactccttcacagctataccaaacttaaaggtcagaaaaagagtgcacgccagtatcacgtacagttctttggtgacgccccagaaagagcttggatatttgagaagagcctcgtagcttttgaaggagaaggacagtttgaaaaattatgccaggaaagtgccaagcaggcacccacgaaagctgagaaaattaagctattgaaaccaatttcagggaaattgagggcccagtgggaaatgggcattgttcaagcagaagaagctgcaagcatgtcagtggaggagcggaaagccaagttcacctttctctatgtgggggaccagcttcatctcaaccctcaagtagccaaggaggctggcattgctgcagagtctttgggagaaatggcagaatcctcaggagtcagtgaagaagctgctgaaaaccccaagtctgtgagagaagagtgcattcccatgaagagaaggcggagggccaaactgtgtagctctgcagagaccctggagagtcaccccgacatagggaagagtactcctcaaaagacggcagaggctgaccccagaagaggagtagggtctcctcctgggaggaagaagaccacagtctccatgccacgaagcaggaagggagatgcagcatcccagtttttggtcttctgtcaaaaacacagggatgaggtggtagctgagcacccagatgcttcaggtgaggagattgaagagctgctcaggtcacagtggagtctgctgagtgagaagcagagagcacgctacaacaccaagtttgccctggtggcccctgtccaggctgaagaagactctggtaatgtaaatgggaaaaaaagaaaccacacaaagaggatacaggaccctacagaagatgctgaagctgaggacacacccaggaaaagactcaggacggacaagcacagtcttcggaagcaacgaaaaatctgtctgatgcatgtaaaccactgaagaagcgaaatcgggcttccacggcagcatcttcagctcttgggtttagcaaaagttcatctccttctgcatccttaactgagaatgaggtctcggacagcccgggagacgagccctcggagtccccatacgaaagtgcagacgaaacacaaactgaagtatctgtctcatccaaaaagtctgagcgaggagtgactgccaaaaaggagtatgtgtgccagctgtgtgagaagccgggcagcctcctgctctgtgaaggaccctgctgcggagctttccacctcgcctgccttgggctttcccggaggccagaagggaggttcacctgcagcgagtgtgcctcaggtgtcgcccggcacagtctggggtctgtgaggatgatgagaggacacctgcacagccgtggcccttcctgcctactcaccgggcccaaggagtctcctatctcacgtcagaacacttcctgggtcaggaagacacctggagagtctcccaggccatggcagccccacagcagcacctcacttatgggagtgtctgtctgcctgcccagaatgataagtgactgctccaccactggccagctgctctcaaggaggaaaggcctcttttcataggagccccttctttcaagcttcttgccagttagactgggcctccccagccaggctgcctagtaagattctcctgtatttcaggtgaagctggagctcagatcgcagcaaggtaatccttgatggctggatctttttgctggagaatgcttggactagtgagcaaggttggaaacagggccaggtgctttagcagcgtggctgcctctgaagaggagttgcttgattttagtggctcagaactgcaatttaattcttgttctttgcacctctctctccaccccttctttaactttttgttagggattcactcatgtttcgtgtgtaaagagagcaagacagatgttaagcgctgtgtggtaactcagtgtggaaaattttaccatgaggcttgtgtgaaaaaataccctctgactgtatttgagagccgaggtttccgctgccccctccacagctgtgtgagctgccatgcttccaacccttcaaacccaaggccgtcaaaaggtaaaatgatgcggtgtgtccgctgccccgttgcctatcacagcggggatgcttgtctggcagcaggatgctcagtgatcgcctccaacagcatcatctgcactgcccacttcactgctcggaaggggaagcgacaccacgcccacgtcaacgtgagctggtgcttcgtgtgctccaaaggggggagccttctgtgctgtgagtcctgcccagcggccttccaccctgactgcctgaacatcgagatgcctgacggcagctggttctgcaatgactgcagggctgggaagaagctgcacttccaggatatcatttgggtgaaacttgggaactacagatggtggccggcagaagtttgccatcccaaaaatgttcccccaaatattcagaaaatgaagcacgagattggagaattccctgtgtttttctttgggtctaaagattattactggacgcatcaggcgcgagtgttcccgtacatggagggggaccggggcagccgctaccagggggtcagagggatcggaagagtcttcaaaaacgcactgcaagaagctgaagctcgttttcgtgaaattaagcttcagagggaagcccgagaaacacaggagagcgagcgcaagcccccaccatacaagcacatcaaggtgaataagccttacgggaaagtccagatctacacagcggatatttcagaaatccctaagtgcaactgcaagcccacagatgagaatccttgtggctttgattcggagtgtctgaacaggatgctgatgtttgagtgccacccgcaggtgtgtcccgcgggcgagttctgccagaaccagtgcttcaccaagcgccagtacccagagaccaagatcatcaagacagatggcaaagggtggggcctggtcgccaagagggacatcagaaagggagaatttgttaacgagtacgttggggagctgatcgacgaggaggagtgcatggcgagaatcaagcacgcacacgagaacgacatcacccacttctacatgctcactatagacaaggaccgtataatagacgctggccccaaaggaaactactctcgatttatgaatcacagctgccagcccaactgtgagaccctcaagtggacagtgaatggggacactcgtgtgggcctgtttgccgtctgtgacattcctgcagggacggagctgacttttaactacaacctcgattgtctgggcaatgaaaaaacggtctgccggtgtggagcctccaattgcagtggattcctcggggatagaccaaagacctcgacgaccctttcatcagaggaaaagggcaaaaagaccaagaagaaaacgaggcggcgcagagcaaaaggggaagggaagaggcagtcagaggacgagtgcttccgctgcggtgatggcgggcagctggtgctgtgtgaccgcaagttctgcaccaaggcctaccacctgtcctgcctgggccttggcaagcggcccttcgggaagtgggaatgtccttggcatcattgtgacgtgtgtggcaaaccttcgacttcattttgccacctctgccccaattcgttctgtaaggagcaccaggacgggacagccttcagctgcaccccggacgggcggtcctactgctgtgagcatgacttaggggcggcatcggtcagaagcaccaagactgagaagccccccccagagccagggaagccgaaggggaagaggcggcggcggaggggctggcggagagtcacagagggcaaatagcgccaggcggccgcttggccggatccaggggcggtgcagggcggccggccctgcctgcgggagagggcgagcatgaactggcccggaggacccagctcgagccgccaggacacagacgtacaggcctcctcgggagggagcgcctccccaccactgagccatcctcagcagcgtccgctgcgtctgcactgatgaccgtctgagcccagctcagcgttcctggacaaacagcctcactcctcagcgttaccgccacacttgaatttctccgaatgtcaaggttccctcccactctatttttttaggttaaagttaattggcatatggaatgttttaatctcctctgaaatgtgtagcgtaggcttttcccaagggtcgctagaaactcgtcttcgcgttgccccctttctggctctcagcgccgtcgccactcgggagaggctgggtgaggcccgtgtgaggactgaccctggattcctcgaaactgccattgtgatcattactctgctctttggaaatggctgtatcatttttttgtactaatgtgaattgttcctcagaaacgcttcttttccatcctagtgagaagctggccctgcaggtggtggcagcaatggtgttgtaagatttcctcccgtagttttttctcctcatggatttgaatgaaatgccaataacacgtccactttcaacgtgtagtttacgcggagcactttcgaggcctggccgggttgggcctacttctcacctgggcctatcttctgaactcgctaggttcttatcaacatttgggggataactttgtatatttttttcatttggcttttctttaccagtttctgatttttattctcaatatatttttgctaaacctatttcacaaatcaccaccgactgaagtgtgtgtttactgatgcggccctgagctccatggcgaaaggagtgactttgcagggcgtgagaccgcagtctgcttagagcacaggaagtgacaacttagggagccccgtagggcgctgcaggccccggggaccccagcacgtgggtctaaagagagacggagtctagctctcctgccacccagagtggcttccatctcagcactctgtgggtctggtgatggaagatgcagtctctgctgatcacatgtgccctctgccagggcacctactgagaggtgcggtcctgggggtggaggcctgcctggcaggtgtgcgtgcctcgtacgtgtgttatgggcactggtctaggccaggtatgacacccactctcctgtgagatttcactttagtttttaaaaggtccagttctacagagtgagacctatctatctgagtactacatatgttttaagacttggttctttttttgagggatccttgaccctgggaagtctggagcaccctgagaagggggcaccatgtgtgcctttgcccacgtgtcctgaggggctgcttgtctgggagggagggagagaacattcagcagcaggtgcttttttatggccttttcttaaaataacctaagggggacacatccatcttgcagagaagtttacagaactccccttgaaaactgctgctgaggctcctgttaaattttctgtggcatcttttatgccttggtaaaaactgcagtgtctttggacctgagagtggctactccgtggttttgtgacctgtaagcgtggggttcaggggtgtgtggccctgcagggtcccacgcctccctgagcactgactggaagtttcactggctggtggctgtcccttctcccatcagggtccccagcaaagttaactacacagaggacccaggggaaacgagctgtgtagccactgacttgctcgcgcggccgtggcctctgaggggcactcgccggttaagacagggtgggagtagtgctttccagttcagactctaacttctcccaaagtgtcctaagaaaatactggatcggctcatagatttatgctccttatgatgccctaacttggaaggttgttctagggacaggccgggcagtgtccccacacacaccttagagtcgaaggccccagggccccgctgtcacttgcccaaaagatcccttccggcaggtaagggactaccaatgcttacgtcaaaacagcagaatcggctttgcagtgcactttggggagcagatattaacttatttttgtgttggacagtagtgaaatcttgtgatttttaatcgctttgataatacttccaaattttatgatttttctgaaggaaataatgcaaacattttaaatatgtttctccccctttccaaaaactgttaaactaatgagcaagtaacactaactttgaatgtctctacaatacccgttgataactcagtggagccaggctttggggtagcggccctgagcttgcagggtttctcgccactggggctgaccacgcccccagctgtgaccgtgggtgtggctggctctcggccctgcccagctttgttctgaggacgtggtgacttcctgaacatcagcttcaatcctccatcattaatgtgaagcaaaacacaaaaaccgccccaatccctcaggattccttggcatccgaaaccagcatctgcacctaaacccatacccacccgtgtgcgcccacagggggatgtgtccgaatgggcagcttaaaatgtggtcacctgtgggggaaactcttcaggcacctgaagtgagaacccagctgtccgtcctcaggccggcctttcttccggcgacacccgtccatggctggctgggtccccttcgcagtgtttgtctgtcttgacatctaaaccccggcgtgtgcagtgcccatcttccaggactaccttattttccagaattaaacctgttttataattcaagttaatgcaaatgactgtcagttgccaaatatcttgatcctatgagtgtagttgatgactgtttgttagtcagtagagtaaaatgctgtgtccacggggtgtcacagcctcaccataccctgttgaggtgtgaaatgccccgtcagaaattaaatacaaacttaaatgtgcctattggtgtctaaacttcatacaatgtaaggtcagattccttttaggaatactgggtgctgtcaccaggtttgatagttagacttaaaaacttgaaattcactttttggggggagggatatactgaaatagagagttgagacttgccagttgggggaaaatagcatttaaaatggaaagctgtgtttggaaaattgtgtatgagtatttttgtattaaaaacattttaaaggcttttttcttaa

SEQ ID NO: 440530 - DNA, 5598 bp, Homo sapiens
ggtggggcgggacgagcctgcctgcaggcatggccacccgctgtgttctgcgactagtgaactgtcatccgcctccttcatctctaggtctcggacagcccgggagacgagccctcggagtccccatacgaaagtgcagacgaaacacaaactgaagtatctgtctcatccaaaaagtctgagcgaggagtgactgccaaaaaggagtatgtgtgccagctgtgtgagaagccgggcagcctcctgctctgtgaaggaccctgctgcggagctttccacctcgcctgccttgggctttcccggaggccagaagggaggttcacctgcagcgagtgtgcctcagggattcactcatgtttcgtgtgtaaagagagcaagacagatgttaagcgctgtgtggtaactcagtgtggaaaattttaccatgaggcttgtgtgaaaaaataccctctgactgtatttgagagccgaggtttccgctgccccctccacagctgtgtgagctgccatgcttccaacccttcaaacccaaggccgtcaaaaggtaaaatgatgcggtgtgtccgctgccccgttgcctatcacagcggggatgcttgtctggcagcaggatgctcagtgatcgcctccaacagcatcatctgcactgcccacttcactgctcggaaggggaagcgacaccacgcccacgtcaacgtgagctggtgcttcgtgtgctccaaaggggggagccttctgtgctgtgagtcctgcccagcggccttccaccctgactgcctgaacatcgagatgcctgacggcagctggttctgcaatgactgcagggctgggaagaagctgcacttccaggatatcatttgggtgaaacttgggaactacagatggtggccggcagaagtttgccatcccaaaaatgttcccccaaatattcagaaaatgaagcacgagattggagaattccctgtgtttttctttgggtctaaagattattactggacgcatcaggcgcgagtgttcccgtacatggagggggaccggggcagccgctaccagggggtcagagggatcggaagagtcttcaaaaacgcactgcaagaagctgaagctcgttttcgtgaaattaagcttcagagggaagcccgagaaacacaggagagcgagcgcaagcccccaccatacaagcacatcaaggtgaataagccttacgggaaagtccagatctacacagcggatatttcagaaatccctaagtgcaactgcaagcccacagatgagaatccttgtggctttgattcggagtgtctgaacaggatgctgatgtttgagtgccacccgcaggtgtgtcccgcgggcgagttctgccagaaccagtgcttcaccaagcgccagtacccagagaccaagatcatcaagacagatggcaaagggtggggcctggtcgccaagagggacatcagaaagggagaatttgttaacgagtacgttggggagctgatcgacgaggaggagtgcatggcgagaatcaagcacgcacacgagaacgacatcacccacttctacatgctcactatagacaaggaccgtataatagacgctggccccaaaggaaactactctcgatttatgaatcacagctgccagcccaactgtgagaccctcaagtggacagtgaatggggacactcgtgtgggcctgtttgccgtctgtgacattcctgcagggacggagctgacttttaactacaacctcgattgtctgggcaatgaaaaaacggtctgccggtgtggagcctccaattgcagtggattcctcggggatagaccaaagacctcgacgaccctttcatcagaggaaaagggcaaaaagaccaagaagaaaacgaggcggcgcagagcaaaaggggaagggaagaggcagtcagaggacgagtgcttccgctgcggtgatggcgggcagctggtgctgtgtgaccgcaagttctgcaccaaggcctaccacctgtcctgcctgggccttggcaagcggcccttcgggaagtgggaatgtccttggcatcattgtgacgtgtgtggcaaaccttcgacttcattttgccacctctgccccaattcgttctgtaaggagcaccaggacgggacagccttcagctgcaccccggacgggcggtcctactgctgtgagcatgacttaggggcggcatcggtcagaagcaccaagactgagaagccccccccagagccagggaagccgaaggggaagaggcggcggcggaggggctggcggagagtcacagagggcaaatagcgccaggcggccgcttggccggatccaggggcggtgcagggcggccggccctgcctgcgggagagggcgagcatgaactggcccggaggacccagctcgagccgccaggacacagacgtacaggcctcctcgggagggagcgcctccccaccactgagccatcctcagcagcgtccgctgcgtctgcactgatgaccgtctgagcccagctcagcgttcctggacaaacagcctcactcctcagcgttaccgccacacttgaatttctccgaatgtcaaggttccctcccactctatttttttaggttaaagttaattggcatatggaatgttttaatctcctctgaaatgtgtagcgtaggcttttcccaagggtcgctagaaactcgtcttcgcgttgccccctttctggctctcagcgccgtcgccactcgggagaggctgggtgaggcccgtgtgaggactgaccctggattcctcgaaactgccattgtgatcattactctgctctttggaaatggctgtatcatttttttgtactaatgtgaattgttcctcagaaacgcttcttttccatcctagtgagaagctggccctgcaggtggtggcagcaatggtgttgtaagatttcctcccgtagttttttctcctcatggatttgaatgaaatgccaataacacgtccactttcaacgtgtagtttacgcggagcactttcgaggcctggccgggttgggcctacttctcacctgggcctatcttctgaactcgctaggttcttatcaacatttgggggataactttgtatatttttttcatttggcttttctttaccagtttctgatttttattctcaatatatttttgctaaacctatttcacaaatcaccaccgactgaagtgtgtgtttactgatgcggccctgagctccatggcgaaaggagtgactttgcagggcgtgagaccgcagtctgcttagagcacaggaagtgacaacttagggagccccgtagggcgctgcaggccccggggaccccagcacgtgggtctaaagagagacggagtctagctctcctgccacccagagtggcttccatctcagcactctgtgggtctggtgatggaagatgcagtctctgctgatcacatgtgccctctgccagggcacctactgagaggtgcggtcctgggggtggaggcctgcctggcaggtgtgcgtgcctcgtacgtgtgttatgggcactggtctaggccaggtatgacacccactctcctgtgagatttcactttagtttttaaaaggtccagttctacagagtgagacctatctatctgagtactacatatgttttaagacttggttctttttttgagggatccttgaccctgggaagtctggagcaccctgagaagggggcaccatgtgtgcctttgcccacgtgtcctgaggggctgcttgtctgggagggagggagagaacattcagcagcaggtgcttttttatggccttttcttaaaataacctaagggggacacatccatcttgcagagaagtttacagaactccccttgaaaactgctgctgaggctcctgttaaattttctgtggcatcttttatgccttggtaaaaactgcagtgtctttggacctgagagtggctactccgtggttttgtgacctgtaagcgtggggttcaggggtgtgtggccctgcagggtcccacgcctccctgagcactgactggaagtttcactggctggtggctgtcccttctcccatcagggtccccagcaaagttaactacacagaggacccaggggaaacgagctgtgtagccactgacttgctcgcgcggccgtggcctctgaggggcactcgccggttaagacagggtgggagtagtgctttccagttcagactctaacttctcccaaagtgtcctaagaaaatactggatcggctcatagatttatgctccttatgatgccctaacttggaaggttgttctagggacaggccgggcagtgtccccacacacaccttagagtcgaaggccccagggccccgctgtcacttgcccaaaagatcccttccggcaggtaagggactaccaatgcttacgtcaaaacagcagaatcggctttgcagtgcactttggggagcagatattaacttatttttgtgttggacagtagtgaaatcttgtgatttttaatcgctttgataatacttccaaattttatgatttttctgaaggaaataatgcaaacattttaaatatgtttctccccctttccaaaaactgttaaactaatgagcaagtaacactaactttgaatgtctctacaatacccgttgataactcagtggagccaggctttggggtagcggccctgagcttgcagggtttctcgccactggggctgaccacgcccccagctgtgaccgtgggtgtggctggctctcggccctgcccagctttgttctgaggacgtggtgacttcctgaacatcagcttcaatcctccatcattaatgtgaagcaaaacacaaaaaccgccccaatccctcaggattccttggcatccgaaaccagcatctgcacctaaacccatacccacccgtgtgcgcccacagggggatgtgtccgaatgggcagcttaaaatgtggtcacctgtgggggaaactcttcaggcacctgaagtgagaacccagctgtccgtcctcaggccggcctttcttccggcgacacccgtccatggctggctgggtccccttcgcagtgtttgtctgtcttgacatctaaaccccggcgtgtgcagtgcccatcttccaggactaccttattttccagaattaaacctgttttataattcaagttaatgcaaatgactgtcagttgccaaatatcttgatcctatgagtgtagttgatgactgtttgttagtcagtagagtaaaatgctgtgtccacggggtgtcacagcctcaccataccctgttgaggtgtgaaatgccccgtcagaaattaaatacaaacttaaatgtgcctattggtgtctaaacttcatacaatgtaaggtcagattccttttaggaatactgggtgctgtcaccaggtttgatagttagacttaaaaacttgaaattcactttttggggggagggatatactgaaatagagagttgagacttgccagttgggggaaaatagcatttaaaatggaaagctgtgtttggaaaattgtgtatgagtatttttgtattaaaaacattttaaaggcttttttcttaa

SEQ ID NO: 440531 - DNA, 5311 bp, Homo sapiens
tgaggatcctgagaagacgacagaagggaggttcactgcatgcgagtgtgctcaggggattcactcatgtttcgtgtgtaaagagagcaagacagatgttaagcgctgtgtggtaactcagtgtggaaaattttaccatgaggcttgtgtgaaaaaataccctctgactgtatttgagagccgaggtttccgctgccccctccacagctgtgtgagctgccatgcttccaacccttcaaacccaaggccgtcaaaaggtaaaatgatgcggtgtgtccgctgccccgttgcctatcacagcggggatgcttgtctggcagcaggatgctcagtgatcgcctccaacagcatcatctgcactgcccacttcactgctcggaaggggaagcgacaccacgcccacgtcaacgtgagctggtgcttcgtgtgctccaaaggggggagccttctgtgctgtgagtcctgcccagcggccttccaccctgactgcctgaacatcgagatgcctgacggcagctggttctgcaatgactgcagggctgggaagaagctgcacttccaggatatcatttgggtgaaacttgggaactacagatggtggccggcagaagtttgccatcccaaaaatgttcccccaaatattcagaaaatgaagcacgagattggagaattccctgtgtttttctttgggtctaaagattattactggacgcatcaggcgcgagtgttcccgtacatggagggggaccggggcagccgctaccagggggtcagagggatcggaagagtcttcaaaaacgcactgcaagaagctgaagctcgttttcgtgaaattaagcttcagagggaagcccgagaaacacaggagagcgagcgcaagcccccaccatacaagcacatcaaggtgaataagccttacgggaaagtccagatctacacagcggatatttcagaaatccctaagtgcaactgcaagcccacagatgagaatccttgtggctttgattcggagtgtctgaacaggatgctgatgtttgagtgccacccgcaggtgtgtcccgcgggcgagttctgccagaaccagtgcttcaccaagcgccagtacccagagaccaagatcatcaagacagatggcaaagggtggggcctggtcgccaagagggacatcagaaagggagaatttgttaacgagtacgttggggagctgatcgacgaggaggagtgcatggcgagaatcaagcacgcacacgagaacgacatcacccacttctacatgctcactatagacaaggaccgtataatagacgctggccccaaaggaaactactctcgatttatgaatcacagctgccagcccaactgtgagaccctcaagtggacagtgaatggggacactcgtgtgggcctgtttgccgtctgtgacattcctgcagggacggagctgacttttaactacaacctcgattgtctgggcaatgaaaaaacggtctgccggtgtggagcctccaattgcagtggattcctcggggatagaccaaagacctcgacgaccctttcatcagaggaaaagggcaaaaagaccaagaagaaaacgaggcggcgcagagcaaaaggggaagggaagaggcagtcagaggacgagtgcttccgctgcggtgatggcgggcagctggtgctgtgtgaccgcaagttctgcaccaaggcctaccacctgtcctgcctgggccttggcaagcggcccttcgggaagtgggaatgtccttggcatcattgtgacgtgtgtggcaaaccttcgacttcattttgccacctctgccccaattcgttctgtaaggagcaccaggacgggacagccttcagctgcaccccggacgggcggtcctactgctgtgagcatgacttaggggcggcatcggtcagaagcaccaagactgagaagccccccccagagccagggaagccgaaggggaagaggcggcggcggaggggctggcggagagtcacagagggcaaatagcgccaggcggccgcttggccggatccaggggcggtgcagggcggccggccctgcctgcgggagagggcgagcatgaactggcccggaggacccagctcgagccgccaggacacagacgtacaggcctcctcgggagggagcgcctccccaccactgagccatcctcagcagcgtccgctgcgtctgcactgatgaccgtctgagcccagctcagcgttcctggacaaacagcctcactcctcagcgttaccgccacacttgaatttctccgaatgtcaaggttccctcccactctatttttttaggttaaagttaattggcatatggaatgttttaatctcctctgaaatgtgtagcgtaggcttttcccaagggtcgctagaaactcgtcttcgcgttgccccctttctggctctcagcgccgtcgccactcgggagaggctgggtgaggcccgtgtgaggactgaccctggattcctcgaaactgccattgtgatcattactctgctctttggaaatggctgtatcatttttttgtactaatgtgaattgttcctcagaaacgcttcttttccatcctagtgagaagctggccctgcaggtggtggcagcaatggtgttgtaagatttcctcccgtagttttttctcctcatggatttgaatgaaatgccaataacacgtccactttcaacgtgtagtttacgcggagcactttcgaggcctggccgggttgggcctacttctcacctgggcctatcttctgaactcgctaggttcttatcaacatttgggggataactttgtatatttttttcatttggcttttctttaccagtttctgatttttattctcaatatatttttgctaaacctatttcacaaatcaccaccgactgaagtgtgtgtttactgatgcggccctgagctccatggcgaaaggagtgactttgcagggcgtgagaccgcagtctgcttagagcacaggaagtgacaacttagggagccccgtagggcgctgcaggccccggggaccccagcacgtgggtctaaagagagacggagtctagctctcctgccacccagagtggcttccatctcagcactctgtgggtctggtgatggaagatgcagtctctgctgatcacatgtgccctctgccagggcacctactgagaggtgcggtcctgggggtggaggcctgcctggcaggtgtgcgtgcctcgtacgtgtgttatgggcactggtctaggccaggtatgacacccactctcctgtgagatttcactttagtttttaaaaggtccagttctacagagtgagacctatctatctgagtactacatatgttttaagacttggttctttttttgagggatccttgaccctgggaagtctggagcaccctgagaagggggcaccatgtgtgcctttgcccacgtgtcctgaggggctgcttgtctgggagggagggagagaacattcagcagcaggtgcttttttatggccttttcttaaaataacctaagggggacacatccatcttgcagagaagtttacagaactccccttgaaaactgctgctgaggctcctgttaaattttctgtggcatcttttatgccttggtaaaaactgcagtgtctttggacctgagagtggctactccgtggttttgtgacctgtaagcgtggggttcaggggtgtgtggccctgcagggtcccacgcctccctgagcactgactggaagtttcactggctggtggctgtcccttctcccatcagggtccccagcaaagttaactacacagaggacccaggggaaacgagctgtgtagccactgacttgctcgcgcggccgtggcctctgaggggcactcgccggttaagacagggtgggagtagtgctttccagttcagactctaacttctcccaaagtgtcctaagaaaatactggatcggctcatagatttatgctccttatgatgccctaacttggaaggttgttctagggacaggccgggcagtgtccccacacacaccttagagtcgaaggccccagggccccgctgtcacttgcccaaaagatcccttccggcaggtaagggactaccaatgcttacgtcaaaacagcagaatcggctttgcagtgcactttggggagcagatattaacttatttttgtgttggacagtagtgaaatcttgtgatttttaatcgctttgataatacttccaaattttatgatttttctgaaggaaataatgcaaacattttaaatatgtttctccccctttccaaaaactgttaaactaatgagcaagtaacactaactttgaatgtctctacaatacccgttgataactcagtggagccaggctttggggtagcggccctgagcttgcagggtttctcgccactggggctgaccacgcccccagctgtgaccgtgggtgtggctggctctcggccctgcccagctttgttctgaggacgtggtgacttcctgaacatcagcttcaatcctccatcattaatgtgaagcaaaacacaaaaaccgccccaatccctcaggattccttggcatccgaaaccagcatctgcacctaaacccatacccacccgtgtgcgcccacagggggatgtgtccgaatgggcagcttaaaatgtggtcacctgtgggggaaactcttcaggcacctgaagtgagaacccagctgtccgtcctcaggccggcctttcttccggcgacacccgtccatggctggctgggtccccttcgcagtgtttgtctgtcttgacatctaaaccccggcgtgtgcagtgcccatcttccaggactaccttattttccagaattaaacctgttttataattcaagttaatgcaaatgactgtcagttgccaaatatcttgatcctatgagtgtagttgatgactgtttgttagtcagtagagtaaaatgctgtgtccacggggtgtcacagcctcaccataccctgttgaggtgtgaaatgccccgtcagaaattaaatacaaacttaaatgtgcctattggtgtctaaacttcatacaatgtaaggtcagattccttttaggaatactgggtgctgtcaccaggtttgatagttagacttaaaaacttgaaattcactttttggggggagggatatactgaaatagagagttgagacttgccagttgggggaaaatagcatttaaaatggaaagctgtgtttggaaaattgtgtatgagtatttttgtattaaaaacattttaaaggcttttttcttaa

SEQ ID NO: 440532 - DNA, 6596 bp, Homo sapiens
  misc_feature (12)..(12): n is a, c, g, or t
  misc_feature (86)..(86): n is a, c, g, or t
gggaggcgcggnggcggggtcggcgccgcgcgcgagagcctcggcctggccgcgctgcgcccgccgccgccgccgccccctccccncctgggccctaccgccgcacggccccggccccctcccagcctgccgctccggagagccgcccgccgaggatgcgacgcaccgcagtgttctaagaacggaagcatctgggctggatggaatttagcatcaagcagagtcccctttctgttcagagtgttgtaaagtgcataaagatgaagcaggcaccagaaatcctcggcagtgccaacgggaagactccgagctgcgaggtgaaccgcgagtgttctgtgttcctcagcaaagcccagctctccagtagcctgcaggagggggtcatgcagaagtttaacggccacgacgccctgccctttattccagccgacaagctgaaagatcttacttcccgggtgtttaatggagaacccggcgcacacgatgccaaactgcgttttgagtcccaggaaatgaaagggattgggacaccccctaacactacccctatcaaaaatggctctccagaaattaagctgaaaatcaccaaaacatacatgaatgggaagcctctctttgaatcttccatttgtggtgacagtgctgctgatgtgtctcagtcagaagaaaatggacaaaaaccagaaaacaaggcgagaaggaacaggaagaggagcataaaatatgactccttgctggagcagggccttgtcgaagcagctcttgtgtctaagatctcaagtccttcagataaaaagattccagctaagaaagagtcttgtccaaacactggaagagacaaagaccacctgttgaaatacaacgttggtgatttggtgtggtccaaagtgtcgggttacccttggtggccttgcatggtttctgcagatccactccttcacagctataccaaacttaaaggtcagaaaaagagtgcacgccagtatcacgtacagttctttggtgacgccccagaaagagcttggatatttgagaagagcctcgtagcttttgaaggagaaggacagtttgaaaaattatgccaggaaagtgccaagcaggcacccacgaaagctgagaaaattaagctattgaaaccaatttcagggaaattgagggcccagtgggaaatgggcattgttcaagcagaagaagctgcaagcatgtcagtggaggagcggaaagccaagttcacctttctctatgtgggggaccagcttcatctcaaccctcaagtagccaaggaggctggcattgctgcagagtctttgggagaaatggcagaatcctcaggagtcagtgaagaagctgctgaaaaccccaagtctgtgagagaagagtgcattcccatgaagagaaggcggagggccaaactgtgtagctctgcagagaccctggagagtcaccccgacatagggaagagtactcctcaaaagacggcagaggctgaccccagaagaggagtagggtctcctcctgggaggaagaagaccacagtctccatgccacgaagcaggaagggagatgcagcatcccagtttttggtcttctgtcaaaaacacagggatgaggtggtagctgagcacccagatgcttcaggtgaggagattgaagagctgctcaggtcacagtggagtctgctgagtgagaagcagagagcacgctacaacaccaagtttgccctggtggcccctgtccaggctgaagaagactctggtaatgtaaatgggaaaaaaagaaaccacacaaagaggatacaggaccctacagaagatgctgaagctgaggacacacccaggaaaagactcaggacggacaagcacagtcttcggaagagagacacaatcactgacaaaacggccagaacaagctcttacaaggccatggaggcagcctcctcgctcaagagccaggcagcaacgaaaaatctgtctgatgcatgtaaaccactgaagaagcgaaatcgggcttccacggcagcatcttcagctcttgggtttagcaaaagttcatctccttctgcatccttaactgagaatgagggtaaaataataataataacgataaccatggcattggtatgaaggccatttagctgcccacgctgcagtgtgagtaatgctcagacttcataagcgcagcattggtgctcactgccagtgcagatgttttagggcctcttggctaactcagattcatgaaatggacaaacagtgcactatgttagtttatttgagcactttttatacacacgcacacagtgtctgtgtacatgtacagatatacttcagtcttgatgcagtttcatagttcttaaaatctgtctgaagaatgttgtgttctgtgtagccctcacactgtaagagttcacatggaagtaagtctgcgttggttctgaaagggcacagtgtcagttgagctgacatatactgggtggggtggaaggcgactcacacaccacacctgattcctgttgcttccagacctaggctcatggaggaagccaaagatttctttgttctcatgcatttcatggctttggtcctttaaattctggcacatttttagttacttgagtgttgaggtgagtcagaactaccattgtaatatgactcctgtgttctggacttgcagagtacatgatagcaaaataaagccatttggggctgctgcctgccatcattgtaacatgacacttagactttattatcaaacctaaattttttgccgttgccaaaaacaacaaatagccacagaacgtaggtgtgacacttttttgttcggaggtagttttggtttcctgatttttagggattaccttcatagagctttggagttttaatttcttgttatttggttctccgtgatgctgtttttctcattgtagacatgggtcctgtttttgtcatgtttatgaggagatgataactgggggcccttttggaacagggtagtgaggcaagggttggacaggccccttactcttgctgagtcagaaggcggcacttctggccaggtctctgccatggtccccaggaaggatggggtgtgcctcagttgtttccactcattagaggagtgtaggccttccagtgcaggaaggtcagggacctaggcaacctgggcggggctcatagagctctgcggcttgccactctgaatcctcagcgaccactcctccgagtgggattttctgcagggactcaaaccaactcagtggtggtcgagacctgttcacggatggtgggactggggctgctttacagtttgatacgtgtagataattaagcattttgtgatgtttggacacactggagaaaaggcagtaagaattatttactgaaacatctaggagcttactgaaatatgaaaaggcaaattttatacaaattatttttcctttttcctttctttcttgtccaagttcaggttaaaatcttagaaaattaaatgaaaggtcatttacagttccaaagaagaatattaaacatttttcacttaagttgagatttttgctttaaagagcttttaatgagtttttctgttatcataattttggtccggttattcacttgagttgttgcttatactgttgtcaggtacagtagagagaacatggagcctgctgagatcttctctgttattcctgatcctaagtcatgtatatcgaaggctttgatttagagtaatgcatgaggccagtgtagcggggtcgaggcctgcccatgagtcaggggagctcagtctccctggcctaggcagttgtcctgaccttgagaagacatagatgaagcattttatcatcattagacttaaattttaattcttcagaatgtcagaagttgataggttgttaaatacatttatataatacattaaatatgtgaaattaatacaccttcctacattttgaaggtgatgcatagatcccatagtgtgcatcatgttccttatatgaaaacgtttaaattactgggtcttttccattaaactacttttgtatggcttagataaatcttccattagtgttcatttttatagaattatgctgttaaaactactttaggtgaacaaataaacttgtctattatatattaacgcgactgaactacagtaaatgtttgtgatgtttccaatgctgaatgcctgttagcatatgaggcaaagtgtagtgttataaaaaacagcctgttgactgctgggcccgattctgatatgagttaggtgaccatgagaattgctgtttgaggtccacactgacacacacccattgggtcacaccccctttgcatgtttgtatttcctccctttcatcacatttgtttgaaataaggtacttttatagggttggtatttcagaacactttaggtcatgttgtagtttaaattcttcttgaaaaaggtatatgtgataaataaaaatttttattggaataattattacatggtactacatcaccctgaggaagagaataaattaaaattacacacttgcatgacaaaggcctgtgaaggaattaatgtgatttaagtgttttgtaacttcattttttattcctttagtagagcaaattcttatttttttcgccttcactggtaacagcttttgtgggagcccacaccagtcaagttggatttgaacccagctgctctgtactgcacttagaatgatgtaatattccaggatgctgctgcaggtggcgtatcatcgtacacactcagtgacatttctatcacaatcattttatggaagatgtgtgataatctgtttttactggtattaataaacacatacaatgaagaaaacagataacaaattttaagaccaaggtctcggacagcccgggagacgagccctcggagtccccatacgaaagtgcagacgaaacacaaactgaagtatctgtctcatccaaaaagtctgagcgaggagtgactgccaaaaaggagtatgtgtgccagctgtgtgagaagccgggcagcctcctgctctgtgaaggaccctgctgcggagctttccacctcgcctgccttgggctttcccggaggccagaagggaggttcacctgcagcgagtgtgcctcaggtgtcgcccggcacagtctggggtctgtgaggatgatgagaggacacctgcacagccgtggcccttcctgcctactcaccgggcccaaggagtctcctatctcacgtcagaacacttcctgggtcaggaagacacctggagagtctcccaggccatggcagccccacagcagcacctcacttatgggagtgtctgtctgcctgcccagaatgataagtgactgctccaccactggccagctgctctcaaggaggaaaggcctcttttcataggagccccttctttcaagcttcttgccagttagactgggcctccccagccaggctgcctagtaagattctcctgtatttcaggtgaagctggagctcagatcgcagcaaggtaatccttgatggctggatctttttgctggagaatgcttggactagtgagcaaggttggaaacagggccaggtgctttagcagcgtggctgcctctgaagaggagttgcttgattttagtggctcagaactgcaatttaattcttgttctttgcacctctctctccaccccttctttaactttttgttagggattcactcatgtttcgtgtgtaaagagagcaagacagatgttaagcgctgtgtggtaactcagtgtggaaaattttaccatgaggcttgtgtgaaaaaataccctctgactgtatttgagagccgaggtttccgctgccccctccacagctgtgtgagctgccatgcttccaacccttcaaacccaaggccgtcaaaaggtacaggtgcacctgcgcagccttgctgtgggttcagatgcaggccagacgcaggcccatgggcgcttgggaaggtgggctgttgggattgtcaccaaagagcattaattatcttgagtgactaactggacatcggctgggttgggttttctttgacaaaggacctgtctcccttttccttctttccatcctaaatatcaccctaaagatgcttaactataggagaggggcaacctttggaccatttgatagattttgtttaccctggctgcactacagtgggaatggaggggccagagcccctgtcctggatgtgcagggcaggctgtccccagagatggtgctgtgcaccaggaggctccgccggttgacgaaggagctgcagctctggctctgtttgagggaaagtagagtgggctccaccttccagcacccgcatttcagagatgacaggcgccagtgggaaaacagtagcgtcttgttccacttggtgatgagacagtctgagaacgggcggagtgccctggggggcgaatcatggcacctagggcgccctcgtacacctccgtttgcgaagctgagggcacccgcacacatggggttcccccgcacgggggcacgaccactgagagagacctcacacacacaggcccccaccagggggcccagggaccggtttgccactccccttcttcgct

SEQ ID NO: 440533 - DNA, 2479 bp, Homo sapiens
  misc_feature (12)..(12): n is a, c, g, or t
  misc_feature (86)..(86): n is a, c, g, or t
gggaggcgcggnggcggggtcggcgccgcgcgcgagagcctcggcctggccgcgctgcgcccgccgccgccgccgccccctccccncctgggccctaccgccgcacggccccggccccctcccagcctgccgctccggagagccgcccgccgaggatgcgacgcaccgcagtgttctaagaacggaagcatctgggctggatggaatttagcatcaagcagagtcccctttctgttcagagtgttgtaaagtgcataaagatgaagcaggcaccagaaatcctcggcagtgccaacgggaagactccgagctgcgaggtgaaccgcgagtgttctgtgttcctcagcaaagcccagctctccagtagcctgcaggagggggtcatgcagaagtttaacggccacgacgccctgccctttattccagccgacaagctgaaagatcttacttcccgggtgtttaatggagaacccggcgcacacgatgccaaactgcgttttgagtcccaggaaatgaaagggattgggacaccccctaacactacccctatcaaaaatggctctccagaaattaagctgaaaatcaccaaaacatacatgaatgggaagcctctctttgaatcttccatttgtggtgacagtgctgctgatgtgtctcagtcagaagaaaatggacaaaaaccagaaaacaaggcgagaaggaacaggaagaggagcataaaatatgactccttgctggagcagggccttgtcgaagcagctcttgtgtctaagatctcaagtccttcagataaaaagattccagctaagaaagagtcttgtccaaacactggaagagacaaagaccacctgttgaaatacaacgttggtgatttggtgtggtccaaagtgtcgggttacccttggtggccttgcatggtttctgcagatccactccttcacagctataccaaacttaaaggtcagaaaaagagtgcacgccagtatcacgtacagttctttggtgacgccccagaaagagcttggatatttgagaagagcctcgtagcttttgaaggagaaggacagtttgaaaaattatgccaggaaagtgccaagcaggcacccacgaaagctgagaaaattaagctattgaaaccaatttcagggaaattgagggcccagtgggaaatgggcattgttcaagcagaagaagctgcaagcatgtcagtggaggagcggaaagccaagttcacctttctctatgtgggggaccagcttcatctcaaccctcaagtagccaaggaggctggcattgctgcagagtctttgggagaaatggcagaatcctcaggagtcagtgaagaagctgctgaaaaccccaagtctgtgagagaagagtgcattcccatgaagagaaggcggagggccaaactgtgtagctctgcagagaccctggagagtcaccccgacatagggaagagtactcctcaaaagacggcagaggctgaccccagaagaggagtagggtctcctcctgggaggaagaagaccacagtctccatgccacgaagcaggaagggagatgcagcatcccagtttttggtcttctgtcaaaaacacagggatgaggtggtagctgagcacccagatgcttcaggtgaggagattgaagagctgctcaggtcacagtggagtctgctgagtgagaagcagagagcacgctacaacaccaagtttgccctggtggcccctgtccaggctgaagaagactctggtaatgtaaatgggaaaaaaagaaaccacacaaagaggatacaggaccctacagaagatgctgaagctgaggacacacccaggaaaagactcaggacggacaagcacagtcttcggaagagagacacaatcactgacaaaacggccagaacaagctcttacaaggccatggaggcagcctcctcgctcaagagccaggcagcaacgaaaaatctgtctgatgcatgtaaaccactgaagaagcgaaatcgggcttccacggcagcatcttcagctcttgggtttagcaaaagttcatctccttctgcatccttaactgagaatgaggtctcggacagcccgggagacgagccctcggagtccccatacgaaagtgcagacgaaacacaaactgaagtatctgtctcatccaaaaagtctgagcgaggagtgactgccaaaaaggagtatgtgtgccagctgtgtgagaagccgggcagcctcctgctctgtgaaggaccctgctgcggagctttccacctcgcctgccttgggctttcccggaggccagaagggaggttcacctgcagcgagtgtgcctcaggcaagttcccacgggcgggcagctctgcagcctggccggccacctgctcctgcaaccccctgcaccaagtcctgccctgagctgcctgcagaggacaagccccctccccacccccaccgcctggccctctctggagcttgta

SEQ ID NO: 440534 - DNA, 2141 bp, Homo sapiens
  misc_feature (12)..(12): n is a, c, g, or t
  misc_feature (86)..(86): n is a, c, g, or t
gggaggcgcggnggcggggtcggcgccgcgcgcgagagcctcggcctggccgcgctgcgcccgccgccgccgccgccccctccccncctgggccctaccgccgcacggccccggccccctcccagcctgccgctccggagagccgcccgccgaggatgcgacgcaccgcagtgttctaagaacggaagcatctgggctggatggaatttagcatcaagcagagtcccctttctgttcagagtgttgtaaagtgcataaagatgaagcaggcaccagaaatcctcggcagtgccaacgggaagactccgagctgcgaggtgaaccgcgagtgttctgtgttcctcagcaaagcccagctctccagtagcctgcaggagggggtcatgcagaagtttaacggccacgacgccctgccctttattccagccgacaagctgaaagatcttacttcccgggtgtttaatggagaacccggcgcacacgatgccaaactgcgttttgagtcccaggaaatgaaagggattgggacaccccctaacactacccctatcaaaaatggctctccagaaattaagctgaaaatcaccaaaacatacatgaatgggaagcctctctttgaatcttccatttgtggtgacagtgctgctgatgtgtctcagtcagaagaaaatggacaaaaaccagaaaacaaggcgagaaggaacaggaagaggagcataaaatatgactccttgctggagcagggccttgtcgaagcagctcttgtgtctaagatctcaagtccttcagataaaaagattccagctaagaaagagtcttgtccaaacactggaagagacaaagaccacctgttgaaatacaacgttggtgatttggtgtggtccaaagtgtcgggttacccttggtggccttgcatggtttctgcagatccactccttcacagctataccaaacttaaaggtcagaaaaagagtgcacgccagtatcacgtacagttctttggtgacgccccagaaagagcttggatatttgagaagagcctcgtagcttttgaaggagaaggacagtttgaaaaattatgccaggaaagtgccaagcaggcacccacgaaagctgagaaaattaagctattgaaaccaatttcagggaaattgagggcccagtgggaaatgggcattgttcaagcagaagaagctgcaagcatgtcagtggaggagcggaaagccaagttcacctttctctatgtgggggaccagcttcatctcaaccctcaagtagccaaggaggctggcattgctgcagagtctttgggagaaatggcagaatcctcaggagtcagtgaagaagctgctgaaaaccccaagtctgtgagagaagagtgcattcccatgaagagaaggcggagggccaaactgtgtagctctgcagagaccctggagagtcaccccgacatagggaagagtactcctcaaaagacggcagaggctgaccccagaagaggagtagggtctcctcctgggaggaagaagaccacagtctccatgccacgaagcaggaagggagatgcagcatcccagtttttggtcttctgtcaaaaacacagggatgaggtggtagctgagcacccagatgcttcaggtgaggagattgaagagctgctcaggtcacagtggagtctgctgagtgagaagcagagagcacgctacaacaccaagtttgccctggtggcccctgtccaggctgaagaagactctggtaatgtaaatgggaaaaaaagaaaccacacaaagaggatacaggaccctacagaagatgctgaagctgaggacacacccaggaaaagactcaggacggacaagcacagtcttcggaagagagacacaatcactgacaaaacggccagaacaagctcttacaaggccatggaggcagcctcctcgctcaagagccaggcagcaacgaaaaatctgtctgatgcatgtaaaccactgaagaagcgaaatcgggcttccacggcagcatcttcagctcttgggtttagcaaaagttcatctccttctgcatccttaactgagaatgagtggaaaatgaaggtctttcggacaagccccggggagaccaagccccctcgggaggtcccc

SEQ ID NO: 440535 - DNA, 1167 bp, Homo sapiens
  misc_feature (12)..(12): n is a, c, g, or t
  misc_feature (86)..(86): n is a, c, g, or t
gggaggcgcggnggcggggtcggcgccgcgcgcgagagcctcggcctggccgcgctgcgcccgccgccgccgccgccccctccccncctgggccctaccgccgcacggccccggccccctcccagcctgccgctccggagagccgcccgccgaggatgcgacgcaccgcagtgttctaagaacggaagcatctgggctggatggaatttagcatcaagcagagtcccctttctgttcagagtgttgtaaagtgcataaagatgaagcaggcaccagaaatcctcggcagtgccaacgggaagactccgagctgcgaggtgaaccgcgagtgttctgtgttcctcagcaaagcccagctctccagtagcctgcaggagggggtcatgcagaagtttaacggccacgacgccctgccctttattccagccgacaagctgaaagatcttacttcccgggtgtttaatggagaacccggcgcacacgatgccaaactgcgttttgagtcccaggaaatgaaagggattgggacaccccctaacactacccctatcaaaaatggctctccagaaattaagctgaaaatcaccaaaacatacatgaatgggaagcctctctttgaatcttccatttgtggtgacagtgctgctgatgtgtctcagtcagaagaaaatggacaaaaaccagaaaacaaggcgagaaggaacaggaagaggagcataaaatatgactccttgctggagcagggccttgtcgaagcagctcttgtgtctaagatctcaagtccttcagataaaaagattccagctaagaaagagtcttgtccaaacactggaagagacaaagaccacctgttgaaatacaacgttggtgatttggtgtggtccaaagtgtcgggttacccttggtggccttgcatggtttctgcagatccactccttcacagctataccaaacttaaaggtcagaaaaagagtgcacgccagtatcacgtacagttctttggtgacgccccagaaagagcttggatatttgagaagagcctcgtagcttttgaaggagaaggacagtttgaaaaattatgccaggaaagtgccaagcaggcacccacgaaagctgagaaaattaaggtgatagatgacccttcagtctacttttagaccagaaatt

SEQ ID NO: 440536 - DNA, 8545 bp, Homo sapiens
  misc_feature (12)..(12): n is a, c, g, or t
  misc_feature (86)..(86): n is a, c, g, or t
gggaggcgcggnggcggggtcggcgccgcgcgcgagagcctcggcctggccgcgctgcgcccgccgccgccgccgccccctccccncctgggccctaccgccgcacggccccggccccctcccagcctgccgctccggagagccgcccgccgaggatgcgacgcaccgcagtgttctaagaacggaagcatctgggctggatggaatttagcatcaagcagagtcccctttctgttcagagtgttgtaaagtgcataaagatgaagcaggcaccagaaatcctcggcagtgccaacgggaagactccgagctgcgaggtgaaccgcgagtgttctgtgttcctcagcaaagcccagctctccagtagcctgcaggagggggtcatgcagaagtttaacggccacgacgccctgccctttattccagccgacaagctgaaagatcttacttcccgggtgtttaatggagaacccggcgcacacgatgccaaactgcgttttgagtcccaggaaatgaaagggattgggacaccccctaacactacccctatcaaaaatggctctccagaaattaagctgaaaatcaccaaaacatacatgaatgggaagcctctctttgaatcttccatttgtggtgacagtgctgctgatgtgtctcagtcagaagaaaatggacaaaaaccagaaaacaaggcgagaaggaacaggaagaggagcataaaatatgactccttgctggagcagggccttgtcgaagcagctcttgtgtctaagatctcaagtccttcagataaaaagattccagctaagaaagagtcttgtccaaacactggaagagacaaagaccacctgttgaaatacaacgttggtgatttggtgtggtccaaagtgtcgggttacccttggtggccttgcatggtttctgcagatccactccttcacagctataccaaacttaaaggtcagaaaaagagtgcacgccagtatcacgtacagttctttggtgacgccccagaaagagcttggatatttgagaagagcctcgtagcttttgaaggagaaggacagtttgaaaaattatgccaggaaagtgccaagcaggcacccacgaaagctgagaaaattaagctattgaaaccaatttcagggaaattgagggcccagtgggaaatgggcattgttcaagcagaagaagctgcaagcatgtcagtggaggagcggaaagccaagttcacctttctctatgtgggggaccagcttcatctcaaccctcaagtagccaaggaggctggcattgctgcagagtctttgggagaaatggcagaatcctcaggagtcagtgaagaagctgctgaaaaccccaagtctgtgagagaagagtgcattcccatgaagagaaggcggagggccaaactgtgtagctctgcagagaccctggagagtcaccccgacatagggaagagtactcctcaaaagacggcagaggctgaccccagaagaggagtagggtctcctcctgggaggaagaagaccacagtctccatgccacgaagcaggaagggagatgcagcatcccagtttttggtcttctgtcaaaaacacagggatgaggtggtagctgagcacccagatgcttcaggtgaggagattgaagagctgctcaggtcacagtggagtctgctgagtgagaagcagagagcacgctacaacaccaagtttgccctggtggcccctgtccaggctgaagaagactctggtaatgtaaatgggaaaaaaagaaaccacacaaagaggatacaggaccctacagaagatgctgaagctgaggacacacccaggaaaagactcaggacggacaagcacagtcttcggaagagagacacaatcactgacaaaacggccagaacaagctcttacaaggccatggaggcagcctcctcgctcaagagccaggcagcaacgaaaaatctgtctgatgcatgtaaaccactgaagaagcgaaatcgggcttccacggcagcatcttcagctcttgggtttagcaaaagttcatctccttctgcatccttaactgagaatgagggtaaaataataataataacgataaccatggcattggtatgaaggccatttagctgcccacgctgcagtgtgagtaatgctcagacttcataagcgcagcattggtgctcactgccagtgcagatgttttagggcctcttggctaactcagattcatgaaatggacaaacagtgcactatgttagtttatttgagcactttttatacacacgcacacagtgtctgtgtacatgtacagatatacttcagtcttgatgcagtttcatagttcttaaaatctgtctgaagaatgttgtgttctgtgtagccctcacactgtaagagttcacatggaagtaagtctgcgttggttctgaaagggcacagtgtcagttgagctgacatatactgggtggggtggaaggcgactcacacaccacacctgattcctgttgcttccagacctaggctcatggaggaagccaaagatttctttgttctcatgcatttcatggctttggtcctttaaattctggcacatttttagttacttgagtgttgaggtgagtcagaactaccattgtaatatgactcctgtgttctggacttgcagagtacatgatagcaaaataaagccatttggggctgctgcctgccatcattgtaacatgacacttagactttattatcaaacctaaattttttgccgttgccaaaaacaacaaatagccacagaacgtaggtgtgacacttttttgttcggaggtagttttggtttcctgatttttagggattaccttcatagagctttggagttttaatttcttgttatttggttctccgtgatgctgtttttctcattgtagacatgggtcctgtttttgtcatgtttatgaggagatgataactgggggcccttttggaacagggtagtgaggcaagggttggacaggccccttactcttgctgagtcagaaggcggcacttctggccaggtctctgccatggtccccaggaaggatggggtgtgcctcagttgtttccactcattagaggagtgtaggccttccagtgcaggaaggtcagggacctaggcaacctgggcggggctcatagagctctgcggcttgccactctgaatcctcagcgaccactcctccgagtgggattttctgcagggactcaaaccaactcagtggtggtcgagacctgttcacggatggtgggactggggctgctttacagtttgatacgtgtagataattaagcattttgtgatgtttggacacactggagaaaaggcagtaagaattatttactgaaacatctaggagcttactgaaatatgaaaaggcaaattttatacaaattatttttcctttttcctttctttcttgtccaagttcaggttaaaatcttagaaaattaaatgaaaggtcatttacagttccaaagaagaatattaaacatttttcacttaagttgagatttttgctttaaagagcttttaatgagtttttctgttatcataattttggtccggttattcacttgagttgttgcttatactgttgtcaggtacagtagagagaacatggagcctgctgagatcttctctgttattcctgatcctaagtcatgtatatcgaaggctttgatttagagtaatgcatgaggccagtgtagcggggtcgaggcctgcccatgagtcaggggagctcagtctccctggcctaggcagttgtcctgaccttgagaagacatagatgaagcattttatcatcattagacttaaattttaattcttcagaatgtcagaagttgataggttgttaaatacatttatataatacattaaatatgtgaaattaatacaccttcctacattttgaaggtgatgcatagatcccatagtgtgcatcatgttccttatatgaaaacgtttaaattactgggtcttttccattaaactacttttgtatggcttagataaatcttccattagtgttcatttttatagaattatgctgttaaaactactttaggtgaacaaataaacttgtctattatatattaacgcgactgaactacagtaaatgtttgtgatgtttccaatgctgaatgcctgttagcatatgaggcaaagtgtagtgttataaaaaacagcctgttgactgctgggcccgattctgatatgagttaggtgaccatgagaattgctgtttgaggtccacactgacacacacccattgggtcacaccccctttgcatgtttgtatttcctccctttcatcacatttgtttgaaataaggtacttttatagggttggtatttcagaacactttaggtcatgttgtagtttaaattcttcttgaaaaaggtatatgtgataaataaaaatttttattggaataattattacatggtactacatcaccctgaggaagagaataaattaaaattacacacttgcatgacaaaggcctgtgaaggaattaatgtgatttaagtgttttgtaacttcattttttattcctttagtagagcaaattcttatttttttcgccttcactggtaacagcttttgtgggagcccacaccagtcaagttggatttgaacccagctgctctgtactgcacttagaatgatgtaatattccaggatgctgctgcaggtggcgtatcatcgtacacactcagtgacatttctatcacaatcattttatggaagatgtgtgataatctgtttttactggtattaataaacacatacaatgaagaaaacagataacaaattttaagaccaaggtctcggacagcccgggagacgagccctcggagtccccatacgaaagtgcagacgaaacacaaactgaagtatctgtctcatccaaaaagtctgagcgaggagtgactgccaaaaaggagtatgtgtgccagctgtgtgagaagccgggcagcctcctgctctgtgaaggaccctgctgcggagctttccacctcgcctgccttgggctttcccggaggccagaagggaggttcacctgcagcgagtgtgcctcaggtgtcgcccggcacagtctggggtctgtgaggatgatgagaggacacctgcacagccgtggcccttcctgcctactcaccgggcccaaggagtctcctatctcacgtcagaacacttcctgggtcaggaagacacctggagagtctcccaggccatggcagccccacagcagcacctcacttatgggagtgtctgtctgcctgcccagaatgataagtgactgctccaccactggccagctgctctcaaggaggaaaggcctcttttcataggagccccttctttcaagcttcttgccagttagactgggcctccccagccaggctgcctagtaagattctcctgtatttcaggtgaagctggagctcagatcgcagcaaggtaatccttgatggctggatctttttgctggagaatgcttggactagtgagcaaggttggaaacagggccaggtgctttagcagcgtggctgcctctgaagaggagttgcttgattttagtggctcagaactgcaatttaattcttgttctttgcacctctctctccaccccttctttaactttttgttagggattcactcatgtttcgtgtgtaaagagagcaagacagatgttaagcgctgtgtggtaactcagtgtggaaaattttaccatgaggcttgtgtgaaaaaataccctctgactgtatttgagagccgaggtttccgctgccccctccacagctgtgtgagctgccatgcttccaacccttcaaacccaaggccgtcaaaaggtaaaatgatgcggtgtgtccgctgccccgttgcctatcacagcggggatgcttgtctggcagcaggatgctcagtgatcgcctccaacagcatcatctgcactgcccacttcactgctcggaaggggaagcgacaccacgcccacgtcaacgtgagctggtgcttcgtgtgctccaaaggggggagccttctgtgctgtgagtcctgcccagcggccttccaccctgactgcctgaacatcgagatgcctgacggcagctggttctgcaatgactgcagggctgggaagaagctgcacttccaggatatcatttgggtgaaacttgggaactacagatggtggccggcagaagtttgccatcccaaaaatgttcccccaaatattcagaaaatgaagcacgagattggagaattccctgtgtttttctttgggtctaaagattattactggacgcatcaggcgcgagtgttcccgtacatggagggggaccggggcagccgctaccagggggtcagagggatcggaagagtcttcaaaaacgcactgcaagaagctgaagctcgttttcgtgaaattaagcttcagagggaagcccgagaaacacaggagagcgagcgcaagcccccaccatacaagcacatcaaggtgaataagccttacgggaaagtccagatctacacagcggatatttcagaaatccctaagtgcaactgcaagcccacagatgagaatccttgtggctttgattcggagtgtctgaacaggatgctgatgtttgagtgccacccgcaggtgtgtcccgcgggcgagttctgccagaaccagtgcttcaccaagcgccagtacccagagaccaagatcatcaagacagatggcaaagggtggggcctggtcgccaagagggacatcagaaagggagaatttgttaacgagtacgttggggagctgatcgacgaggaggagtgcatggcgagaatcaagcacgcacacgagaacgacatcacccacttctacatgctcactatagacaaggaccgtataatagacgctggccccaaaggaaactactctcgatttatgaatcacagctgccagcccaactgtgagaccctcaagtggacagtgaatggggacactcgtgtgggcctgtttgccgtctgtgacattcctgcagggacggagctgacttttaactacaacctcgattgtctgggcaatgaaaaaacggtctgccggtgtggagcctccaattgcagtggattcctcggggatagaccaaagacctcgacgaccctttcatcagaggaaaagggcaaaaagaccaagaagaaaacgaggcggcgcagagcaaaaggggaagggaagaggcagtcagaggacgagtgcttccgctgcggtgatggcgggcagctggtgctgtgtgaccgcaagttctgcaccaaggcctaccacctgtcctgcctgggccttggcaagcggcccttcgggaagtgggaatgtccttggcatcattgtgacgtgtgtggcaaaccttcgacttcattttgccacctctgccccaattcgttctgtaaggagcaccaggacgggacagccttcagctgcaccccggacgggcggtcctactgctgtgagcatgacttaggggcggcatcggtcagaagcaccaagactgagaagccccccccagagccagggaagccgaaggggaagaggcggcggcggaggggctggcggagagtcacagagggcaaatagcgccaggcggccgcttggccggatccaggggcggtgcagggcggccggccctgcctgcgggagagggcgagcatgaactggcccggaggacccagctcgagccgccaggacacagacgtacaggcctcctcgggagggagcgcctccccaccactgagccatcctcagcagcgtccgctgcgtctgcactgatgaccgtctgagcccagctcagcgttcctggacaaacagcctcactcctcagcgttaccgccacacttgaatttctccgaatgtcaaggttccctcccactctatttttttaggttaaagttaattggcatatggaatgttttaatctcctctgaaatgtgtagcgtaggcttttcccaagggtcgctagaaactcgtcttcgcgttgccccctttctggctctcagcgccgtcgccactcgggagaggctgggtgaggcccgtgtgaggactgaccctggattcctcgaaactgccattgtgatcattactctgctctttggaaatggctgtatcatttttttgtactaatgtgaattgttcctcagaaacgcttcttttccatcctagtgagaagctggccctgcaggtggtggcagcaatggtgttgtaagatttcctcccgtagttttttctcctcatggatttgaatgaaatgccaataacacgtccactttcaacgtgtagtttacgcggagcactttcgaggcctggccgggttgggcctacttctcacctgggcctatcttctgaactcgctaggttcttatcaacatttgggggataactttgtatatttttttcatttggcttttctttaccagtttctgatttttattctcaatatatttttgctaaacctatttcacaaatca

SEQ ID NO: 440537 - DNA, 9985 bp, Homo sapiens
tttttattgacgaaaagacagatactatatttggatgtgacaggtgttttttcttttgtacaagagtgcagaactgtttacagtacataaacatcagcgtggaaaatgctagtacatatataaaggtgaacatcagtaccagctgtttccacaaagcccactcttggtaagaatcttctttgtggcaaaaaagcttggcatcaatgtaggctgaaatttatatcattagaaatcaatgtcattaaaggagatatgggagttaccttagaaatattaactccttctctagctaggaaaggccagaagtaaaactgttaaaatcatcatcatgtgcttcagcgccttctcggcttcatctggattctcaaactctacgtacgcatagcctttggacagatggggatgcatcctttccacgggcatgaagagaaggcggagggccaaactgtgtagctctgcagagaccctggagagtcaccccgacatagggaagagtactcctcaaaagacggcagaggctgaccccagaagaggagtagggtctcctcctgggaggaagaagaccacagtctccatgccacgaagcaggaagggagatgcagcatcccagtttttggtcttctgtcaaaaacacagggatgaggtggtagctgagcacccagatgcttcaggtgaggagattgaagagctgctcaggtcacagtggagtctgctgagtgagaagcagagagcacgctacaacaccaagtttgccctggtggcccctgtccaggctgaagaagactctggtaatgtaaatgggaaaaaaagaaaccacacaaagaggatacaggaccctacagaagatgctgaagctgaggacacacccaggaaaagactcaggacggacaagcacagtcttcggaagagagacacaatcactgacaaaacggccagaacaagctcttacaaggccatggaggcagcctcctcgctcaagagccaggcagcaacgaaaaatctgtctgatgcatgtaaaccactgaagaagcgaaatcgggcttccacggcagcatcttcagctcttgggtttagcaaaagttcatctccttctgcatccttaactgagaatgagggtaaaataataataataacgataaccatggcattggtatgaaggccatttagctgcccacgctgcagtgtgagtaatgctcagacttcataagcgcagcattggtgctcactgccagtgcagatgttttagggcctcttggctaactcagattcatgaaatggacaaacagtgcactatgttagtttatttgagcactttttatacacacgcacacagtgtctgtgtacatgtacagatatacttcagtcttgatgcagtttcatagttcttaaaatctgtctgaagaatgttgtgttctgtgtagccctcacactgtaagagttcacatggaagtaagtctgcgttggttctgaaagggcacagtgtcagttgagctgacatatactgggtggggtggaaggcgactcacacaccacacctgattcctgttgcttccagacctaggctcatggaggaagccaaagatttctttgttctcatgcatttcatggctttggtcctttaaattctggcacatttttagttacttgagtgttgaggtgagtcagaactaccattgtaatatgactcctgtgttctggacttgcagagtacatgatagcaaaataaagccatttggggctgctgcctgccatcattgtaacatgacacttagactttattatcaaacctaaattttttgccgttgccaaaaacaacaaatagccacagaacgtaggtgtgacacttttttgttcggaggtagttttggtttcctgatttttagggattaccttcatagagctttggagttttaatttcttgttatttggttctccgtgatgctgtttttctcattgtagacatgggtcctgtttttgtcatgtttatgaggagatgataactgggggcccttttggaacagggtagtgaggcaagggttggacaggccccttactcttgctgagtcagaaggcggcacttctggccaggtctctgccatggtccccaggaaggatggggtgtgcctcagttgtttccactcattagaggagtgtaggccttccagtgcaggaaggtcagggacctaggcaacctgggcggggctcatagagctctgcggcttgccactctgaatcctcagcgaccactcctccgagtgggattttctgcagggactcaaaccaactcagtggtggtcgagacctgttcacggatggtgggactggggctgctttacagtttgatacgtgtagataattaagcattttgtgatgtttggacacactggagaaaaggcagtaagaattatttactgaaacatctaggagcttactgaaatatgaaaaggcaaattttatacaaattatttttcctttttcctttctttcttgtccaagttcaggttaaaatcttagaaaattaaatgaaaggtcatttacagttccaaagaagaatattaaacatttttcacttaagttgagatttttgctttaaagagcttttaatgagtttttctgttatcataattttggtccggttattcacttgagttgttgcttatactgttgtcaggtacagtagagagaacatggagcctgctgagatcttctctgttattcctgatcctaagtcatgtatatcgaaggctttgatttagagtaatgcatgaggccagtgtagcggggtcgaggcctgcccatgagtcaggggagctcagtctccctggcctaggcagttgtcctgaccttgagaagacatagatgaagcattttatcatcattagacttaaattttaattcttcagaatgtcagaagttgataggttgttaaatacatttatataatacattaaatatgtgaaattaatacaccttcctacattttgaaggtgatgcatagatcccatagtgtgcatcatgttccttatatgaaaacgtttaaattactgggtcttttccattaaactacttttgtatggcttagataaatcttccattagtgttcatttttatagaattatgctgttaaaactactttaggtgaacaaataaacttgtctattatatattaacgcgactgaactacagtaaatgtttgtgatgtttccaatgctgaatgcctgttagcatatgaggcaaagtgtagtgttataaaaaacagcctgttgactgctgggcccgattctgatatgagttaggtgaccatgagaattgctgtttgaggtccacactgacacacacccattgggtcacaccccctttgcatgtttgtatttcctccctttcatcacatttgtttgaaataaggtacttttatagggttggtatttcagaacactttaggtcatgttgtagtttaaattcttcttgaaaaaggtatatgtgataaataaaaatttttattggaataattattacatggtactacatcaccctgaggaagagaataaattaaaattacacacttgcatgacaaaggcctgtgaaggaattaatgtgatttaagtgttttgtaacttcattttttattcctttagtagagcaaattcttatttttttcgccttcactggtaacagcttttgtgggagcccacaccagtcaagttggatttgaacccagctgctctgtactgcacttagaatgatgtaatattccaggatgctgctgcaggtggcgtatcatcgtacacactcagtgacatttctatcacaatcattttatggaagatgtgtgataatctgtttttactggtattaataaacacatacaatgaagaaaacagataacaaattttaagaccaaggtctcggacagcccgggagacgagccctcggagtccccatacgaaagtgcagacgaaacacaaactgaagtatctgtctcatccaaaaagtctgagcgaggagtgactgccaaaaaggagtatgtgtgccagctgtgtgagaagccgggcagcctcctgctctgtgaaggaccctgctgcggagctttccacctcgcctgccttgggctttcccggaggccagaagggaggttcacctgcagcgagtgtgcctcaggtgtcgcccggcacagtctggggtctgtgaggatgatgagaggacacctgcacagccgtggcccttcctgcctactcaccgggcccaaggagtctcctatctcacgtcagaacacttcctgggtcaggaagacacctggagagtctcccaggccatggcagccccacagcagcacctcacttatgggagtgtctgtctgcctgcccagaatgataagtgactgctccaccactggccagctgctctcaaggaggaaaggcctcttttcataggagccccttctttcaagcttcttgccagttagactgggcctccccagccaggctgcctagtaagattctcctgtatttcaggtgaagctggagctcagatcgcagcaaggtaatccttgatggctggatctttttgctggagaatgcttggactagtgagcaaggttggaaacagggccaggtgctttagcagcgtggctgcctctgaagaggagttgcttgattttagtggctcagaactgcaatttaattcttgttctttgcacctctctctccaccccttctttaactttttgttagggattcactcatgtttcgtgtgtaaagagagcaagacagatgttaagcgctgtgtggtaactcagtgtggaaaattttaccatgaggcttgtgtgaaaaaataccctctgactgtatttgagagccgaggtttccgctgccccctccacagctgtgtgagctgccatgcttccaacccttcaaacccaaggccgtcaaaaggtaaaatgatgcggtgtgtccgctgccccgttgcctatcacagcggggatgcttgtctggcagcaggatgctcagtgatcgcctccaacagcatcatctgcactgcccacttcactgctcggaaggggaagcgacaccacgcccacgtcaacgtgagctggtgcttcgtgtgctccaaaggggggagccttctgtgctgtgagtcctgcccagcggccttccaccctgactgcctgaacatcgagatgcctgacggcagctggttctgcaatgactgcagggctgggaagaagctgcacttccaggatatcatttgggtgaaacttgggaactacagatggtggccggcagaagtttgccatcccaaaaatgttcccccaaatattcagaaaatgaagcacgagattggagaattccctgtgtttttctttgggtctaaagattattactggacgcatcaggcgcgagtgttcccgtacatggagggggaccggggcagccgctaccagggggtcagagggatcggaagagtcttcaaaaacgcactgcaagaagctgaagctcgttttcgtgaaattaagcttcagagggaagcccgagaaacacaggagagcgagcgcaagcccccaccatacaagcacatcaaggtgaataagccttacgggaaagtccagatctacacagcggatatttcagaaatccctaagtgcaactgcaagcccacagatgagaatccttgtggctttgattcggagtgtctgaacaggatgctgatgtttgagtgccacccgcaggtgtgtcccgcgggcgagttctgccagaaccagtgcttcaccaagcgccagtacccagagaccaagatcatcaagacagatggcaaagggtggggcctggtcgccaagagggacatcagaaagggagaatttgttaacgagtacgttggggagctgatcgacgaggaggagtgcatggcgagaatcaagcacgcacacgagaacgacatcacccacttctacatgctcactatagacaaggaccgtataatagacgctggccccaaaggaaactactctcgatttatgaatcacagctgccagcccaactgtgagaccctcaagtggacagtgaatggggacactcgtgtgggcctgtttgccgtctgtgacattcctgcagggacggagctgacttttaactacaacctcgattgtctgggcaatgaaaaaacggtctgccggtgtggagcctccaattgcagtggattcctcggggatagaccaaagacctcgacgaccctttcatcagaggaaaagggcaaaaagaccaagaagaaaacgaggcggcgcagagcaaaaggggaagggaagaggcagtcagaggacgagtgcttccgctgcggtgatggcgggcagctggtgctgtgtgaccgcaagttctgcaccaaggcctaccacctgtcctgcctgggccttggcaagcggcccttcgggaagtgggaatgtccttggcatcattgtgacgtgtgtggcaaaccttcgacttcattttgccacctctgccccaattcgttctgtaaggagcaccaggacgggacagccttcagctgcaccccggacgggcggtcctactgctgtgagcatgacttaggggcggcatcggtcagaagcaccaagactgagaagccccccccagagccagggaagccgaaggggaagaggcggcggcggaggggctggcggagagtcacagagggcaaatagcgccaggcggccgcttggccggatccaggggcggtgcagggcggccggccctgcctgcgggagagggcgagcatgaactggcccggaggacccagctcgagccgccaggacacagacgtacaggcctcctcgggagggagcgcctccccaccactgagccatcctcagcagcgtccgctgcgtctgcactgatgaccgtctgagcccagctcagcgttcctggacaaacagcctcactcctcagcgttaccgccacacttgaatttctccgaatgtcaaggttccctcccactctatttttttaggttaaagttaattggcatatggaatgttttaatctcctctgaaatgtgtagcgtaggcttttcccaagggtcgctagaaactcgtcttcgcgttgccccctttctggctctcagcgccgtcgccactcgggagaggctgggtgaggcccgtgtgaggactgaccctggattcctcgaaactgccattgtgatcattactctgctctttggaaatggctgtatcatttttttgtactaatgtgaattgttcctcagaaacgcttcttttccatcctagtgagaagctggccctgcaggtggtggcagcaatggtgttgtaagatttcctcccgtagttttttctcctcatggatttgaatgaaatgccaataacacgtccactttcaacgtgtagtttacgcggagcactttcgaggcctggccgggttgggcctacttctcacctgggcctatcttctgaactcgctaggttcttatcaacatttgggggataactttgtatatttttttcatttggcttttctttaccagtttctgatttttattctcaatatatttttgctaaacctatttcacaaatcaccaccgactgaagtgtgtgtttactgatgcggccctgagctccatggcgaaaggagtgactttgcagggcgtgagaccgcagtctgcttagagcacaggaagtgacaacttagggagccccgtagggcgctgcaggccccggggaccccagcacgtgggtctaaagagagacggagtctagctctcctgccacccagagtggcttccatctcagcactctgtgggtctggtgatggaagatgcagtctctgctgatcacatgtgccctctgccagggcacctactgagaggtgcggtcctgggggtggaggcctgcctggcaggtgtgcgtgcctcgtacgtgtgttatgggcactggtctaggccaggtatgacacccactctcctgtgagatttcactttagtttttaaaaggtccagttctacagagtgagacctatctatctgagtactacatatgttttaagacttggttctttttttgagggatccttgaccctgggaagtctggagcaccctgagaagggggcaccatgtgtgcctttgcccacgtgtcctgaggggctgcttgtctgggagggagggagagaacattcagcagcaggtgcttttttatggccttttcttaaaataacctaagggggacacatccatcttgcagagaagtttacagaactccccttgaaaactgctgctgaggctcctgttaaattttctgtggcatcttttatgccttggtaaaaactgcagtgtctttggacctgagagtggctactccgtggttttgtgacctgtaagcgtggggttcaggggtgtgtggccctgcagggtcccacgcctccctgagcactgactggaagtttcactggctggtggctgtcccttctcccatcagggtccccagcaaagttaactacacagaggacccaggggaaacgagctgtgtagccactgacttgctcgcgcggccgtggcctctgaggggcactcgccggttaagacagggtgggagtagtgctttccagttcagactctaacttctcccaaagtgtcctaagaaaatactggatcggctcatagatttatgctccttatgatgccctaacttggaaggttgttctagggacaggccgggcagtgtccccacacacaccttagagtcgaaggccccagggccccgctgtcacttgcccaaaagatcccttccggcaggtaagggactaccaatgcttacgtcaaaacagcagaatcggctttgcagtgcactttggggagcagatattaacttatttttgtgttggacagtagtgaaatcttgtgatttttaatcgctttgataatacttccaaattttatgatttttctgaaggaaataatgcaaacattttaaatatgtttctccccctttccaaaaactgttaaactaatgagcaagtaacactaactttgaatgtctctacaatacccgttgataactcagtggagccaggctttggggtagcggccctgagcttgcagggtttctcgccactggggctgaccacgcccccagctgtgaccgtgggtgtggctggctctcggccctgcccagctttgttctgaggacgtggtgacttcctgaacatcagcttcaatcctccatcattaatgtgaagcaaaacacaaaaaccgccccaatccctcaggattccttggcatccgaaaccagcatctgcacctaaacccatacccacccgtgtgcgcccacagggggatgtgtccgaatgggcagcttaaaatgtggtcacctgtgggggaaactcttcaggcacctgaagtgagaacccagctgtccgtcctcaggccggcctttcttccggcgacacccgtccatggctggctgggtccccttcgcagtgtttgtctgtcttgacatctaaaccccggcgtgtgcagtgcccatcttccaggactaccttattttccagaattaaacctgttttataattcaagttaatgcaaatgactgtcagttgccaaatatcttgatcctatgagtgtagttgatgactgtttgttagtcagtagagtaaaatgctgtgtccacggggtgtcacagcctcaccataccctgttgaggtgtgaaatgccccgtcagaaattaaatacaaacttaaatgtgcctattggtgtctaaacttcatacaatgtaaggtcagattccttttaggaatactgggtgctgtcaccaggtttgatagttagacttaaaaacttgaaattcactttttggggggagggatatactgaaatagagagttgagacttgccagttgggggaaaatagcatttaaaatggaaagctgtgtttggaaaattgtgtatgagtatttttgtattaaaaacattttaaaggcttttttcttaa

SEQ ID NO: 440538 - DNA, 11324 bp, Homo sapiens
  misc_feature (12)..(12): n is a, c, g, or t
  misc_feature (86)..(86): n is a, c, g, or t
  misc_feature (10974)..(10974): n is a, c, g, or t
  misc_feature (10978)..(10978): n is a, c, g, or t
  misc_feature (10987)..(10987): n is a, c, g, or t
  misc_feature (10997)..(10997): n is a, c, g, or t
  misc_feature (11003)..(11003): n is a, c, g, or t
  misc_feature (11005)..(11005): n is a, c, g, or t
gggaggcgcggnggcggggtcggcgccgcgcgcgagagcctcggcctggccgcgctgcgcccgccgccgccgccgccccctccccncctgggccctaccgccgcacggccccggccccctcccagcctgccgctccggagagccgcccgccgaggatgcgacgcaccgcagtgttctaagaacggaagcatctgggctggatggaatttagcatcaagcagagtcccctttctgttcagagtgttgtaaagtgcataaagatgaagcaggcaccagaaatcctcggcagtgccaacgggaagactccgagctgcgaggtgaaccgcgagtgttctgtgttcctcagcaaagcccagctctccagtagcctgcaggagggggtcatgcagaagtttaacggccacgacgccctgccctttattccagccgacaagctgaaagatcttacttcccgggtgtttaatggagaacccggcgcacacgatgccaaactgcgttttgagtcccaggaaatgaaagggattgggacaccccctaacactacccctatcaaaaatggctctccagaaattaagctgaaaatcaccaaaacatacatgaatgggaagcctctctttgaatcttccatttgtggtgacagtgctgctgatgtgtctcagtcagaagaaaatggacaaaaaccagaaaacaaggcgagaaggaacaggaagaggagcataaaatatgactccttgctggagcagggccttgtcgaagcagctcttgtgtctaagatctcaagtccttcagataaaaagattccagctaagaaagagtcttgtccaaacactggaagagacaaagaccacctgttgaaatacaacgttggtgatttggtgtggtccaaagtgtcgggttacccttggtggccttgcatggtttctgcagatccactccttcacagctataccaaacttaaaggtcagaaaaagagtgcacgccagtatcacgtacagttctttggtgacgccccagaaagagcttggatatttgagaagagcctcgtagcttttgaaggagaaggacagtttgaaaaattatgccaggaaagtgccaagcaggcacccacgaaagctgagaaaattaagctattgaaaccaatttcagggaaattgagggcccagtgggaaatgggcattgttcaagcagaagaagctgcaagcatgtcagtggaggagcggaaagccaagttcacctttctctatgtgggggaccagcttcatctcaaccctcaagtagccaaggaggctggcattgctgcagagtctttgggagaaatggcagaatcctcaggagtcagtgaagaagctgctgaaaaccccaagtctgtgagagaagagtgcattcccatgaagagaaggcggagggccaaactgtgtagctctgcagagaccctggagagtcaccccgacatagggaagagtactcctcaaaagacggcagaggctgaccccagaagaggagtagggtctcctcctgggaggaagaagaccacagtctccatgccacgaagcaggaagggagatgcagcatcccagtttttggtcttctgtcaaaaacacagggatgaggtggtagctgagcacccagatgcttcaggtgaggagattgaagagctgctcaggtcacagtggagtctgctgagtgagaagcagagagcacgctacaacaccaagtttgccctggtggcccctgtccaggctgaagaagactctggtaatgtaaatgggaaaaaaagaaaccacacaaagaggatacaggaccctacagaagatgctgaagctgaggacacacccaggaaaagactcaggacggacaagcacagtcttcggaagagagacacaatcactgacaaaacggccagaacaagctcttacaaggccatggaggcagcctcctcgctcaagagccaggcagcaacgaaaaatctgtctgatgcatgtaaaccactgaagaagcgaaatcgggcttccacggcagcatcttcagctcttgggtttagcaaaagttcatctccttctgcatccttaactgagaatgagggtaaaataataataataacgataaccatggcattggtatgaaggccatttagctgcccacgctgcagtgtgagtaatgctcagacttcataagcgcagcattggtgctcactgccagtgcagatgttttagggcctcttggctaactcagattcatgaaatggacaaacagtgcactatgttagtttatttgagcactttttatacacacgcacacagtgtctgtgtacatgtacagatatacttcagtcttgatgcagtttcatagttcttaaaatctgtctgaagaatgttgtgttctgtgtagccctcacactgtaagagttcacatggaagtaagtctgcgttggttctgaaagggcacagtgtcagttgagctgacatatactgggtggggtggaaggcgactcacacaccacacctgattcctgttgcttccagacctaggctcatggaggaagccaaagatttctttgttctcatgcatttcatggctttggtcctttaaattctggcacatttttagttacttgagtgttgaggtgagtcagaactaccattgtaatatgactcctgtgttctggacttgcagagtacatgatagcaaaataaagccatttggggctgctgcctgccatcattgtaacatgacacttagactttattatcaaacctaaattttttgccgttgccaaaaacaacaaatagccacagaacgtaggtgtgacacttttttgttcggaggtagttttggtttcctgatttttagggattaccttcatagagctttggagttttaatttcttgttatttggttctccgtgatgctgtttttctcattgtagacatgggtcctgtttttgtcatgtttatgaggagatgataactgggggcccttttggaacagggtagtgaggcaagggttggacaggccccttactcttgctgagtcagaaggcggcacttctggccaggtctctgccatggtccccaggaaggatggggtgtgcctcagttgtttccactcattagaggagtgtaggccttccagtgcaggaaggtcagggacctaggcaacctgggcggggctcatagagctctgcggcttgccactctgaatcctcagcgaccactcctccgagtgggattttctgcagggactcaaaccaactcagtggtggtcgagacctgttcacggatggtgggactggggctgctttacagtttgatacgtgtagataattaagcattttgtgatgtttggacacactggagaaaaggcagtaagaattatttactgaaacatctaggagcttactgaaatatgaaaaggcaaattttatacaaattatttttcctttttcctttctttcttgtccaagttcaggttaaaatcttagaaaattaaatgaaaggtcatttacagttccaaagaagaatattaaacatttttcacttaagttgagatttttgctttaaagagcttttaatgagtttttctgttatcataattttggtccggttattcacttgagttgttgcttatactgttgtcaggtacagtagagagaacatggagcctgctgagatcttctctgttattcctgatcctaagtcatgtatatcgaaggctttgatttagagtaatgcatgaggccagtgtagcggggtcgaggcctgcccatgagtcaggggagctcagtctccctggcctaggcagttgtcctgaccttgagaagacatagatgaagcattttatcatcattagacttaaattttaattcttcagaatgtcagaagttgataggttgttaaatacatttatataatacattaaatatgtgaaattaatacaccttcctacattttgaaggtgatgcatagatcccatagtgtgcatcatgttccttatatgaaaacgtttaaattactgggtcttttccattaaactacttttgtatggcttagataaatcttccattagtgttcatttttatagaattatgctgttaaaactactttaggtgaacaaataaacttgtctattatatattaacgcgactgaactacagtaaatgtttgtgatgtttccaatgctgaatgcctgttagcatatgaggcaaagtgtagtgttataaaaaacagcctgttgactgctgggcccgattctgatatgagttaggtgaccatgagaattgctgtttgaggtccacactgacacacacccattgggtcacaccccctttgcatgtttgtatttcctccctttcatcacatttgtttgaaataaggtacttttatagggttggtatttcagaacactttaggtcatgttgtagtttaaattcttcttgaaaaaggtatatgtgataaataaaaatttttattggaataattattacatggtactacatcaccctgaggaagagaataaattaaaattacacacttgcatgacaaaggcctgtgaaggaattaatgtgatttaagtgttttgtaacttcattttttattcctttagtagagcaaattcttatttttttcgccttcactggtaacagcttttgtgggagcccacaccagtcaagttggatttgaacccagctgctctgtactgcacttagaatgatgtaatattccaggatgctgctgcaggtggcgtatcatcgtacacactcagtgacatttctatcacaatcattttatggaagatgtgtgataatctgtttttactggtattaataaacacatacaatgaagaaaacagataacaaattttaagaccaaggtctcggacagcccgggagacgagccctcggagtccccatacgaaagtgcagacgaaacacaaactgaagtatctgtctcatccaaaaagtctgagcgaggagtgactgccaaaaaggagtatgtgtgccagctgtgtgagaagccgggcagcctcctgctctgtgaaggaccctgctgcggagctttccacctcgcctgccttgggctttcccggaggccagaagggaggttcacctgcagcgagtgtgcctcaggtgtcgcccggcacagtctggggtctgtgaggatgatgagaggacacctgcacagccgtggcccttcctgcctactcaccgggcccaaggagtctcctatctcacgtcagaacacttcctgggtcaggaagacacctggagagtctcccaggccatggcagccccacagcagcacctcacttatgggagtgtctgtctgcctgcccagaatgataagtgactgctccaccactggccagctgctctcaaggaggaaaggcctcttttcataggagccccttctttcaagcttcttgccagttagactgggcctccccagccaggctgcctagtaagattctcctgtatttcaggtgaagctggagctcagatcgcagcaaggtaatccttgatggctggatctttttgctggagaatgcttggactagtgagcaaggttggaaacagggccaggtgctttagcagcgtggctgcctctgaagaggagttgcttgattttagtggctcagaactgcaatttaattcttgttctttgcacctctctctccaccccttctttaactttttgttagggattcactcatgtttcgtgtgtaaagagagcaagacagatgttaagcgctgtgtggtaactcagtgtggaaaattttaccatgaggcttgtgtgaaaaaataccctctgactgtatttgagagccgaggtttccgctgccccctccacagctgtgtgagctgccatgcttccaacccttcaaacccaaggccgtcaaaaggtaaaatgatgcggtgtgtccgctgccccgttgcctatcacagcggggatgcttgtctggcagcaggatgctcagtgatcgcctccaacagcatcatctgcactgcccacttcactgctcggaaggggaagcgacaccacgcccacgtcaacgtgagctggtgcttcgtgtgctccaaaggggggagccttctgtgctgtgagtcctgcccagcggccttccaccctgactgcctgaacatcgagatgcctgacggcagctggttctgcaatgactgcagggctgggaagaagctgcacttccaggatatcatttgggtgaaacttgggaactacagatggtggccggcagaagtttgccatcccaaaaatgttcccccaaatattcagaaaatgaagcacgagattggagaattccctgtgtttttctttgggtctaaagattattactggacgcatcaggcgcgagtgttcccgtacatggagggggaccggggcagccgctaccagggggtcagagggatcggaagagtcttcaaaaacgcactgcaagaagctgaagctcgttttcgtgaaattaagcttcagagggaagcccgagaaacacaggagagcgagcgcaagcccccaccatacaagcacatcaaggtgaataagccttacgggaaagtccagatctacacagcggatatttcagaaatccctaagtgcaactgcaagcccacagatgagaatccttgtggctttgattcggagtgtctgaacaggatgctgatgtttgagtgccacccgcaggtgtgtcccgcgggcgagttctgccagaaccagtgcttcaccaagcgccagtacccagagaccaagatcatcaagacagatggcaaagggtggggcctggtcgccaagagggacatcagaaagggagaatttgttaacgagtacgttggggagctgatcgacgaggaggagtgcatggcgagaatcaagcacgcacacgagaacgacatcacccacttctacatgctcactatagacaaggaccgtataatagacgctggccccaaaggaaactactctcgatttatgaatcacagctgccagcccaactgtgagaccctcaagtggacagtgaatggggacactcgtgtgggcctgtttgccgtctgtgacattcctgcagggacggagctgacttttaactacaacctcgattgtctgggcaatgaaaaaacggtctgccggtgtggagcctccaattgcagtggattcctcggggatagaccaaagacctcgacgaccctttcatcagaggaaaagggcaaaaagaccaagaagaaaacgaggcggcgcagagcaaaaggggaagggaagaggcagtcagaggacgagtgcttccgctgcggtgatggcgggcagctggtgctgtgtgaccgcaagttctgcaccaaggcctaccacctgtcctgcctgggccttggcaagcggcccttcgggaagtgggaatgtccttggcatcattgtgacgtgtgtggcaaaccttcgacttcattttgccacctctgccccaattcgttctgtaaggagcaccaggacgggacagccttcagctgcaccccggacgggcggtcctactgctgtgagcatgacttaggggcggcatcggtcagaagcaccaagactgagaagccccccccagagccagggaagccgaaggggaagaggcggcggcggaggggctggcggagagtcacagagggcaaatagcgccaggcggccgcttggccggatccaggggcggtgcagggcggccggccctgcctgcgggagagggcgagcatgaactggcccggaggacccagctcgagccgccaggacacagacgtacaggcctcctcgggagggagcgcctccccaccactgagccatcctcagcagcgtccgctgcgtctgcactgatgaccgtctgagcccagctcagcgttcctggacaaacagcctcactcctcagcgttaccgccacacttgaatttctccgaatgtcaaggttccctcccactctatttttttaggttaaagttaattggcatatggaatgttttaatctcctctgaaatgtgtagcgtaggcttttcccaagggtcgctagaaactcgtcttcgcgttgccccctttctggctctcagcgccgtcgccactcgggagaggctgggtgaggcccgtgtgaggactgaccctggattcctcgaaactgccattgtgatcattactctgctctttggaaatggctgtatcatttttttgtactaatgtgaattgttcctcagaaacgcttcttttccatcctagtgagaagctggccctgcaggtggtggcagcaatggtgttgtaagatttcctcccgtagttttttctcctcatggatttgaatgaaatgccaataacacgtccactttcaacgtgtagtttacgcggagcactttcgaggcctggccgggttgggcctacttctcacctgggcctatcttctgaactcgctaggttcttatcaacatttgggggataactttgtatatttttttcatttggcttttctttaccagtttctgatttttattctcaatatatttttgctaaacctatttcacaaatcaccaccgactgaagtgtgtgtttactgatgcggccctgagctccatggcgaaaggagtgactttgcagggcgtgagaccgcagtctgcttagagcacaggaagtgacaacttagggagccccgtagggcgctgcaggccccggggaccccagcacgtgggtctaaagagagacggagtctagctctcctgccacccagagtggcttccatctcagcactctgtgggtctggtgatggaagatgcagtctctgctgatcacatgtgccctctgccagggcacctactgagaggtgcggtcctgggggtggaggcctgcctggcaggtgtgcgtgcctcgtacgtgtgttatgggcactggtctaggccaggtatgacacccactctcctgtgagatttcactttagtttttaaaaggtccagttctacagagtgagacctatctatctgagtactacatatgttttaagacttggttctttttttgagggatccttgaccctgggaagtctggagcaccctgagaagggggcaccatgtgtgcctttgcccacgtgtcctgaggggctgcttgtctgggagggagggagagaacattcagcagcaggtgcttttttatggccttttcttaaaataacctaagggggacacatccatcttgcagagaagtttacagaactccccttgaaaactgctgctgaggctcctgttaaattttctgtggcatcttttatgccttggtaaaaactgcagtgtctttggacctgagagtggctactccgtggttttgtgacctgtaagcgtggggttcaggggtgtgtggccctgcagggtcccacgcctccctgagcactgactggaagtttcactggctggtggctgtcccttctcccatcagggtccccagcaaagttaactacacagaggacccaggggaaacgagctgtgtagccactgacttgctcgcgcggccgtggcctctgaggggcactcgccggttaagacagggtgggagtagtgctttccagttcagactctaacttctcccaaagtgtcctaagaaaatactggatcggctcatagatttatgctccttatgatgccctaacttggaaggttgttctagggacaggccgggcagtgtccccacacacaccttagagtcgaaggccccagggccccgctgtcacttgcccaaaagatcccttccggcaggtaagggactaccaatgcttacgtcaaaacagcagaatcggctttgcagtgcactttggggagcagatattaacttatttttgtgttggacagtagtgaaatcttgtgatttttaatcgctttgataatacttccaaattttatgatttttctgaaggaaataatgcaaacattttaaatatgtttctccccctttccaaaaactgttaaactaatgagcaagtaacactaactttgaatgtctctacaatacccgttgataactcagtggagccaggctttggggtagcggccctgagcttgcagggtttctcgccactggggctgaccacgcccccagctgtgaccgtgggtgtggctggctctcggccctgcccagctttgttctgaggacgtggtgacttcctgaacatcagcttcaatcctccatcattaatgtgaagcaaaacacaaaaaccgccccaatccctcaggattccttggcatccgaaaccagcatctgcacctaaacccatacccacccgtgtgcgcccacagggggatgtgtccgaatgggcagcttaaaatgtggtcacctgtgggggaaactcttcaggcacctgaagtgagaacccagctgtccgtcctcaggccggcctttcttccggcgacacccgtccatggctggctgggtccccttcgcagtgtttgtctgtcttgacatctaaaccccggcgtgtgcagtgcccatcttccaggactaccttattttccagaattaaacctgttttataattcaagttaatgcaaatgactgtcagttgccaaatatcttgatcctatgagtgtagttgatgactgtttgttagtcagtagagtaaaatgctgtgtccacggggtgtcacagcctcaccataccctgttgaggtgtgaaatgccccgtcagaaattaaatacaaacttaaatgtgcctattggtgtctaaacttcatacaatgtaaggtcagattccttttaggaatactgggtgctgtcaccaggtttgatagttagacttaaaaacttgaaattcactttttggggggagggatatactgaaatagagagttgagacttgccagttgggggaaaatagcatttaaaatggaaagctgtgtttggaaaattgtgtatgagtatttttgtattaaaaacattttaaaggcttttttcttaaaaaaaaaaaaaaacaaaaaatnaaanaaaaaaaanaaaaaaaaanaaaaananaaaaaaaaaaaaaaaacttggggcccctttggcccaatcacttttaaacttggccaattttttttgacgcgccccaatttgggtctcattgggaaattgccccttatgggggccttcttaacattacctggcgcggtttttaaaagctataaatggggaaaccccggggggtccccaaattaaaagctttgcacaaaatccccctttccccggtgggcaaatcccaaaggccccgtcccgagcggtctttccaaaaggttgccccctctaataggcaaagggatattttacggcgttaaattttggtaaacataccgtt

SEQ ID NO: 440539 - DNA, 10952 bp, Homo sapiens
  misc_feature (12)..(12): n is a, c, g, or t
  misc_feature (86)..(86): n is a, c, g, or t
gggaggcgcggnggcggggtcggcgccgcgcgcgagagcctcggcctggccgcgctgcgcccgccgccgccgccgccccctccccncctgggccctaccgccgcacggccccggccccctcccagcctgccgctccggagagccgcccgccgaggatgcgacgcaccgcagtgttctaagaacggaagcatctgggctggatggaatttagcatcaagcagagtcccctttctgttcagagtgttgtaaagtgcataaagatgaagcaggcaccagaaatcctcggcagtgccaacgggaagactccgagctgcgaggtgaaccgcgagtgttctgtgttcctcagcaaagcccagctctccagtagcctgcaggagggggtcatgcagaagtttaacggccacgacgccctgccctttattccagccgacaagctgaaagatcttacttcccgggtgtttaatggagaacccggcgcacacgatgccaaactgcgttttgagtcccaggaaatgaaagggattgggacaccccctaacactacccctatcaaaaatggctctccagaaattaagctgaaaatcaccaaaacatacatgaatgggaagcctctctttgaatcttccatttgtggtgacagtgctgctgatgtgtctcagtcagaagaaaatggacaaaaaccagaaaacaaggcgagaaggaacaggaagaggagcataaaatatgactccttgctggagcagggccttgtcgaagcagctcttgtgtctaagatctcaagtccttcagataaaaagattccagctaagaaagagtcttgtccaaacactggaagagacaaagaccacctgttgaaatacaacgttggtgatttggtgtggtccaaagtgtcgggttacccttggtggccttgcatggtttctgcagatccactccttcacagctataccaaacttaaaggtcagaaaaagagtgcacgccagtatcacgtacagttctttggtgacgccccagaaagagcttggatatttgagaagagcctcgtagcttttgaaggagaaggacagtttgaaaaattatgccaggaaagtgccaagcaggcacccacgaaagctgagaaaattaagctattgaaaccaatttcagggaaattgagggcccagtgggaaatgggcattgttcaagcagaagaagctgcaagcatgtcagtggaggagcggaaagccaagttcacctttctctatgtgggggaccagcttcatctcaaccctcaagtagccaaggaggctggcattgctgcagagtctttgggagaaatggcagaatcctcaggagtcagtgaagaagctgctgaaaaccccaagtctgtgagagaagagtgcattcccatgaagagaaggcggagggccaaactgtgtagctctgcagagaccctggagagtcaccccgacatagggaagagtactcctcaaaagacggcagaggctgaccccagaagaggagtagggtctcctcctgggaggaagaagaccacagtctccatgccacgaagcaggaagggagatgcagcatcccagtttttggtcttctgtcaaaaacacagggatgaggtggtagctgagcacccagatgcttcaggtgaggagattgaagagctgctcaggtcacagtggagtctgctgagtgagaagcagagagcacgctacaacaccaagtttgccctggtggcccctgtccaggctgaagaagactctggtaatgtaaatgggaaaaaaagaaaccacacaaagaggatacaggaccctacagaagatgctgaagctgaggacacacccaggaaaagactcaggacggacaagcacagtcttcggaagagagacacaatcactgacaaaacggccagaacaagctcttacaaggccatggaggcagcctcctcgctcaagagccaggcagcaacgaaaaatctgtctgatgcatgtaaaccactgaagaagcgaaatcgggcttccacggcagcatcttcagctcttgggtttagcaaaagttcatctccttctgcatccttaactgagaatgagggtaaaataataataataacgataaccatggcattggtatgaaggccatttagctgcccacgctgcagtgtgagtaatgctcagacttcataagcgcagcattggtgctcactgccagtgcagatgttttagggcctcttggctaactcagattcatgaaatggacaaacagtgcactatgttagtttatttgagcactttttatacacacgcacacagtgtctgtgtacatgtacagatatacttcagtcttgatgcagtttcatagttcttaaaatctgtctgaagaatgttgtgttctgtgtagccctcacactgtaagagttcacatggaagtaagtctgcgttggttctgaaagggcacagtgtcagttgagctgacatatactgggtggggtggaaggcgactcacacaccacacctgattcctgttgcttccagacctaggctcatggaggaagccaaagatttctttgttctcatgcatttcatggctttggtcctttaaattctggcacatttttagttacttgagtgttgaggtgagtcagaactaccattgtaatatgactcctgtgttctggacttgcagagtacatgatagcaaaataaagccatttggggctgctgcctgccatcattgtaacatgacacttagactttattatcaaacctaaattttttgccgttgccaaaaacaacaaatagccacagaacgtaggtgtgacacttttttgttcggaggtagttttggtttcctgatttttagggattaccttcatagagctttggagttttaatttcttgttatttggttctccgtgatgctgtttttctcattgtagacatgggtcctgtttttgtcatgtttatgaggagatgataactgggggcccttttggaacagggtagtgaggcaagggttggacaggccccttactcttgctgagtcagaaggcggcacttctggccaggtctctgccatggtccccaggaaggatggggtgtgcctcagttgtttccactcattagaggagtgtaggccttccagtgcaggaaggtcagggacctaggcaacctgggcggggctcatagagctctgcggcttgccactctgaatcctcagcgaccactcctccgagtgggattttctgcagggactcaaaccaactcagtggtggtcgagacctgttcacggatggtgggactggggctgctttacagtttgatacgtgtagataattaagcattttgtgatgtttggacacactggagaaaaggcagtaagaattatttactgaaacatctaggagcttactgaaatatgaaaaggcaaattttatacaaattatttttcctttttcctttctttcttgtccaagttcaggttaaaatcttagaaaattaaatgaaaggtcatttacagttccaaagaagaatattaaacatttttcacttaagttgagatttttgctttaaagagcttttaatgagtttttctgttatcataattttggtccggttattcacttgagttgttgcttatactgttgtcaggtacagtagagagaacatggagcctgctgagatcttctctgttattcctgatcctaagtcatgtatatcgaaggctttgatttagagtaatgcatgaggccagtgtagcggggtcgaggcctgcccatgagtcaggggagctcagtctccctggcctaggcagttgtcctgaccttgagaagacatagatgaagcattttatcatcattagacttaaattttaattcttcagaatgtcagaagttgataggttgttaaatacatttatataatacattaaatatgtgaaattaatacaccttcctacattttgaaggtgatgcatagatcccatagtgtgcatcatgttccttatatgaaaacgtttaaattactgggtcttttccattaaactacttttgtatggcttagataaatcttccattagtgttcatttttatagaattatgctgttaaaactactttaggtgaacaaataaacttgtctattatatattaacgcgactgaactacagtaaatgtttgtgatgtttccaatgctgaatgcctgttagcatatgaggcaaagtgtagtgttataaaaaacagcctgttgactgctgggcccgattctgatatgagttaggtgaccatgagaattgctgtttgaggtccacactgacacacacccattgggtcacaccccctttgcatgtttgtatttcctccctttcatcacatttgtttgaaataaggtacttttatagggttggtatttcagaacactttaggtcatgttgtagtttaaattcttcttgaaaaaggtatatgtgataaataaaaatttttattggaataattattacatggtactacatcaccctgaggaagagaataaattaaaattacacacttgcatgacaaaggcctgtgaaggaattaatgtgatttaagtgttttgtaacttcattttttattcctttagtagagcaaattcttatttttttcgccttcactggtaacagcttttgtgggagcccacaccagtcaagttggatttgaacccagctgctctgtactgcacttagaatgatgtaatattccaggatgctgctgcaggtggcgtatcatcgtacacactcagtgacatttctatcacaatcattttatggaagatgtgtgataatctgtttttactggtattaataaacacatacaatgaagaaaacagataacaaattttaagaccaaggtctcggacagcccgggagacgagccctcggagtccccatacgaaagtgcagacgaaacacaaactgaagtatctgtctcatccaaaaagtctgagcgaggagtgactgccaaaaaggagtatgtgtgccagctgtgtgagaagccgggcagcctcctgctctgtgaaggaccctgctgcggagctttccacctcgcctgccttgggctttcccggaggccagaagggaggttcacctgcagcgagtgtgcctcaggtgtcgcccggcacagtctggggtctgtgaggatgatgagaggacacctgcacagccgtggcccttcctgcctactcaccgggcccaaggagtctcctatctcacgtcagaacacttcctgggtcaggaagacacctggagagtctcccaggccatggcagccccacagcagcacctcacttatgggagtgtctgtctgcctgcccagaatgataagtgactgctccaccactggccagctgctctcaaggaggaaaggcctcttttcataggagccccttctttcaagcttcttgccagttagactgggcctccccagccaggctgcctagtaagattctcctgtatttcaggtgaagctggagctcagatcgcagcaaggtaatccttgatggctggatctttttgctggagaatgcttggactagtgagcaaggttggaaacagggccaggtgctttagcagcgtggctgcctctgaagaggagttgcttgattttagtggctcagaactgcaatttaattcttgttctttgcacctctctctccaccccttctttaactttttgttagggattcactcatgtttcgtgtgtaaagagagcaagacagatgttaagcgctgtgtggtaactcagtgtggaaaattttaccatgaggcttgtgtgaaaaaataccctctgactgtatttgagagccgaggtttccgctgccccctccacagctgtgtgagctgccatgcttccaacccttcaaacccaaggccgtcaaaaggtaaaatgatgcggtgtgtccgctgccccgttgcctatcacagcggggatgcttgtctggcagcaggatgctcagtgatcgcctccaacagcatcatctgcactgcccacttcactgctcggaaggggaagcgacaccacgcccacgtcaacgtgagctggtgcttcgtgtgctccaaaggggggagccttctgtgctgtgagtcctgcccagcggccttccaccctgactgcctgaacatcgagatgcctgacggcagctggttctgcaatgactgcagggctgggaagaagctgcacttccaggatatcatttgggtgaaacttgggaactacagatggtggccggcagaagtttgccatcccaaaaatgttcccccaaatattcagaaaatgaagcacgagattggagaattccctgtgtttttctttgggtctaaagattattactggacgcatcaggcgcgagtgttcccgtacatggagggggaccggggcagccgctaccagggggtcagagggatcggaagagtcttcaaaaacgcactgcaagaagctgaagctcgttttcgtgaaattaagcttcagagggaagcccgagaaacacaggagagcgagcgcaagcccccaccatacaagcacatcaaggtgaataagccttacgggaaagtccagatctacacagcggatatttcagaaatccctaagtgcaactgcaagcccacagatgagaatccttgtggctttgattcggagtgtctgaacaggatgctgatgtttgagtgccacccgcaggtgtgtcccgcgggcgagttctgccagaaccagtgcttcaccaagcgccagtacccagagaccaagatcatcaagacagatggcaaagggtggggcctggtcgccaagagggacatcagaaagggagaatttgttaacgagtacgttggggagctgatcgacgaggaggagtgcatggcgagaatcaagcacgcacacgagaacgacatcacccacttctacatgctcactatagacaaggaccgtataatagacgctggccccaaaggaaactactctcgatttatgaatcacagctgccagcccaactgtgagaccctcaagtggacagtgaatggggacactcgtgtgggcctgtttgccgtctgtgacattcctgcagggacggagctgacttttaactacaacctcgattgtctgggcaatgaaaaaacggtctgccggtgtggagcctccaattgcagtggattcctcggggatagaccaaagacctcgacgaccctttcatcagaggaaaagggcaaaaagaccaagaagaaaacgaggcggcgcagagcaaaaggggaagggaagaggcagtcagaggacgagtgcttccgctgcggtgatggcgggcagctggtgctgtgtgaccgcaagttctgcaccaaggcctaccacctgtcctgcctgggccttggcaagcggcccttcgggaagtgggaatgtccttggcatcattgtgacgtgtgtggcaaaccttcgacttcattttgccacctctgccccaattcgttctgtaaggagcaccaggacgggacagccttcagctgcaccccggacgggcggtcctactgctgtgagcatgacttaggggcggcatcggtcagaagcaccaagactgagaagccccccccagagccagggaagccgaaggggaagaggcggcggcggaggggctggcggagagtcacagagggcaaatagcgccaggcggccgcttggccggatccaggggcggtgcagggcggccggccctgcctgcgggagagggcgagcatgaactggcccggaggacccagctcgagccgccaggacacagacgtacaggcctcctcgggagggagcgcctccccaccactgagccatcctcagcagcgtccgctgcgtctgcactgatgaccgtctgagcccagctcagcgttcctggacaaacagcctcactcctcagcgttaccgccacacttgaatttctccgaatgtcaaggttccctcccactctatttttttaggttaaagttaattggcatatggaatgttttaatctcctctgaaatgtgtagcgtaggcttttcccaagggtcgctagaaactcgtcttcgcgttgccccctttctggctctcagcgccgtcgccactcgggagaggctgggtgaggcccgtgtgaggactgaccctggattcctcgaaactgccattgtgatcattactctgctctttggaaatggctgtatcatttttttgtactaatgtgaattgttcctcagaaacgcttcttttccatcctagtgagaagctggccctgcaggtggtggcagcaatggtgttgtaagatttcctcccgtagttttttctcctcatggatttgaatgaaatgccaataacacgtccactttcaacgtgtagtttacgcggagcactttcgaggcctggccgggttgggcctacttctcacctgggcctatcttctgaactcgctaggttcttatcaacatttgggggataactttgtatatttttttcatttggcttttctttaccagtttctgatttttattctcaatatatttttgctaaacctatttcacaaatcaccaccgactgaagtgtgtgtttactgatgcggccctgagctccatggcgaaaggagtgactttgcagggcgtgagaccgcagtctgcttagagcacaggaagtgacaacttagggagccccgtagggcgctgcaggccccggggaccccagcacgtgggtctaaagagagacggagtctagctctcctgccacccagagtggcttccatctcagcactctgtgggtctggtgatggaagatgcagtctctgctgatcacatgtgccctctgccagggcacctactgagaggtgcggtcctgggggtggaggcctgcctggcaggtgtgcgtgcctcgtacgtgtgttatgggcactggtctaggccaggtatgacacccactctcctgtgagatttcactttagtttttaaaaggtccagttctacagagtgagacctatctatctgagtactacatatgttttaagacttggttctttttttgagggatccttgaccctgggaagtctggagcaccctgagaagggggcaccatgtgtgcctttgcccacgtgtcctgaggggctgcttgtctgggagggagggagagaacattcagcagcaggtgcttttttatggccttttcttaaaataacctaagggggacacatccatcttgcagagaagtttacagaactccccttgaaaactgctgctgaggctcctgttaaattttctgtggcatcttttatgccttggtaaaaactgcagtgtctttggacctgagagtggctactccgtggttttgtgacctgtaagcgtggggttcaggggtgtgtggccctgcagggtcccacgcctccctgagcactgactggaagtttcactggctggtggctgtcccttctcccatcagggtccccagcaaagttaactacacagaggacccaggggaaacgagctgtgtagccactgacttgctcgcgcggccgtggcctctgaggggcactcgccggttaagacagggtgggagtagtgctttccagttcagactctaacttctcccaaagtgtcctaagaaaatactggatcggctcatagatttatgctccttatgatgccctaacttggaaggttgttctagggacaggccgggcagtgtccccacacacaccttagagtcgaaggccccagggccccgctgtcacttgcccaaaagatcccttccggcaggtaagggactaccaatgcttacgtcaaaacagcagaatcggctttgcagtgcactttggggagcagatattaacttatttttgtgttggacagtagtgaaatcttgtgatttttaatcgctttgataatacttccaaattttatgatttttctgaaggaaataatgcaaacattttaaatatgtttctccccctttccaaaaactgttaaactaatgagcaagtaacactaactttgaatgtctctacaatacccgttgataactcagtggagccaggctttggggtagcggccctgagcttgcagggtttctcgccactggggctgaccacgcccccagctgtgaccgtgggtgtggctggctctcggccctgcccagctttgttctgaggacgtggtgacttcctgaacatcagcttcaatcctccatcattaatgtgaagcaaaacacaaaaaccgccccaatccctcaggattccttggcatccgaaaccagcatctgcacctaaacccatacccacccgtgtgcgcccacagggggatgtgtccgaatgggcagcttaaaatgtggtcacctgtgggggaaactcttcaggcacctgaagtgagaacccagctgtccgtcctcaggccggcctttcttccggcgacacccgtccatggctggctgggtccccttcgcagtgtttgtctgtcttgacatctaaaccccggcgtgtgcagtgcccatcttccaggactaccttattttccagaattaaacctgttttataattcaagttaatgcaaatgactgtcagttgccaaatatcttgatcctatgagtgtagttgatgactgtttgttagtcagtagagtaaaatgctgtgtccacggggtgtcacagcctcaccataccctgttgaggtgtgaaatgccccgtcagaaattaaatacaaacttaaatgtgcctattggtgtctaaacttcatacaatgtaaggtcagattccttttaggaatactgggtgctgtcaccaggtttgatagttagacttaaaaacttgaaattcactttttggggggagggatatactgaaatagagagttgagacttgccagttgggggaaaatagcatttaaaatggaaagctgtgtttggaaaattgtgtatgagtatttttgtattaaaaacattttaaaggcttttttcttaa

SEQ ID NO: 440540 - DNA, 8731 bp, Homo sapiens
agagatgggtctcgccatcaccatgttgcccagtctggtctccaactcctgggctcaagcgatcctcctgccttggtctcccaaagtgctgggattacaggtgtgagcccccacacccggcctgagtgagtgggttctgaatggtgactgttgttgtccatagccttccccctgcttctgagagtggagtccctcccctcatgttggagacctcccaaggtccatgtggtcctataggggctgttcagcctccctagccccttaacgtgtcaggtaatactgtatatattccatgaaatgtgaataattagttatataattcctaagcacttattttaaaaaacagcaatgtgatgcttaactcttcccacctctgttcctgtcccccttagaaaaccactgataactctttttttttttgagacggagtcttgccctgtcgcccaggctggagtgtagtggcctgatctcggctcggctcattgtaacctccgcctcgggtttgagcgattctcctgcctcagcctcctgagtagctgggattataggcgtgcaccaccacgcctggctaattttttgtatctttagtagggacgggtttcaccatgttggccagagtggtcttgaactcctgaccttgtgatccgctcgcctcagcctcccaaagtgctgggattacaggcatgagccaccgtgcctgtcctagaaccactggtaactcttaactgagacaagatttcgccatgttgcccaggctggtctcgaacttctgagctcaagcgatctacctgcctcgtcctcccaaagtgttggaattgcaggtgtgagccactgcacccggcccttgcctcatgtttgaatgataatttacctgggcataaaattctggacacttgtggtggcacgagctgtctgcttttctgtggagactgcgggttgcagacaccagcagccccctattgctgcacgtcaggtgtcctccacctcagtactgtggacatctcgggccgcatagccctgttgcgcgggcatcctgtgcgttgcaggagatgcagcagcatccatgaccgcaacccatcagagtgttctaagaacggaagcatctgggctggatggaatttagcatcaagcagagtcccctttctgttcagagtgttgtaaagtgcataaagatgaagcaggcaccagaaatcctcggcagtgccaacgggaagactccgagctgcgaggtgaaccgcgagtgttctgtgttcctcagcaaagcccagctctccagtagcctgcaggagggggtcatgcagaagtttaacggccacgacgccctgccctttattccagccgacaagctgaaagatcttacttcccgggtgtttaatggagaacccggcgcacacgatgccaaactgcgttttgagtcccaggaaatgaaagggattgggacaccccctaacactacccctatcaaaaatggctctccagaaattaagctgaaaatcaccaaaacatacatgaatgggaagcctctctttgaatcttccatttgtggtgacagtgctgctgatgtgtctcagtcagaagaaaatggacaaaaaccagaaaacaaggcgagaaggaacaggaagaggagcataaaatatgactccttgctggagcagggccttgtcgaagcagctcttgtgtctaagatctcaagtccttcagataaaaagattccagctaagaaagagtcttgtccaaacactggaagagacaaagaccacctgttgaaatacaacgttggtgatttggtgtggtccaaagtgtcgggttacccttggtggccttgcatggtttctgcagatccactccttcacagctataccaaacttaaaggtcagaaaaagagtgcacgccagtatcacgtacagttctttggtgacgccccagaaagagcttggatatttgagaagagcctcgtagcttttgaaggagaaggacagtttgaaaaattatgccaggaaagtgccaagcaggcacccacgaaagctgagaaaattaagctattgaaaccaatttcagggaaattgagggcccagtgggaaatgggcattgttcaagcagaagaagctgcaagcatgtcagtggaggagcggaaagccaagttcacctttctctatgtgggggaccagcttcatctcaaccctcaagtagccaaggaggctggcattgctgcagagtctttgggagaaatggcagaatcctcaggagtcagtgaagaagctgctgaaaaccccaagtctgtgagagaagagtgcattcccatgaagagaaggcggagggccaaactgtgtagctctgcagagaccctggagagtcaccccgacatagggaagagtactcctcaaaagacggcagaggctgaccccagaagaggagtagggtctcctcctgggaggaagaagaccacagtctccatgccacgaagcaggaagggagatgcagcatcccagtttttggtcttctgtcaaaaacacagggatgaggtggtagctgagcacccagatgcttcaggtgaggagattgaagagctgctcaggtcacagtggagtctgctgagtgagaagcagagagcacgctacaacaccaagtttgccctggtggcccctgtccaggctgaagaagactctggtaatgtaaatgggaaaaaaagaaaccacacaaagaggatacaggaccctacagaagatgctgaagctgaggacacacccaggaaaagactcaggacggacaagcacagtcttcggaagagagacacaatcactgacaaaacggccagaacaagctcttacaaggccatggaggcagcctcctcgctcaagagccaggcagcaacgaaaaatctgtctgatgcatgtaaaccactgaagaagcgaaatcgggcttccacggcagcatcttcagctcttgggtttagcaaaagttcatctccttctgcatccttaactgagaatgagcttttgtgggagcccacaccagtcaagttggatttgaacccagctgctctgtactgcacttagaatgatgtaatattccaggatgctgctgcaggtggcgtatcatcgtacacactcagtgacatttctatcacaatcattttatggaagatgtgtgataatctgtttttactggtattaataaacacatacaatgaagaaaacagataacaaattttaagaccaaggtctcggacagcccgggagacgagccctcggagtccccatacgaaagtgcagacgaaacacaaactgaagtatctgtctcatccaaaaagtctgagcgaggagtgactgccaaaaaggagtatgtgtgccagctgtgtgagaagccgggcagcctcctgctctgtgaaggaccctgctgcggagctttccacctcgcctgccttgggctttcccggaggccagaagggaggttcacctgcagcgagtgtgcctcagggattcactcatgtttcgtgtgtaaagagagcaagacagatgttaagcgctgtgtggtaactcagtgtggaaaattttaccatgaggcttgtgtgaaaaaataccctctgactgtatttgagagccgaggtttccgctgccccctccacagctgtgtgagctgccatgcttccaacccttcaaacccaaggccgtcaaaaggtaaaatgatgcggtgtgtccgctgccccgttgcctatcacagcggggatgcttgtctggcagcaggatgctcagtgatcgcctccaacagcatcatctgcactgcccacttcactgctcggaaggggaagcgacaccacgcccacgtcaacgtgagctggtgcttcgtgtgctccaaaggggggagccttctgtgctgtgagtcctgcccagcggccttccaccctgactgcctgaacatcgagatgcctgacggcagctggttctgcaatgactgcagggctgggaagaagctgcacttccaggatatcatttgggtgaaacttgggaactacagatggtggccggcagaagtttgccatcccaaaaatgttcccccaaatattcagaaaatgaagcacgagattggagaattccctgtgtttttctttgggtctaaagattattactggacgcatcaggcgcgagtgttcccgtacatggagggggaccggggcagccgctaccagggggtcagagggatcggaagagtcttcaaaaacgcactgcaagaagctgaagctcgttttcgtgaaattaagcttcagagggaagcccgagaaacacaggagagcgagcgcaagcccccaccatacaagcacatcaaggtgaataagccttacgggaaagtccagatctacacagcggatatttcagaaatccctaagtgcaactgcaagcccacagatgagaatccttgtggctttgattcggagtgtctgaacaggatgctgatgtttgagtgccacccgcaggtgtgtcccgcgggcgagttctgccagaaccagtgcttcaccaagcgccagtacccagagaccaagatcatcaagacagatggcaaagggtggggcctggtcgccaagagggacatcagaaagggagaatttgttaacgagtacgttggggagctgatcgacgaggaggagtgcatggcgagaatcaagcacgcacacgagaacgacatcacccacttctacatgctcactatagacaaggaccgtataatagacgctggccccaaaggaaactactctcgatttatgaatcacagctgccagcccaactgtgagaccctcaagtggacagtgaatggggacactcgtgtgggcctgtttgccgtctgtgacattcctgcagggacggagctgacttttaactacaacctcgattgtctgggcaatgaaaaaacggtctgccggtgtggagcctccaattgcagtggattcctcggggatagaccaaagacctcgacgaccctttcatcagaggaaaagggcaaaaagaccaagaagaaaacgaggcggcgcagagcaaaaggggaagggaagaggcagtcagaggacgagtgcttccgctgcggtgatggcgggcagctggtgctgtgtgaccgcaagttctgcaccaaggcctaccacctgtcctgcctgggccttggcaagcggcccttcgggaagtgggaatgtccttggcatcattgtgacgtgtgtggcaaaccttcgacttcattttgccacctctgccccaattcgttctgtaaggagcaccaggacgggacagccttcagctgcaccccggacgggcggtcctactgctgtgagcatgacttaggggcggcatcggtcagaagcaccaagactgagaagccccccccagagccagggaagccgaaggggaagaggcggcggcggaggggctggcggagagtcacagagggcaaatagcgccaggcggccgcttggccggatccaggggcggtgcagggcggccggccctgcctgcgggagagggcgagcatgaactggcccggaggacccagctcgagccgccaggacacagacgtacaggcctcctcgggagggagcgcctccccaccactgagccatcctcagcagcgtccgctgcgtctgcactgatgaccgtctgagcccagctcagcgttcctggacaaacagcctcactcctcagcgttaccgccacacttgaatttctccgaatgtcaaggttccctcccactctatttttttaggttaaagttaattggcatatggaatgttttaatctcctctgaaatgtgtagcgtaggcttttcccaagggtcgctagaaactcgtcttcgcgttgccccctttctggctctcagcgccgtcgccactcgggagaggctgggtgaggcccgtgtgaggactgaccctggattcctcgaaactgccattgtgatcattactctgctctttggaaatggctgtatcatttttttgtactaatgtgaattgttcctcagaaacgcttcttttccatcctagtgagaagctggccctgcaggtggtggcagcaatggtgttgtaagatttcctcccgtagttttttctcctcatggatttgaatgaaatgccaataacacgtccactttcaacgtgtagtttacgcggagcactttcgaggcctggccgggttgggcctacttctcacctgggcctatcttctgaactcgctaggttcttatcaacatttgggggataactttgtatatttttttcatttggcttttctttaccagtttctgatttttattctcaatatatttttgctaaacctatttcacaaatcaccaccgactgaagtgtgtgtttactgatgcggccctgagctccatggcgaaaggagtgactttgcagggcgtgagaccgcagtctgcttagagcacaggaagtgacaacttagggagccccgtagggcgctgcaggccccggggaccccagcacgtgggtctaaagagagacggagtctagctctcctgccacccagagtggcttccatctcagcactctgtgggtctggtgatggaagatgcagtctctgctgatcacatgtgccctctgccagggcacctactgagaggtgcggtcctgggggtggaggcctgcctggcaggtgtgcgtgcctcgtacgtgtgttatgggcactggtctaggccaggtatgacacccactctcctgtgagatttcactttagtttttaaaaggtccagttctacagagtgagacctatctatctgagtactacatatgttttaagacttggttctttttttgagggatccttgaccctgggaagtctggagcaccctgagaagggggcaccatgtgtgcctttgcccacgtgtcctgaggggctgcttgtctgggagggagggagagaacattcagcagcaggtgcttttttatggccttttcttaaaataacctaagggggacacatccatcttgcagagaagtttacagaactccccttgaaaactgctgctgaggctcctgttaaattttctgtggcatcttttatgccttggtaaaaactgcagtgtctttggacctgagagtggctactccgtggttttgtgacctgtaagcgtggggttcaggggtgtgtggccctgcagggtcccacgcctccctgagcactgactggaagtttcactggctggtggctgtcccttctcccatcagggtccccagcaaagttaactacacagaggacccaggggaaacgagctgtgtagccactgacttgctcgcgcggccgtggcctctgaggggcactcgccggttaagacagggtgggagtagtgctttccagttcagactctaacttctcccaaagtgtcctaagaaaatactggatcggctcatagatttatgctccttatgatgccctaacttggaaggttgttctagggacaggccgggcagtgtccccacacacaccttagagtcgaaggccccagggccccgctgtcacttgcccaaaagatcccttccggcaggtaagggactaccaatgcttacgtcaaaacagcagaatcggctttgcagtgcactttggggagcagatattaacttatttttgtgttggacagtagtgaaatcttgtgatttttaatcgctttgataatacttccaaattttatgatttttctgaaggaaataatgcaaacattttaaatatgtttctccccctttccaaaaactgttaaactaatgagcaagtaacactaactttgaatgtctctacaatacccgttgataactcagtggagccaggctttggggtagcggccctgagcttgcagggtttctcgccactggggctgaccacgcccccagctgtgaccgtgggtgtggctggctctcggccctgcccagctttgttctgaggacgtggtgacttcctgaacatcagcttcaatcctccatcattaatgtgaagcaaaacacaaaaaccgccccaatccctcaggattccttggcatccgaaaccagcatctgcacctaaacccatacccacccgtgtgcgcccacagggggatgtgtccgaatgggcagcttaaaatgtggtcacctgtgggggaaactcttcaggcacctgaagtgagaacccagctgtccgtcctcaggccggcctttcttccggcgacacccgtccatggctggctgggtccccttcgcagtgtttgtctgtcttgacatctaaaccccggcgtgtgcagtgcccatcttccaggactaccttattttccagaattaaacctgttttataattcaagttaatgcaaatgactgtcagttgccaaatatcttgatcctatgagtgtagttgatgactgtttgttagtcagtagagtaaaatgctgtgtccacggggtgtcacagcctcaccataccctgttgaggtgtgaaatgccccgtcagaaattaaatacaaacttaaatgtgcctattggtgtctaaacttcatacaatgtaaggtcagattccttttaggaatactgggtgctgtcaccaggtttgatagttagacttaaaaacttgaaattcactttttggggggagggatatactgaaatagagagttgagacttgccagttgggggaaaatagcatttaaaatggaaagctgtgtttggaaaattgtgtatgagtatttttgtattaaaaacattttaaaggcttttttcttaa

SEQ ID NO: 440541 - DNA, 658 bp, Homo sapiens
agctagagggcgcgcgcggctgaaagcgtgtggaggcgcgggctgcagttcggatgtctgtgtggcggggagggggcggcggccgggagagacgactccgccccctgcgcgcatgctccggccccggcgggttataaggcagcctcgctggcccggccagacaaagtggtgagctgcgacgtgactggctagctgcgtgggtactggaacaagcaaacgaggcagcgagcgaaggacgggagccggaccctgggccccgtggaactccagcctgcgccaccacgtcacgcacacgctcggcgctgcgatccgcgcatataacgatatttggatttgacctgcattttggaatttatctacacttaaaatgccaccagcagttggaggtccagttggatacacccccccagatggaggctggggctgggcagtggtaattggagctttcatttccatcggcttctcttatgcatttcccaaatcaattactgtcttcttcaaagagattgaaggtatattccatgccaccaccagcgaagtgtcatggatatcctccataatgttggctgtcatgtatggtggaggtaagtacccattaaggcctgctcttttaattttcatgaagcagccagagtgtctgtattaggtaactttaaaa

SEQ ID NO: 440542 - DNA, 3398 bp, Homo sapiens
agctagagggcgcgcgcggctgaaagcgtgtggaggcgcgggctgcagttcggatgtctgtgtggcggggagggggcggcggccgggagagacgactccgccccctgcgcgcatgctccggccccggcgggttataaggcagcctcgctggcccggccagacaaagtggtgagctgcgacgtgactggctagctgcgtgggtactggaacaagcaaacgaggcagcgagcgaaggacgggagccggaccctgggccccgtggaactccagcctgcgccaccacgtcacgcacacgctcggcgctgcgatccgcgcatataacgatatttggatttgacctgcattttggaatttatctacacttaaaatgccaccagcagttggaggtccagttggatacacccccccagatggaggctggggctgggcagtggtaattggagctttcatttccatcggcttctcttatgcatttcccaaatcaattactgtcttcttcaaagagattgaaggtatattccatgccaccaccagcgaagtgtcatggatatcctccataatgttggctgtcatgtatggtggaggtcctatcagcagtatcctggtgaataaatatggaagtcgtatagtcatgattgttggtggctgcttgtcaggctgtggcttgattgcagcttctttctgtaacaccgtacagcaactatacgtctgtattggagtcattggaggtcttgggcttgccttcaacttgaatccagctctgaccatgattggcaagtatttctacaagaggcgaccattggccaacggactggccatggcaggcagccctgtgttcctctgtactctggcccccctcaatcaggttttcttcggtatctttggatggagaggaagctttctaattcttgggggcttgctactaaactgctgtgttgctggagccctcatgcgaccaatcgggcccaagccaaccaaggcagggaaagataagtctaaagcatcccttgagaaagctggaaaatctggtgtgaaaaaagatctgcatgatgcaaatacagatcttattggaagacaccctaaacaagagaaacgatcagtcttccaaacaattaatcagttcctggacttaaccctattcacccacagaggctttttgctatacctctctggaaatgtgatcatgttttttggactctttgcacctttggtgtttcttagtagttatgggaagagtcagcattattctagtgagaagtctgccttccttctttccattctggcttttgttgacatggtagcccgaccatctatgggacttgtagccaacacaaagccaataagacctcgaattcagtatttctttgcggcttccgttgttgcaaatggagtgtgtcatatgctagcacctttatccactacctatgttggattctgtgtctatgcgggattctttggatttgccttcgggtggctcagctccgtattgtttgaaacattgatggaccttgttggaccccagaggttctccagcgctgtgggattggtgaccattgtggaatgctgtcctgtcctcctggggccaccacttttaggtcggctcaatgacatgtatggagactacaaatacacatactgggcatgtggcgtcgtcctaattatttcaggtatctatctcttcattggcatgggcatcaattatcgacttttggcaaaagaacagaaagcaaacgagcagaaaaaggaaagtaaagaggaagagaccagtatagatgttgctgggaagccaaatgaagttaccaaagcagcagaatctccggaccagaaagacacagaaggagggcccaaggaggaggaaagtccagtctgaatccatggggctgaagggtaaattgagcagttcatgacccaggatatctgaaaatattctactggcctgtaatctaccagtggtgctcaatgcaaatagtagacatttgtgtggaaatcataccagttgttcattgatgggatttttgtttgactccttaccaatagcctgaatttgaggagggaatgattggtagcaaaggatgggggaaagaagtaggttctgttttgttttgttttaatcttagcttttaatagtgtcataaagattataatatgtgccttaagttttagtctttagaactctagagagccttaacttcttaaaccatttttgctgaattcatctatttcgagtgttgtgttaaaaggaaaaataacaactaacttgtttgaggcaaatctaaaatttaaaattaatcttgcttcattgttacatgtaatatatttcagacattttcactggaagatttatgaacagaaatattggttgaaagttagagattttacaaaatgctgacaaaaatattttcctagcatcagtagatttctggcatatgtttctgctagctatatatttaggaaattcaaagcataaaactttggcaacatcttggctgttctagacacagtgtacttgtcaacccctctcaggtaccttttcttgggatgcttattagaagccaagtaaagtgcttaaggtttgttttcattaaattagctatttctgctcccctgttcaaagatgcattttgagtgtttatagatcactgccctttttgaaatcacctggtattatttttcttactggaaaagttagtattaaaatctacagaactacatatttgtgcctccttggtaaatacaacacatctaattaaatgtagacagatatttcaaacatcagctgaattcacttaagtttttccaaaacctcagttaaactgtgaagctattggaatttttttttcctggaatttttcccctttgattcacagtggtcccatttatatctgcttctagcttagtgctatgtgtgagatatgtgtgtgtttggtgtttttgtttttgtttttttttttaaggtttgcaaattaaaaagggccagaaaaatttggcaccaggcaaacgaataaagataggattgggaaagaagttgctaagtgtgcttagttttaataagtaattccttctcttttttcagagaaggccttacagaaaattgttgtgcttagaattgctggatgcatttttaccctccacacaaacctaaaaattttgtgacccctttcacttacctgaaaagtagagaaatggattcagtataaggataaggagggaaggtggaccagaatgaaaactgtaaatatttttttaacctaatatcacttaaatcgaggcagaaagatatagacattcaatgaattatattcaatgcatttaaaataccactgtaattgacagagtaaaagtatagatacaaaaccttgtgtaagaggctgacttttccaaataaacattttttaaga

SEQ ID NO: 440543 - DNA, 3916 bp, Homo sapiens
agctagagggcgcgcgcggctgaaagcgtgtggaggcgcgggctgcagttcggatgtctgtgtggcggggagggggcggcggccgggagagacgactccgccccctgcgcgcatgctccggccccggcgggttataaggcagcctcgctggcccggccagacaaagtggtgagctgcgacgtgactggctagctgcgtgggtactggaacaagcaaacgaggcagcgagcgaaggacgggagccggaccctgggccccgtggaactccagcctgcgccaccacgtcacgcacacgctcggcgctgcgatccgcgcatataacgatatttggatttgacctgcattttggaatttatctacacttaaaatgccaccagcagttggaggtccagttggatacacccccccagatggaggctggggctgggcagtggtaattggagctttcatttccatcggcttctcttatgcatttcccaaatcaattactgtcttcttcaaagagattgaaggtatattccatgccaccaccagcgaagtgtcatggatatcctccataatgttggctgtcatgtatggtggaggtcctatcagcagtatcctggtgaataaatatggaagtcgtatagtcatgattgttggtggctgcttgtcaggctgtggcttgattgcagcttctttctgtaacaccgtacagcaactatacgtctgtattggagtcattggaggtcttgggcttgccttcaacttgaatccagctctgaccatgattggcaagtatttctacaagaggcgaccattggccaacggactggccatggcaggcagccctgtgttcctctgtactctggcccccctcaatcaggttttcttcggtatctttggatggagaggaagctttctaattcttgggggcttgctactaaactgctgtgttgctggagccctcatgcgaccaatcgggcccaagccaaccaaggcagggaaagataagtctaaagcatcccttgagaaagctggaaaatctggtgtgaaaaaagatctgcatgatgcaaatacagatcttattggaagacaccctaaacaagagaaacgatcagtcttccaaacaattaatcagttcctggacttaaccctattcacccacagaggctttttgctatacctctctggaaatgtgatcatgttttttggactctttgcacctttggtgtttcttagtagttatgggaagagtcagcattattctagtgagaagtctgccttccttctttccattctggcttttgttgacatggtagcccgaccatctatgggacttgtagccaacacaaagccaataagacctcgaattcagtatttctttgcggcttccgttgttgcaaatggagtgtgtcatatgctagcacctttatccactacctatgttggattctgtgtctatgcgggattctttggatttgccttcgggtggctcagctccgtattgtttgaaacattgatggaccttgttggaccccagaggttctccagcgctgtgggattggtgaccattgtggaatgctgtcctgtcctcctggggccaccacttttaggtcggctcaatgacatgtatggagactacaaatacacatactgggcatgtggcgtcgtcctaattatttcaggtatctatctcttcattggcatgggcatcaattatcgacttttggcaaaagaacagaaagcaaacgagcagaaaaaggaaagtaaagaggaagagaccagtatagatgttgctgggaagccaaatgaagttaccaaagcagcagaatctccggaccagaaagacacagaaggagggcccaaggaggaggaaagtccagtctgaatccatggggctgaagggtaaattgagcagttcatgacccaggatatctgaaaatattctactggcctgtaatctaccagtggtgctcaatgcaaatagtagacatttgtgtggaaatcataccagttgttcattgatgggatttttgtttgactccttaccaatagcctgaatttgaggagggaatgattggtagcaaaggatgggggaaagaagtaggttctgttttgttttgttttaatcttagcttttaatagtgtcataaagattataatatgtgccttaagttttagtctttagaactctagagagccttaacttcttaaaccatttttgctgaattcatctatttcgagtgttgtgttaaaaggaaaaataacaactaacttgtttgaggcaaatctaaaatttaaaattaatcttgcttcattgttacatgtaatatatttcagacattttcactggaagatttatgaacagaaatattggttgaaagttagagattttacaaaatgctgacaaaaatattttcctagcatcagtagatttctggcatatgtttctgctagctatatatttaggaaattcaaagcataaaactttggcaacatcttggctgttctagacacagtgtacttgtcaacccctctcaggtaccttttcttgggatgcttattagaagccaagtaaagtgcttaaggtttgttttcattaaattagctatttctgctcccctgttcaaagatgcattttgagtgtttatagatcactgccctttttgaaatcacctggtattatttttcttactggaaaagttagtattaaaatctacagaactacatatttgtgcctccttggtaaatacaacacatctaattaaatgtagacagatatttcaaacatcagctgaattcacttaagtttttccaaaacctcagttaaactgtgaagctattggaatttttttttcctggaatttttcccctttgattcacagtggtcccatttatatctgcttctagcttagtgctatgtgtgagatatgtgtgtgtttggtgtttttgtttttgtttttttttttaaggtttgcaaattaaaaagggccagaaaaatttggcaccaggcaaacgaataaagataggattgggaaagaagttgctaagtgtgcttagttttaataagtaattccttctcttttttcagagaaggccttacagaaaattgttgtgcttagaattgctggatgcatttttaccctccacacaaacctaaaaattttgtgacccctttcacttacctgaaaagtagagaaatggattcagtataaggataaggagggaaggtggaccagaatgaaaactgtaaatatttttttaacctaatatcacttaaatcgaggcagaaagatatagacattcaatgaattatattcaatgcatttaaaataccactgtaattgacagagtaaaagtatagatacaaaaccttgtgtaagaggctgacttttccaaataaacattttttaagaaaacatttcttctcccaaatgtctattttcttgaggaaaatattgctgtgtcttcattttcattaccaggtttcattttgggccttgctaaattgattgaattaaatcctccagcttttgaaccttgatatttgtgtatatgatttattttcatttgaatttctcctttcctcttctttgctgtaaggcaaggaggaggggaattttaaaaccatcttatttgaactgagagcatccagagcagttaaccttaaggaaacaatgaaaaactccctttgtatgcctgggcatcatggcagatagaggaagagtgttagaggagaaaactgctgctgagagtattggcaggcttggcctcagtttggactctgtaattttctttggacccaagtctgtaacctctgcgtacttcttctctcttaccttctataaaaatgaggattactgttggtgagggaataaggaatgtaagtaaaggaaatctgaaaaaataaaagtaaagcaagtataaaaaaaaa

SEQ ID NO: 440544 - DNA, 3050 bp, Homo sapiens
agctagagggcgcgcgcggctgaaagcgtgtggaggcgcgggctgcagttcggatgtctgtgtggcggggagggggcggcggccgggagagacgactccgccccctgcgcgcatgctccggccccggcgggttataaggcagcctcgctggcccggccagacaaagtggtgagctgcgacgtgactggctagctgcgtgggtactggaacaagcaaacgaggcagcgagcgaaggacgggagccggaccctgggccccgtggaactccagcctgcgccaccacgtcacgcacacgctcggcgctgcgatccgcgcatataacgatatttggatttgacctgcattttggaatttatctacacttaaaatgccaccagcagttggaggtccagttggatacacccccccagatggaggctggggctgggcagtggtaattggagctttcatttccatcggcttctcttatgcatttcccaaatcaattactgtcttcttcaaagagattgaaggtatattccatgccaccaccagcgaagtgtcatggatatcctccataatgttggctgtcatgtatggtggaggtcctatcagcagtatcctggtgaataaatatggaagtcgtatagtcatgattgttggtggctgcttgtcaggctgtggcttgattgcagcttctttctgtaacaccgtacagcaactatacgtctgtattggagtcattggaggtcttgggcttgccttcaacttgaatccagctctgaccatgattggcaagtatttctacaagaggcgaccattggccaacggactggccatggcaggcagccctgtgttcctctgtactctggcccccctcaatcaggttttcttcggtatctttggatggagaggaagctttctaattcttgggggcttgctactaaactgctgtgttgctggagccctcatgcgaccaatcgggcccaagccaaccaaggcagggaaagataagtctaaagcatcccttgagaaagctggaaaatctggtgtgaaaaaagatctgcatgatgcaaatacagatcttattggaagacaccctaaacaagagaaacgatcagtcttccaaacaattaatcagttcctggacttaaccctattcacccacagaggctttttgctatacctctctggaaatgtgatcatgttttttggactctttgcacctttggtgtttcttataggttctgttttgttttgttttaatcttagcttttaatagtgtcataaagattataatatgtgccttaagttttagtctttagaactctagagagccttaacttcttaaaccatttttgctgaattcatctatttcgagtgttgtgttaaaaggaaaaataacaactaacttgtttgaggcaaatctaaaatttaaaattaatcttgcttcattgttacatgtaatatatttcagacattttcactggaagatttatgaacagaaatattggttgaaagttagagattttacaaaatgctgacaaaaatattttcctagcatcagtagatttctggcatatgtttctgctagctatatatttaggaaattcaaagcataaaactttggcaacatcttggctgttctagacacagtgtacttgtcaacccctctcaggtaccttttcttgggatgcttattagaagccaagtaaagtgcttaaggtttgttttcattaaattagctatttctgctcccctgttcaaagatgcattttgagtgtttatagatcactgccctttttgaaatcacctggtattatttttcttactggaaaagttagtattaaaatctacagaactacatatttgtgcctccttggtaaatacaacacatctaattaaatgtagacagatatttcaaacatcagctgaattcacttaagtttttccaaaacctcagttaaactgtgaagctattggaatttttttttcctggaatttttcccctttgattcacagtggtcccatttatatctgcttctagcttagtgctatgtgtgagatatgtgtgtgtttggtgtttttgtttttgtttttttttttaaggtttgcaaattaaaaagggccagaaaaatttggcaccaggcaaacgaataaagataggattgggaaagaagttgctaagtgtgcttagttttaataagtaattccttctcttttttcagagaaggccttacagaaaattgttgtgcttagaattgctggatgcatttttaccctccacacaaacctaaaaattttgtgacccctttcacttacctgaaaagtagagaaatggattcagtataaggataaggagggaaggtggaccagaatgaaaactgtaaatatttttttaacctaatatcacttaaatcgaggcagaaagatatagacattcaatgaattatattcaatgcatttaaaataccactgtaattgacagagtaaaagtatagatacaaaaccttgtgtaagaggctgacttttccaaataaacattttttaagaaaacatttcttctcccaaatgtctattttcttgaggaaaatattgctgtgtcttcattttcattaccaggtttcattttgggccttgctaaattgattgaattaaatcctccagcttttgaaccttgatatttgtgtatatgatttattttcatttgaatttctcctttcctcttctttgctgtaaggcaaggaggaggggaattttaaaaccatcttatttgaactgagagcatccagagcagttaaccttaaggaaacaatgaaaaactccctttgtatgcctgggcatcatggcagatagaggaagagtgttagaggagaaaactgctgctgagagtattggcaggcttggcctcagtttggactctgtaattttctttggacccaagtctgtaacctctgcgtacttcttctctcttaccttctataaaaatgaggattactgttggtgagggaataaggaatgtaagtaaaggaaatctgaaaaaataaaagtaaagcaagtataaaaaaaaa

SEQ ID NO: 440545 - DNA, 1082 bp, Homo sapiens
agctagagggcgcgcgcggctgaaagcgtgtggaggcgcgggctgcagttcggatgtctgtgtggcggggagggggcggcggccgggagagacgactccgccccctgcgcgcatgctccggccccggcgggttataaggcagcctcgctggcccggccagacaaagtggtgagctgcgacgtgactggctagctgcgtgggtactggaacaagcaaacgaggcagcgagcgaaggacgggagccggaccctgggccccgtggaactccagcctgcgccaccacgtcacgcacacgctcggcgctgcgatccgcgcatataacggttagttgggtaacagccggcggcacgcggcgcggaccccacggtgccctcgctgccctggtggggtcggaggggacctccggggttgggagactttgtctccggcggagggaggcggcccagcagagggcatcgtggtcacaggcagccgcgtggcctcggactgcagtgctggtgaaggagaccttgaggcgctggggtcagcgcctctcttagccgagccgcgggccccgtgctaagatgccggtcccaggcctggccgaggagttgggtcgtggtgcccggtgacggtggggaagtcccttcccccctaagtcttcaataggctcctcgagagatgctttgatctggaaaagggataacatgaggctgctgcatgtggtacctccagactctcctggccgcttctgccccaagggaagggactcggggcagaagttatttatgattcgtgacattgtccgccccaaccttcttggcccgccgatccttgccccacctggtgacttgcgagagtggtgcggagagccgcattccccacagccaaggcgtgactgcagggttcgagtagactttgcggaggggacggggcagcccgcagactcctgggagtggtgctgacgggggctctttgtcattcaacctgtggctgccagcgtccgccgcagcgcccttctactcatggacttaaggcggccctgttgagagaaatctggaggatagcgttacacttggtccgatgcaagttttttgttccaa

SEQ ID NO: 440546 - DNA, 3525 bp, Homo sapiens
agctagagggcgcgcgcggctgaaagcgtgtggaggcgcgggctgcagttcggatgtctgtgtggcggggagggggcggcggccgggagagacgactccgccccctgcgcgcatgctccggccccggcgggttataaggcagcctcgctggcccggccagacaaagtggtgagctgcgacgtgactggctagctgcgtgggtactggaacaagcaaacgaggcagcgagcgaaggacgggagccggaccctgggccccgtggaactccagcctgcgccaccacgtcacgcacacgctcggcgctgcgatccgcgcatataacgatatttggatttgacctgcattttggaatttatctacacttaaaatgccaccagcagttggaggtccagttggatacacccccccagatggaggctggggctgggcagtggtaattggagctttcatttccatcggcttctcttatgcatttcccaaatcaattactgtcttcttcaaagagattgaaggtatattccatgccaccaccagcgaagtgtcatggatatcctccataatgttggctgtcatgtatggtggaggtcctatcagcagtatcctggtgaataaatatggaagtcgtatagtcatgattgttggtggctgcttgtcaggctgtggcttgattgcagcttctttctgtaacaccgtacagcaactatacgtctgtattggagtcattggaggtcttgggcttgccttcaacttgaatccagctctgaccatgattggcaagtatttctacaagaggcgaccattggccaacggactggccatggcaggcagccctgtgttcctctgtactctggcccccctcaatcaggttttcttcggtatctttggatggagaggaagctttctaattcttgggggcttgctactaaactgctgtgttgctggagccctcatgcgaccaatcgggcccaagccaaccaaggcagggaaagataagtctaaagcatcccttgagaaagctggaaaatctggtgtgaaaaaagatctgcatgatgcaaatacagatcttattggaagacaccctaaacaagagaaacgatcagtcttccaaacaattaatcagttcctggacttaaccctattcacccacagaggctttttgctatacctctctggaaatgtgatcatgttttttggactctttgcacctttggtgtttcttagtagttatgggaagagtcagcattattctagtgagaagtctgccttccttctttccattctggcttttgttgacatggtagcccgaccatctatgggacttgtagccaacacaaagccaataagacctcgaattcagtatttctttgcggcttccgttgttgcaaatggagtgtgtcatatgctagcacctttatccactacctatgttggattctgtgtctatgcgggattctttggatttgccttcgggtggctcagctccgtattgtttgaaacattgatggaccttgttggaccccagaggttctccagcgctgtgggattggtgaccattgtggaatgctgtcctgtcctcctggggccaccacttttaggtcggctcaatgacatgtatggagactacaaatacacatactgggcatgtggcgtcgtcctaattatttcaggtatctatctcttcattggcatgggcatcaattatcgacttttggcaaaagaacagaaagcaaacgagcagaaaaaggaaagtaaagaggaagagaccagtatagatgttgctgggaagccaaatgaagttaccaaagcagcagaatctccggaccagaaagacacagaaggagggcccaaggaggaggaaagtccagtctgaatccatggggctgaagggtaaattgagcagttcatgacccaggatatctgaaaatattctactggcctgtaatctaccagtggtgctcaatgcaaatagtagacatttgtgtggaaatcataccagttgttcattgatgggatttttgtttgactccttaccaatagcctgaatttgaggagggaatgattggtagcaaaggatgggggaaagaagtaggttctgttttgttttgttttaatcttagcttttaatagtgtcataaagattataatatgtgccttaagttttagtctttagaactctagagagccttaacttcttaaaccatttttgctgaattcatctatttcgagtgttgtgttaaaaggaaaaataacaactaacttgtttgaggcaaatctaaaatttaaaattaatcttgcttcattgttacatgtaatatatttcagacattttcactggaagatttatgaacagaaatattggttgaaagttagagattttacaaaatgctgacaaaaatattttcctagcatcagtagatttctggcatatgtttctgctagctatatatttaggaaattcaaagcataaaactttggcaacatcttggctgttctagacacagtgtacttgtcaacccctctcaggtaccttttcttgggatgcttattagaagccaagtaaagtgcttaaggtttgttttcattaaattagctatttctgctcccctgttcaaagatgcattttgagtgtttatagatcactgccctttttgaaatcacctggtattatttttcttactggaaaagttagtattaaaatctacagaactacatatttgtgcctccttggtaaatacaacacatctaattaaatgtagacagatatttcaaacatcagctgaattcacttaagtttttccaaaacctcagttaaactgtgaagctattggaatttttttttcctggaatttttcccctttgattcacagtggtcccatttatatctgcttctagcttagtgctatgtgtgagatatgtgtgtgtttggtgtttttgtttttgtttttttttttaaggtttgcaaattaaaaagggccagaaaaatttggcaccaggcaaacgaataaagataggattgggaaagaagttgctaagtgtgcttagttttaataagtaattccttctcttttttcagagaaggccttacagaaaattgttgtgcttagaattgctggatgcatttttaccctccacacaaacctaaaaattttgtgacccctttcacttacctgaaaagtagagaaatggattcagtataaggataaggagggaaggtggaccagaatgaaaactgtaaatatttttttaacctaatatcacttaaatcgaggcagaaagatatagacattcaatgaattatattcaatgcatttaaaataccactgtaattgacagagtaaaagtatagatacaaaaccttgtgtaagaggctgacttttccaaataaacattttttaagaaaacatttcttctcccaaatgtctattttcttgaggaaaatattgctgtgtcttcattttcattaccaggtttcattttgggccttgctaaattgattgaattaaatcctccagcttttgaaccttg

SEQ ID NO: 440547 - DNA, 3077 bp, Homo sapiens
gaaagattaaggataacttcaggtcttttgtattttagtaaaattccatccagtatttttagatttagaacctgcacaattaattatgttttctaacatctttattttagtacacatgtgactcagaagtaattatagaaaacaatattcttatcattgctgcttgtttattttggaggatttgtcattcattgtcattcatacttgtgtagatgtgagggagcagtttcctttatattactacatttttggttgtcttttaggtcctatcagcagtatcctggtgaataaatatggaagtcgtatagtcatgattgttggtggctgcttgtcaggctgtggcttgattgcagcttctttctgtaacaccgtacagcaactatacgtctgtattggagtcattggaggtcttgggcttgccttcaacttgaatccagctctgaccatgattggcaagtatttctacaagaggcgaccattggccaacggactggccatggcaggcagccctgtgttcctctgtactctggcccccctcaatcaggttttcttcggtatctttggatggagaggaagctttctaattcttgggggcttgctactaaactgctgtgttgctggagccctcatgcgaccaatcgggcccaagccaaccaaggcagggaaagataagtctaaagcatcccttgagaaagctggaaaatctggtgtgaaaaaagatctgcatgatgcaaatacagatcttattggaagacaccctaaacaagagaaacgatcagtcttccaaacaattaatcagttcctggacttaaccctattcacccacagaggctttttgctatacctctctggaaatgtgatcatgttttttggactctttgcacctttggtgtttcttagtagttatgggaagagtcagcattattctagtgagaagtctgccttccttctttccattctggcttttgttgacatggtagcccgaccatctatgggacttgtagccaacacaaagccaataagacctcgaattcagtatttctttgcggcttccgttgttgcaaatggagtgtgtcatatgctagcacctttatccactacctatgttggattctgtgtctatgcgggattctttggatttgccttcgggtggctcagctccgtattgtttgaaacattgatggaccttgttggaccccagaggttctccagcgctgtgggattggtgaccattgtggaatgctgtcctgtcctcctggggccaccacttttaggtcggctcaatgacatgtatggagactacaaatacacatactgggcatgtggcgtcgtcctaattatttcaggtatctatctcttcattggcatgggcatcaattatcgacttttggcaaaagaacagaaagcaaacgagcagaaaaaggaaagtaaagaggaagagaccagtatagatgttgctgggaagccaaatgaagttaccaaagcagcagaatctccggaccagaaagacacagaaggagggcccaaggaggaggaaagtccagtctgaatccatggggctgaagggtaaattgagcagttcatgacccaggatatctgaaaatattctactggcctgtaatctaccagtggtgctcaatgcaaatagtagacatttgtgtggaaatcataccagttgttcattgatgggatttttgtttgactccttaccaatagcctgaatttgaggagggaatgattggtagcaaaggatgggggaaagaagtaggttctgttttgttttgttttaatcttagcttttaatagtgtcataaagattataatatgtgccttaagttttagtctttagaactctagagagccttaacttcttaaaccatttttgctgaattcatctatttcgagtgttgtgttaaaaggaaaaataacaactaacttgtttgaggcaaatctaaaatttaaaattaatcttgcttcattgttacatgtaatatatttcagacattttcactggaagatttatgaacagaaatattggttgaaagttagagattttacaaaatgctgacaaaaatattttcctagcatcagtagatttctggcatatgtttctgctagctatatatttaggaaattcaaagcataaaactttggcaacatcttggctgttctagacacagtgtacttgtcaacccctctcaggtaccttttcttgggatgcttattagaagccaagtaaagtgcttaaggtttgttttcattaaattagctatttctgctcccctgttcaaagatgcattttgagtgtttatagatcactgccctttttgaaatcacctggtattatttttcttactggaaaagttagtattaaaatctacagaactacatatttgtgcctccttggtaaatacaacacatctaattaaatgtagacagatatttcaaacatcagctgaattcacttaagtttttccaaaacctcagttaaactgtgaagctattggaatttttttttcctggaatttttcccctttgattcacagtggtcccatttatatctgcttctagcttagtgctatgtgtgagatatgtgtgtgtttggtgtttttgtttttgtttttttttttaaggtttgcaaattaaaaagggccagaaaaatttggcaccaggcaaacgaataaagataggattgggaaagaagttgctaagtgtgcttagttttaataagtaattccttctcttttttcagagaaggccttacagaaaattgttgtgcttagaattgctggatgcatttttaccctccacacaaacctaaaaattttgtgacccctttcacttacctgaaaagtagagaaatggattcagtataaggataaggagggaaggtggaccagaatgaaaactgtaaatatttttttaacctaatatcacttaaatcgaggcagaaagatatagacattcaatgaattatattcaatgcatttaaaataccactgtaattgacagagtaaaagtatagatacaaaaccttgtgtaagaggctgacttttccaaataaacattttttaaga

SEQ ID NO: 440548 - DNA, 2598 bp, Homo sapiens
agctagagggcgcgcgcggctgaaagcgtgtggaggcgcgggctgcagttcggatgtctgtgtggcggggagggggcggcggccgggagagacgactccgccccctgcgcgcatgctccggccccggcgggttataaggcagcctcgctggcccggccagacaaagtggtgagctgcgacgtgactggctagctgcgtgggtactggaacaagcaaacgaggcagcgagcgaaggacgggagccggaccctgggccccgtggaactccagcctgcgccaccacgtcacgcacacgctcggcgctgcgatccgcgcatataacgatatttggatttgacctgcattttggaatttatctacacttaaaatgccaccagcagttggaggtccagttggatacacccccccagatggaggctggggctgggcagtggtaattggagctttcatttccatcggcttctcttatgcatttcccaaatcaattactgtcttcttcaaagagattgaaggtatattccatgccaccaccagcgaagtgtcatggatatcctccataatgttggctgtcatgtatggtggaggtcctatcagcagtatcctggtgaataaatatggaagtcgtatagtcatgattgttggtggctgcttgtcaggctgtggcttgattgcagcttctttctgtaacaccgtacagcaactatacgtctgtattggagtcattggaggtcttgggcttgccttcaacttgaatccagctctgaccatgattggcaagtatttctacaagaggcgaccattggccaacggactggccatggcaggcagccctgtgttcctctgtactctggcccccctcaatcaggttttcttcggtatctttggatggagaggaagctttctaattcttgggggcttgctactaaactgctgtgttgctggagccctcatgcgaccaatcgggcccaagccaaccaaggcagggaaagataagtctaaagcatcccttgagaaagctggaaaatctggtgtgaaaaaagatctgcatgatgcaaatacagatcttattggaagacaccctaaacaagagaaacgatcagtcttccaaacaattaatcagttcctggacttaaccctattcacccacagaggctttttgctatacctctctggaaatgtgatcatgttttttggactctttgcacctttggtgtttcttagtagttatgggaagagtcagcattattctagtgagaagtctgccttccttctttccattctggcttttgttgacatggtagcccgaccatctatgggacttgtagccaacacaaagccaataagacctcgaattcagtatttctttgcggcttccgttgttgcaaatggagtgtgtcatatgctagcacctttatccactacctatgttggattctgtgtctatgcgggattctttggatttgccttcgggtggctcagctccgtattgtttgaaacattgatggaccttgttggaccccagaggttctccagcgctgtgggattggtgaccattgtggaatgctgtcctgtcctcctggggccaccacttttaggtcggctcaatgacatgtatggagactacaaatacacatactgggcatgtggcgtcgtcctaattatttcaggtatctatctcttcattggcatgggcatcaattatcgacttttggcaaaagaacagaaagcaaacgagcagaaaaaggaaagtaaagaggaagagaccagtatagatgttgctgggaagccaaatgaagttaccaaagcagcagaatctccggaccagaaagacacagaaggagggcccaaggaggaggaaagtccagtctgaatccatggggctgaagggtaaattgagcagttcatgacccaggatatctgaaaatattctactggcctgtaatctaccagtggtgctcaatgcaaatagtagacatttgtgtggaaatcataccagttgttcattgatgggatttttgtttgactccttaccaatagcctgaatttgaggagggaatgattggtagcaaaggatgggggaaagaagtaggttctgttttgttttgttttaatcttagcttttaatagtgtcataaagattataatatgtgccttaagttttagtctttagaactctagagagccttaacttcttaaaccatttttgctgaattcatctatttcgagtgttgtgttaaaaggaaaaataacaactaacttgtttgaggcaaatctaaaatttaaaattaatcttgcttcattgttacatgtaatatatttcagacattttcactggaagatttatgaacagaaatattggttgaaagttagagattttacaaaatgctgacaaaaacagaatctccggaccagaaagacacagaaggagggcccaaggaggaggaaagtccagtctgaatccatggggctgaagggtaaattgagcagttcatgacccaggatatctgaaaatattctactggcctgtaatctaccagtggtgctcaatgcaaatagtagatatttgtgtggaaatcataccagttgttcattgatggg

SEQ ID NO: 440549 - DNA, 3719 bp, Homo sapiens
cttttccgtaaagcggtggagaatctcaagcatgtgcatttaattgaggaatagcagaagggctaaagcaaccaagaaaagaagtgtgggtatttttgttaagtaaaacagcccaagtgcttctggaggtgggtttctaccaagatagaggaaaagggctgaattccctctaagtgggacagccgagctcaggatgtgcttcccagcttcactggttaatttgacctgaacctatttaaagatcccttctgcccctgaagacctatccgcactcaaattctaacatgaagaaatctactcgaatgcatcctttactttgaatgagctctattcggttgcatgttatatgtgatttccttcctcccaactgtttccactgagcgcacccagtctcccctagtcttcctctgtgggtgtgatttttgtgatttttacaaacaaaacccttgaagttcttggcagatgtgtttgtttctgtttgcatgtactgcagataccccaggacaagcgggggattcatttttcagccattcagttgtttcctcaataatccgcagcaaagtgaaaatattcttagcactcagactgtacttagagtgttttctcagtccagtctgtacagtctgtaggcagaaggcctcagaagaaagtcatggccactcagtgcccactgtgggctttgtaagtcctggctctcccgtcaaggttacccagaggtaaaagcttcctgggagtggggccaggtgtgtttggcactccagatagaaggcaaaatgctcagattcgggcctgtgcacttgtatgcaacctgtcggtcgatacctagcatttatttttccctgacaatgaacgacctttccctcacccaccctaagctcaaagagtttagcaaaattctcttttaaataaacagaatgccagtaagaggttgacccctaccatggaacttctgggatgctaaatacttcctcatgaacaaaataagttccttattataagttccttatactagcagcttcacctaaagaattttctctccagcaatattgacttcactggggaaaagccaagagtgtgtggtgagtgatttgttctcactcgacctggctaggactggctaggagctgttttttgtacatgagggaatttgggctttcctcagttatctgaatgttttacccaagtgccttcctgctattgtagcaaagtagctcagcttccttgtccacagggtgaaaaaggactaatgcattttccatcagttttctaactatgttagcaaaaacggcctcctggtagctcaacctcctgtacgcgtgtgtgtgtgtaatacacacacaaataaacccctctgtttttctaagacatcttagctggatattataggaagcactttcataaacaactgtaacaaatcgcaaaggaaagagaaacaaaagcattagatttgagacataaacaggcaagagaaagtgtattaggaactgacagctatcaaggaagttttgtcagttacaaatgctaggaggaaattttgccaagaaggatggctcatgaaatatttccagtacgggaagaggcaataagatcctctaagagaatgagaaagtaggggtgtctaaatggtaaagatgggtgtgttgcacgtgtgttagaaggatctcagttgagtgaaggtttgcactgctacatctaagttaatgtaaatatgtagcactctgacaggtctaccgtgttgctgaatgtagtatatttccaaagtttgcaagtcttcctgtattgtacaaagatgctgctgcttgataatatgtatagcaatccagattagtatgttattaaattttattttcttacctgtatttttatgctttttacctgtcctcaaaatattacacccctgttggaattagatttatatttataaatggtcagaaatctttttaagtgtctctttttacacataggttgattttttttttcttaagagaaatgatgtattcttgaaacatttgttactcattccaggaaacaaaaacccatataataaaacccccactcagagcctgttagtcacctctctagaagatggcatctcaggagaaggaatggctttgtggaagaaggaatcacctttttcttgctcaagaattatgctgacttcagccctgagcctggatctggtcactgagaatcatcaagtgtctagatcctccccccaaaataactaatttagtaggtgattttgattttaaaaaattgacaccaaaaccctgcctgcattgtaatggaattcgaaaagaattcatgttcacagaactcaacgttcaggctaatatttacagaagggaccaaatctaaatcctggtagataactcctgtatgctttatccaaaggacacccacagttttccagcatagatataaccaaggatgaattgattccttcaaagaactgggaggcacggatattgcattttttgtttacatccagtagccaagacgcctcagtgagccagtcttgggcagaggctgtcacatttaggcagattggaagttggtatgttctaattctcactctggactacagtgaggctgaatttatcatgtcaaaaaaaaaaaaaaaaaaagacctttccaagtgctttctattgctcagaattgaaagaatgttttcatttcaagtttacaagaggcatggatggagttgtgacgttcttgacaagctgggctaacctttcccgaacttgtttcccggaggcaaggtgctcggtgacccagcgcatcttaaccttgggtctcctaggctcgaggctagggcattacgtttcgtggaaccaaagcagccaattgcatagcaagtattttcctgcattccaattaaatgcttaagaaaaagcagcatcctataaaattgtgatcataaacatccatttccctcagcttttgtgagtgccttgacttacagccaacatcactgtttaactcagtctgtttaaaaacaaacttttctggtggttgataacagagagttgctccctgagccatcagggtcctgggagctggaagtgaaagggttattaacattctacctttatgcagctgttggctgaccagaataaactccctgctgagttcaagctttgaatggaatggatgcaaatgatgttgtttccattagagcaggtgctcacagcattctgattggcctgagcagaccgaggctatggctgttgggacaagcttagcatcctggacatcttgtcaaagaacctcactcacccctctggcctctacagccctcagaggagagaaaaccaattctccaacaaacaggtctctccaacatggtggtgctggcaggcttaggtttagaaaatcctgactgttaaaggcgtttgaatacatcacattcctatgcaaatgtttttaatctccagtttaatgtagtttatttttcctatatgtaaagtatttttatacggcttgtatcatgatagtttagcaataaaacagttggaagcaaaaaaaaaaaaaaaaaaaaaaaaaaaaaaaaaaaaaaaaaaaaaaaaaaaaaaaacaccccccttttttttttaggggggcccggggcggggagaggagggggggcaccacacaggggacccccggggcccggggaaaagggggggggggggggccccccccccaaagcgccccccccagggggggcgccggataca

SEQ ID NO: 440550 - DNA, 3523 bp, Homo sapiens
cttttccgtaaagcggtggagaatctcaagcatgtgcatttaattgaggaatagcagaagggctaaagcaaccaagaaaagaagtgtgggtatttttgttaagtaaaacagcccaagtgcttctggaggtgggtttctaccaagatagaggaaaagggctgaattccctctaagtgggacagccgagctcaggatgtgcttcccagcttcactggttaatttgacctgaacctatttaaagatcccttctgcccctgaagacctatccgcactcaaattctaacatgaagaaatctactcgaatgcatcctttactttgaatgagctctattcggttgcatgttatatgtgatttccttcctcccaactgtttccactgagcgcacccagtctcccctagtcttcctctgtgggtgtgatttttgtgatttttacaaacaaaacccttgaagttcttggcagatgtgtttgtttctgtttgcatgtactgcagataccccaggacaagcgggggattcatttttcagccattcagttgtttcctcaataatccgcagcaaagtgaaaatattcttagcactcagactgtacttagagtgttttctcagtccagtctgtacagtctgtaggcagaaggcctcagaagaaagtcatggccactcagtgcccactgtgggctttgtaagtcctggctctcccgtcaaggttacccagaggtaaaagcttcctgggagtggggccaggtgtgtttggcactccagatagaaggcaaaatgctcagattcgggcctgtgcacttgtatgcaacctgtcggtcgatacctagcatttatttttccctgacaatgaacgacctttccctcacccaccctaagctcaaagagtttagcaaaattctcttttaaataaacagaatgccagtaagaggttgacccctaccatggaacttctgggatgctaaatacttcctcatgaacaaaataagttccttattataagttccttatactagcagcttcacctaaagaattttctctccagcaatattgacttcactggggaaaagccaagagtgtgtggtgagtgatttgttctcactcgacctggctaggactggctaggagctgttttttgtacatgagggaatttgggctttcctcagttatctgaatgttttacccaagtgccttcctgctattgtagcaaagtagctcagcttccttgtccacagggtgaaaaaggactaatgcattttccatcagttttctaactatgttagcaaaaacggcctcctggtagctcaacctcctgtacgcgtgtgtgtgtgtaatacacacacaaataaacccctctgtttttctaagacatcttagctggatattataggaagcactttcataaacaactgtaacaaatcgcaaaggaaagagaaacaaaagcattagatttgagacataaacaggcaagagaaagtgtattaggaactgacagctatcaaggaagttttgtcagttacaaatgctaggaggaaattttgccaagaaggatggctcatgaaatatttccagtacgggaagaggcaataagatcctctaagagaatgagaaagtaggggtgtctaaatggtaaagatgggtgtgttgcacgtgtgttagaaggatctcagttgagtgaaggtttgcactgctacatctaagttaatgtaaatatgtagcactctgacaggtctaccgtgttgctgaatgtagtatatttccaaagtttgcaagtcttcctgtattgtacaaagatgctgctgcttgataatatgtatagcaatccagattagtatgttattaaattttattttcttacctgtatttttatgctttttacctgtcctcaaaatattacacccctgttggaattagatttatatttataaatggtcagaaatctttttaagtgtctctttttacacataggttgattttttttttcttaagagaaatgatgtattcttgaaacatttgttactcattccaggaaacaaaaacccatataataaaacccccactcagagcctgttagtcacctctctagaagatggcatctcaggagaaggaatggctttgtggaagaaggaatcacctttttcttgctcaagaattatgctgacttcagccctgagcctggatctggtcactgagaatcatcaagtgtctagatcctccccccaaaataactaatttagtaggtgattttgattttaaaaaattgacaccaaaaccctgcctgcattgtaatggaattcgaaaagaattcatgttcacagaactcaacgttcaggctaatatttacagaagggaccaaatctaaatcctggtagataactcctgtatgctttatccaaaggacacccacagttttccagcatagatataaccaaggatgaattgattccttcaaagaactgggaggcacggatattgcattttttgtttacatccagtagccaagacgcctcagtgagccagtcttgggcagaggctgtcacatttaggcagattggaagttggtatgttctaattctcactctggactacagtgaggctgaatttatcatgtcaaaaaaaaaaaaaaaaaaagacctttccaagtgctttctattgctcagaattgaaagaatgttttcatttcaagtttacaagaggcatggatggagttgtgacgttcttgacaagctgggctaacctttcccgaacttgtttcccggaggcaaggtgctcggtgacccagcgcatcttaaccttgggtctcctaggctcgaggctagggcattacgtttcgtggaaccaaagcagccaattgcatagcaagtattttcctgcattccaattaaatgcttaagaaaaagcagcatcctataaaattgtgatcataaacatccatttccctcagcttttgtgagtgccttgacttacagccaacatcactgtttaactcagtctgtttaaaaacaaacttttctggtggttgataacagagagttgctccctgagccatcagggtcctgggagctggaagtgaaagggttattaacattctacctttatgcagctgttggctgaccagaataaactccctgctgagttcaagctttgaatggaatggatgcaaatgatgttgtttccattagagcaggtgctcacagcattctgattggcctgagcagaccgaggctatggctgttgggacaagcttagcatcctggacatcttgtcaaagaacctcactcacccctctggcctctacagccctcagaggagagaaaaccaattctccaacaaacaggtctctccaacatggtggtgctggcaggcttaggtttagaaaatcctgactgttaaaggcgtttgaatacatcacattcctatgcaaatgtttttaatctccagtttaatgtagtttatttttcctatatgtaaagtatttttatacggcttgtatcatgatagtttagcaataaaacagttggaagcaa

SEQ ID NO: 440551 - DNA, 549 bp, Homo sapiens
acaacagagaagctcagtaagagtaaaggatgttggaaagaaaccaatagggaatagattgaagatgtggaaggatgacagatgaagcagaatttcacaggagatgggaggggaagaagtcatcagctcaggtggagattctggtcttgaacaggaggagtaaccattatctcctaaaactggagatggaggaagggagccatgagtcaaggaatgaggcagcttgaaaacctgggaatggccttcagcatacagccaacaagaaaacaagggcctcagttctacagccggaaagaactgaattctgccaacagcctgcatgaatcacttgaaaaactgactgttgatgggaatgaactgagttttttcccccatggaattttgaagcttaacctgacaaaaattcagtttgagaataatttcactcatccttgtttttggagagataattatttgaataatccacaacaacttactcaaattatttctttgttcattgtccaaaataaactacataaattttatgataagaacagtagaagttcagaa

SEQ ID NO: 440552 - DNA, 641 bp, Homo sapiens
tgaactttgagttgatgctgtaaaggttaacctttcgggaaattgagataagtgaatgtattttgcatgtgggatagatgtgaatctttagggatgaactgtgatagggcgaataatggtccccaaagatgttcatattctaccagaacatgtgaatatgttatattacatggcaaagggaaattaagtttggagatgaaattaagggttctaatcagctgatcttaaagtagggagattattctggattagttgagtggtcccaatcaaatcacatgagctcttaaaaatggaagggggatgcagaagcatttgtcagagagataccacctgaggacttgacttgcttttgttggttttgaagatggaggaagggagccatgagtcaaggaatgaggcagcttgaaaacctgggaatggccttcagcatacagccaacaagaaaacaagggcctcagttctacagccggaaagaactgaattctgccaacagcctgcatgagtaagaaaacagattctccctagagcctccagatagcaatgcagtcctgctgatgccttaattttagtagagtgagacctttgcagacttctgacctatataactataattaataaatctgagttgttgtacgccactg

SEQ ID NO: 440553 - DNA, 387 bp, Homo sapiens
taggtctcaccaaaactgaaaaaatagaatcagagatacacgttgtacgtggtgaaggttttaagactgttgcagcaacacgatatgaaacaataacagccatgaccaacctggccatagtaaactgtcaagtatatgggagaaatgcacttaatctgaagatcacttgaaaaactgactgttgatgggaatgaactgagttttttcccccatggaattttgaagcttaacctgacaaaaattcagtttgagaataatttcactcatccttgtttttggagagataattatttgaataatccacaacaacttactcaaattatttctttgttcattgtccaaaataaactacataaattttatgataagaacagtagaagttcagaa

SEQ ID NO: 440554 - DNA, 812 bp, Homo sapiens
tgaactttgagttgatgctgtaaaggttaacctttcgggaaattgagataagtgaatgtattttgcatgtgggatagatgtgaatctttagggatgaactgtgatagggcgaataatggtccccaaagatgttcatattctaccagaacatgtgaatatgttatattacatggcaaagggaaattaagtttggagatgaaattaagggttctaatcagctgatcttaaagtagggagattattctggattagttgagtggtcccaatcaaatcacatgagctcttaaaaatggaagggggatgcagaagcatttgtcagagagataccacctgaggacttgacttgcttttgttggttttgaagatggaggaagggagccatgagtcaaggaatgaggcagcttgaaaacctgggaatggccttcagcatacagccaacaagaaaacaagggcctcagttctacagccggaaagaactgaattctgccaacagcctgcatgagttattttccttgtcttatcttgaagaacttgatgtttcctataatgaacttacttttattccaaatgaaattcagaaactcagatcacttgaaaaactgactgttgatgggaatgaactgagttttttcccccatggaattttgaagcttaacctgacaaaaattcagtttgagaataatttcactcatccttgtttttggagagataattatttgaataatccacaacaacttactcaaattatttctttgttcattgtccaaaataaactacataaattttatgataagaacagtagaagttcagaa

SEQ ID NO: 440555 - DNA, 462 bp, Homo sapiens
acaacagagaagctcagtaagagtaaaggatgttggaaagaaaccaatagggaatagattgaagatgtggaaggatgacagatgaagcagaatttcacaggagatgggaggggaagaagtcatcagctcaggtggagattctggtcttgaacaggaggagtaaccattatctcctaaaactggagatggaggaagggagccatgagtcaaggaatgaggcagcttgaaaacctgggaatggccttcagcatacagccaacaagaaaacaagggcctcagttctacagccggaaagaactgaattctgccaacagcctgcatgagtaagaaaacagattctccctagagcctccagatagcaatgcagtcctgctgatgccttaattttagtagagtgagacctttgcagacttctgacctatataactataattaataaatctgagttgttgtacgccactg

SEQ ID NO: 440556 - DNA, 3549 bp, Homo sapiens
  misc_feature (3288)..(3288): n is a, c, g, or t
  misc_feature (3302)..(3304): n is a, c, g, or t
  misc_feature (3306)..(3306): n is a, c, g, or t
  misc_feature (3324)..(3325): n is a, c, g, or t
  misc_feature (3332)..(3333): n is a, c, g, or t
  misc_feature (3347)..(3347): n is a, c, g, or t
  misc_feature (3352)..(3353): n is a, c, g, or t
  misc_feature (3358)..(3358): n is a, c, g, or t
  misc_feature (3361)..(3361): n is a, c, g, or t
  misc_feature (3365)..(3368): n is a, c, g, or t
  misc_feature (3377)..(3377): n is a, c, g, or t
  misc_feature (3379)..(3379): n is a, c, g, or t
  misc_feature (3382)..(3382): n is a, c, g, or t
  misc_feature (3386)..(3387): n is a, c, g, or t
  misc_feature (3394)..(3395): n is a, c, g, or t
  misc_feature (3403)..(3403): n is a, c, g, or t
  misc_feature (3414)..(3414): n is a, c, g, or t
  misc_feature (3420)..(3422): n is a, c, g, or t
  misc_feature (3424)..(3424): n is a, c, g, or t
  misc_feature (3429)..(3430): n is a, c, g, or t
  misc_feature (3433)..(3433): n is a, c, g, or t
  misc_feature (3436)..(3436): n is a, c, g, or t
  misc_feature (3439)..(3439): n is a, c, g, or t
  misc_feature (3441)..(3441): n is a, c, g, or t
  misc_feature (3461)..(3461): n is a, c, g, or t
  misc_feature (3464)..(3465): n is a, c, g, or t
  misc_feature (3474)..(3475): n is a, c, g, or t
  misc_feature (3481)..(3482): n is a, c, g, or t
  misc_feature (3487)..(3487): n is a, c, g, or t
  misc_feature (3491)..(3491): n is a, c, g, or t
  misc_feature (3498)..(3498): n is a, c, g, or t
  misc_feature (3500)..(3500): n is a, c, g, or t
  misc_feature (3502)..(3502): n is a, c, g, or t
  misc_feature (3504)..(3504): n is a, c, g, or t
  misc_feature (3516)..(3516): n is a, c, g, or t
  misc_feature (3521)..(3521): n is a, c, g, or t
  misc_feature (3528)..(3529): n is a, c, g, or t
  misc_feature (3535)..(3537): n is a, c, g, or t
  misc_feature (3540)..(3540): n is a, c, g, or t
  misc_feature (3542)..(3542): n is a, c, g, or t
agcgggtttgtttttgaatctgcggaggcggcggcggtggcagcggcggcgcggcgactgaagcgcgcgaaaagctgaggcggcaacgtcggggacggctgcgcgggacggctctgtaggaaggaacttggttccccctccctcagcttccgccccaaaagattcagaatggacagtttagaagaacctcagaaaaaagtctttaaggctcgaaaaacgatgagagtgagtgatcgtcagcaacttgaagcagtgtacaaggtcaaagaagaactgttgaaaactgatgtcaagctgttaaatggcaaccatgaaaatggagatttggacccaacctcacctttggaaaacatggattacattaaagacaaggaagaggtgaatggcattgaagagatttgttttgatcctgaaggaagtaaagcagaatggaaggaaacaccctgtatcctaagtgttaatgtaaaaaacaagcaggatgatgatttaaattgtgaacctttgtctccccataatataactccagaaccagtctctaaactgcctgctgaaccagtttctggtgatccagcccctggtgatctggatgccggagatccagcctccggagtactggcctctggtgattccacctctggtgatcccacctctagcgagccctcctctagtgatgctgcctctggtgatgcaacctctggtgatgccccttctggtgatgtgtcccctggtgatgccacctctggtgatgccactgctgatgatctctcctctggtgatcccacctctagtgatcccatcccaggtgaaccggtccctgttgaacccatttctggtgattgtgccgctgatgatatagcctctagtgaaataacttctgttgatctggcttctggagcaccagcttccactgatccagcctctgatgatctggcctctggtgatctatcctctagtgaactggcctctgatgatctggccactggtgaactggcctctgatgagctgacttctgaatcaacctttgatcgtacctttgaaccaaagtctgtaccagtttgtgaaccagttcctgaaattgacaatatagaaccaagtagcaataaagatgatgattttcttgaaaaaaatggagctgatgaaaaattagagcaaattcagagtaaagactcattggatgagaaaaataaagctgataataatattgatgctaatgaagaaactctagaaacagatgatacaactatttgttcagatcgacctcctgaaaatgaaaagaaggtagaggaagatattatcacagagcttgctcttggagaagatgctatatctagcagtatggaaattgaccaaggtgaaaagaatgaagatgaaacttctgcagatcttgtagaaacgattaatgaaaatgttattgaagataacaaaagtgagaatatcttagaaaatacagactctatggagacagatgaaatcattcctattttggaaaagcttgcaccttctgaggatgaacttacttgcttttctaaaacatctctccttccaatcgatgagacaaatccagatttggaagagaaaatggaaagttcttttggttcaccatctaaacaagaaagtagtgagagtttgccaaaagaagcctttctggtcctctctgatgaagaggatatttcgggtgaaaaagatgagtctgaagttatatcgcaaaatgaaacgtgctctccagcagaagtagaaagtaatgaaaaggacaacagacctgaggaagaagagcaagtaatacatgaagatgatgaaagaccttctgagaaaaatgaattttctagacgaaaacgttctaaatcagaagacatggacaatgtacagtctaaacgtcgtcgatatatggaagaagaatatgaggcagaatttcaagtaaagattacagccaaaggagacattaaccagaaacttcaaaaggttatacagtggttgctggaagaaaaattgtgtgcgctgcagtgtgctgtatttgataagactttggcagaattgaaaacacgagtggaaaagattgaatgtaacaagaggcataaaacagttctcactgaactacaggccaagatagccaggttaaccaaacgctttgaagcagccaaagaagatcttaagaaaagacatgaacatccacccaacccaccagtatcaccaggaaaaactgtaaatgatgtcaacagcaataataacatgtcttacagaaatgcaggcacagtgagacagatgctggagtccaaaagaaatgtaagcgagagtgcaccaccatcctttcaaactcctgtgaatacagtatcttcaaccaatcttgtcactcctccagcagttgtcagtagtcaacctaaattgcagactccagtgacttcgggttccctcacagcaacgtcagttcttcctgcacccaatacagctactgtagttgctactactcaggtgcctagtggaaatccccagcctacaatctctttacagcctttgccagtgattttgcatgtacctgttgcagtatcctcccagcctcagcttctacagagccatccagggactttggtgactaatcaaccatctggcaatgttgaattcatttctgtgcaaagcccacctacagtgagtggtcttaccaaaaatccagtatccttgccatccttgccaaatcccactaaaccaaacaacgttccttctgtgcccagtcctagtattcaaaggaaccctactgccagtgctgcaccattgggaacaacacttgctgtgcaggctgttccaacagcacactctattgtacaagccacaaggacttctttacccacagtgggcccatcaggactctatagtccatcaactaatcgaggtcctatacagatgaaaattccaatttctgcatttagtacttcgtctgctgcagaacagaacagcaataccaccccaagaattgaaaaccagacaaacaaaacaatagatgcttctgtcagtaagaaagcagctgatagcacatcacagtgtggaaaagccactggcagtgattcaagtggtgtcattgatctcacaatggatgatgaagagagtggagcttcacaaggtacttcaatagtaattgtactaagcaacgttttgataccattttttttgtcttaatacggtacagtattctacaaagacagatgtttatggcattatgcttggtttatttgtgttctttttggaatggaagttttttagattagaattttaaaatttggccaggtgcagtgtctcacncctgtaatcccagnnntntgggaggccaaggcaggnngatcacnngaggtcaggagttngagannagccnggncaannnngtgaaaccncntcnctannaaaaatnnaaaaattngctgggtgtgntggcannngnctgtnntcncanctncntgggaggctgaggcaggagnatnncttgagccnnggaggnngaggntgcngtgagcngngntnatgccactgcantccancctgggnnacagannnagncnctgtctc

SEQ ID NO: 440557 - DNA, 7965 bp, Homo sapiens
agcgggtttgtttttgaatctgcggaggcggcggcggtggcagcggcggcgcggcgactgaagcgcgcgaaaagctgaggcggcaacgtcggggacggctgcgcgggacggctctgtaggaaggaacttggttccccctccctcagcttccgccccaaaagattcagaatggacagtttagaagaacctcagaaaaaagtctttaaggctcgaaaaacgatgagagtgagtgatcgtcagcaacttgaagcagtgtacaaggtcaaagaagaactgttgaaaactgatgtcaagctgttaaatggcaaccatgaaaatggagatttggacccaacctcacctttggaaaacatggattacattaaagacaaggaagaggtgaatggcattgaagagatttgttttgatcctgaaggaagtaaagcagaatggaaggaaacaccctgtatcctaagtgttaatgtaaaaaacaagcaggatgatgatttaaattgtgaacctttgtctccccataatataactccagaaccagtctctaaactgcctgctgaaccagtttctggtgatccagcccctggtgatctggatgccggagatccagcctccggagtactggcctctggtgattccacctctggtgatcccacctctagcgagccctcctctagtgatgctgcctctggtgatgcaacctctggtgatgccccttctggtgatgtgtcccctggtgatgccacctctggtgatgccactgctgatgatctctcctctggtgatcccacctctagtgatcccatcccaggtgaaccggtccctgttgaacccatttctggtgattgtgccgctgatgatatagcctctagtgaaataacttctgttgatctggcttctggagcaccagcttccactgatccagcctctgatgatctggcctctggtgatctatcctctagtgaactggcctctgatgatctggccactggtgaactggcctctgatgagctgacttctgaatcaacctttgatcgtacctttgaaccaaagtctgtaccagtttgtgaaccagttcctgaaattgacaatatagaaccaagtagcaataaagatgatgattttcttgaaaaaaatggagctgatgaaaaattagagcaaattcagagtaaagactcattggatgagaaaaataaagctgataataatattgatgctaatgaagaaactctagaaacagatgatacaactatttgttcagatcgacctcctgaaaatgaaaagaaggtagaggaagatattatcacagagcttgctcttggagaagatgctatatctagcagtatggaaattgaccaaggtgaaaagaatgaagatgaaacttctgcagatcttgtagaaacgattaatgaaaatgttattgaagataacaaaagtgagaatatcttagaaaatacagactctatggagacagatgaaatcattcctattttggaaaagcttgcaccttctgaggatgaacttacttgcttttctaaaacatctctccttccaatcgatgagacaaatccagatttggaagagaaaatggaaagttcttttggttcaccatctaaacaagaaagtagtgagagtttgccaaaagaagcctttctggtcctctctgatgaagaggatatttcgggtgaaaaagatgagtctgaagttatatcgcaaaatgaaacgtgctctccagcagaagtagaaagtaatgaaaaggacaacagacctgaggaagaagagcaagtaatacatgaagatgatgaaagaccttctgagaaaaatgaattttctagacgaaaacgttctaaatcagaagacatggacaatgtacagtctaaacgtcgtcgatatatggaagaagaatatgaggcagaatttcaagtaaagattacagccaaaggagacattaaccagaaacttcaaaaggttatacagtggttgctggaagaaaaattgtgtgcgctgcagtgtgctgtatttgataagactttggcagaattgaaaacacgagtggaaaagattgaatgtaacaagaggcataaaacagttctcactgaactacaggccaagatagccaggttaaccaaacgctttgaagcagccaaagaagatcttaagaaaagacatgaacatccacccaacccaccagtatcaccaggaaaaactgtaaatgatgtcaacagcaataataacatgtcttacagaaatgcaggcacagtgagacagatgctggagtccaaaagaaatgtaagcgagagtgcaccaccatcctttcaaactcctgtgaatacagtatcttcaaccaatcttgtcactcctccagcagttgtcagtagtcaacctaaattgcagactccagtgacttcgggttccctcacagcaacgtcagttcttcctgcacccaatacagctactgtagttgctactactcaggtgcctagtggaaatccccagcctacaatctctttacagcctttgccagtgattttgcatgtacctgttgcagtatcctcccagcctcagcttctacagagccatccagggactttggtgactaatcaaccatctggcaatgttgaattcatttctgtgcaaagcccacctacagtgagtggtcttaccaaaaatccagtatccttgccatccttgccaaatcccactaaaccaaacaacgttccttctgtgcccagtcctagtattcaaaggaaccctactgccagtgctgcaccattgggaacaacacttgctgtgcaggctgttccaacagcacactctattgtacaagccacaaggacttctttacccacagtgggcccatcaggactctatagtccatcaactaatcgaggtcctatacagatgaaaattccaatttctgcatttagtacttcgtctgctgcagaacagaacagcaataccaccccaagaattgaaaaccagacaaacaaaacaatagatgcttctgtcagtaagaaagcagctgatagcacatcacagtgtggaaaagccactggcagtgattcaagtggtgtcattgatctcacaatggatgatgaagagagtggagcttcacaagaccccaaaaaactaaatcacactcctgtatcaaccatgagttcttctcagcctgtgtcacgaccattgcaacccatacaaccagcaccgcctcttcaaccatctggggtgccaacaagtggaccatctcagaccaccatacacttactacctacagctccaactaccgtgaatgtaacacatcgtccagtaactcaggtgaccacaagactccctgtaccaagagctcctgcaaaccaccaggtggtttatacaactcttcctgcaccaccagctcaggctcccttgcgaggaactgttatgcaggctcctgctgttcggcaggtcaatccccaaaatagtgttacagttcgagtgcctcaaacaaccacatatgttgtaaacaatggactaaccctgggatcaacaggacctcagctcacagtgcatcaccgaccaccacaagtgcatactgagcccccacgccccgtgcacccagcacccttaccagaagctccacaaccacagcgtctgcccccagaagctgccagcacatctctgcctcagaagccacacttgaagttagcacgcgttcagagtcaaaatggcatagtactgtcatggagtgtcctggaggtggatcgaagctgtgccactgttgatagctaccatctctatgcttaccatgaggaacccagtgccactgtgccctcacaatggaaaaagattggggaagtcaaggcacttcccttgcccatggcatgtactctcacccagtttgtatctggtagcaaatactactttgcagtacgagccaaggatatttatggacgttttgggcctttctgtgatcctcagtcaacagatgtgatctcttctacccagagcagttaaaccttggagcctttatattttcctcttttaaaatttccaccttttggtcttgtttttaatcttgtgcatgataccccatgtaaaatccaccttgtgcaagatttcttggacagatgtgtgtatacactacatttgtttataaccagaagcaaaataaactcagcccacaaagctagaatcttttcctggacagtttaggctttggggtttggaaatgtaaatgtgtaccttgctttagttttgaggctggggaatatgtgtgggtgtttatgtgtgtttttccttatgtaggtgttattgcattggagtctcccattttcattctcaaatttacctcttaaagtacgaagtaagtagatcaaaggatttgagatgtgtaactggcatgattctgcttttgaaggatctatagtatcattttagttaagtgggtcaaacagaatcaaaacaaaacccaaagaaataaataaaaaacaaaatggctaaatagtttaaaataggttaattcgaacacaggaaaggatctatttgttgtttcttttgtctggtctcctgagttgttaattaggtgaaaaaagatctgcaatggccccctccctttcctaatctggcttttacatttattttgtgccttaaagattaactacaaagataaacatggccaaaaataaataaataaatatggccatatgtccgttgttgcttagtcttcccttgcagccttttacccttgatttctccttcatctctaccaaatatagcacaactcctcaagtaattttttttttttaagatggagttttgctcttgttgcagtgagctgagattgcgccattgcactccatcctgggagacaagagcgaaactctgcctcaaaaaaaaaaagaatttaaagtatatcctttgaggtcattttatgtaacaattagatataacctcctgtgtatctctctgttcctcttcaaagttattaaaattcagcttaggtcatggatttttaatatgagggccagctgtactggtgtcaggtaggtgttttggggtgtagataatttaggactggagggctgagttaagttttaggaggagaatgtggttgagaatattttgaaaggaatttatggagtttgtgaaataacttcgaagtcctcttcctttacaatatttgaattcatatttgtaccttctcaaaatagtgattcatttttcctagaattacaggagggagctcttttactaatgttgttttgtttgcaactttgatggcttataataggaagtattctagttgtaaagaaaactctttagagacttttgactggtcagtatactgaggtgtgagatttgattcatgatgaagaaagcctatagattgccaaaaaattaattctccaaaccacctttcactctcagaaaatgagaccacaaaggagtatgctataaatcaaatttgccaaccaattatgtagatattactcattctaggactaatgatgatggtaaagaagttgccagtgttatggcaatgaaaatttcagaaaggaggagttgatgatcttctagatgtatatgaacacctgtctatatctgcatgtatatgttttgacctgcagtggttgcaatgttgatatgtgttcaagattattcctgtctacaaaactgaaggcccatgttcaaattgttctttattgggtgtttttatggtcacgtggtaacaattttcttacctaacctacaaaaggttctcttgatgaacatttttatttatatttactaatcttttttaaaaaaagctttcatagcattatataatcagatgaagaaagcccagtagaataaaaaaaaaattcattagcctagcctatattatgttttctgtcaaaggaaaacaaattctcaaataggaattctaaaaatatttactaaagtaaaataactacttaaaatgttttattccagttgggaaggaagggtacagggagaaatcgcaattatttaggggagaagtatatttattataagatggtgtcctcaaattagcctaccatggcacgtaggggcagcagctatattagatttactagaggtgctaagttagaacactaggcttttattgaggcaggttttaatattgatagatgctttttgtttggtttgtttcttctgggagagaatggaggacttaagtagaagtagctactgataacagactttctagtagcagtttccactccacggttacctttttagtttcatagtatcttttcacaaagtattacaaataagctagattctcccagtttgggaatgcaagtttgctacatttttagcctggcaatatttgtgtaggtattgccttattggaaattctggaaacctgatactgcaacctgcaatgtaggatgtttgtatggcatttaaaggtaatggtgatgtttattattctatactttgcattctgtgagagtaattttcactctgtcttaagtgtgagtaagcctcttctaaaaatcttgttcttgccaagaaatttataaatcacatacgaagacgtctgttgctaacagttaactttatgaggtaactatatccttctatttctctggactcatttttaaaaaatatgccgaatactgcatactgtttaaggtagtatataagtttatgagagaagtggagagctttcttccttgaaaagtcggtatttgttgagataccatttgcctcacagagaggtgttccccactcccatccccattgccagataataaatattttgagaaaagtgacctaaaacagctgaaatcttaggtgcatctgtctgcagacctccttaagcaggctgtatcttacaattcccttactgcactgggtaagtgttaacttagtttttgttgtttgctcttttgctttaaatattctccaaattaccatttatgcaacatggttagggttaatactgcatggtattcatttatcttgtttcatgaactttccagtactgtacaaggtcaacaaagtaatgcctgtggtatcctcatctctcacttttttactctgtgattttagcacagtaaggtactgcaaagaccttccttccaaatgttctccttgactttatttcttgggccaattcagtatcctcaacatcctaagattttgttgttttatcactgacctgtggttggcctgttttattctaatttccagaaaagtcaagtcccagtatttgcaatatcaaataactctaaaaccgatgtgtgattctaccttccttactatttttactgggcaaatgccctatttttttaattattattatttttaacttttgggacacacaaaaatcagcaattctcatgaagcgtttgttagtgtggcagacttgtctaattcctgaaactcattcatccccttgagccagccaatggggaggaataggataatgcaaacacatgttttgttttctcattttcaaataatttaccatgttaaaataaacttttctttgttttttatttgtagagtcagctaagtacccatatttaaatgccgtctttattatttttttgaggtctttgtttttgtctgtttttgttttgttttgttttgtaaataaggtaactgggcaatcaaacaccttttggggattctggctttagtattttatcagccattttaaaattaaatataaaaatcctttgtaagaaacttgcatcctaatttttctttattgcaattgaaagtgtaaataataagacaatgtaagtaagaccttcctaatgtctaatacaaactgggctccagcaagtggccctatttttattagggttttgaaggtttgtgtgtgtgtgtgcgtgcgtgtgtgtgtttttcttttttaaatgtatagtagagtggtgtctgtataagtgttacctgtagtggggttttgtccagcaagcctgaaatttatactttgaaataaaactactgggtttttaa

SEQ ID NO: 440558 - DNA, 7978 bp, Homo sapiens
aagcaggctgttactggcccggagaggcgttatgcgtggcgggggcaagcggatggtgggcggttcgtacatgaagcgcgcgaaaagctgaggcggcaacgtcggggacggctgcgcgggacggctctgtaggaaggaacttggttccccctccctcagcttccgccccaaaagattcagaatggacagtttagaagaacctcagaaaaaagtctttaaggctcgaaaaacgatgagagtgagtgatcgtcagcaacttgaagcagtgtacaaggtcaaagaagaactgttgaaaactgatgtcaagctgttaaatggcaaccatgaaaatggagatttggacccaacctcacctttggaaaacatggattacattaaagacaaggaagaggtgaatggcattgaagagatttgttttgatcctgaaggaagtaaagcagaatggaaggaaacaccctgtatcctaagtgttaatgtaaaaaacaagcaggatgatgatttaaattgtgaacctttgtctccccataatataactccagaaccagtctctaaactgcctgctgaaccagtttctggtgatccagcccctggtgatctggatgccggagatccagcctccggagtactggcctctggtgattccacctctggtgatcccacctctagcgagccctcctctagtgatgctgcctctggtgatgcaacctctggtgatgccccttctggtgatgtgtcccctggtgatgccacctctggtgatgccactgctgatgatctctcctctggtgatcccacctctagtgatcccatcccaggtgaaccggtccctgttgaacccatttctggtgattgtgccgctgatgatatagcctctagtgaaataacttctgttgatctggcttctggagcaccagcttccactgatccagcctctgatgatctggcctctggtgatctatcctctagtgaactggcctctgatgatctggccactggtgaactggcctctgatgagctgacttctgaatcaacctttgatcgtacctttgaaccaaagtctgtaccagtttgtgaaccagttcctgaaattgacaatatagaaccaagtagcaataaagatgatgattttcttgaaaaaaatggagctgatgaaaaattagagcaaattcagagtaaagactcattggatgagaaaaataaagctgataataatattgatgctaatgaagaaactctagaaacagatgatacaactatttgttcagatcgacctcctgaaaatgaaaagaaggtagaggaagatattatcacagagcttgctcttggagaagatgctatatctagcagtatggaaattgaccaaggtgaaaagaatgaagatgaaacttctgcagatcttgtagaaacgattaatgaaaatgttattgaagataacaaaagtgagaatatcttagaaaatacagactctatggagacagatgaaatcattcctattttggaaaagcttgcaccttctgaggatgaacttacttgcttttctaaaacatctctccttccaatcgatgagacaaatccagatttggaagagaaaatggaaagttcttttggttcaccatctaaacaagaaagtagtgagagtttgccaaaagaagcctttctggtcctctctgatgaagaggatatttcgggtgaaaaagatgagtctgaagttatatcgcaaaatgaaacgtgctctccagcagaagtagaaagtaatgaaaaggacaacagacctgaggaagaagagcaagtaatacatgaagatgatgaaagaccttctgagaaaaatgaattttctagacgaaaacgttctaaatcagaagacatggacaatgtacagtctaaacgtcgtcgatatatggaagaagaatatgaggcagaatttcaagtaaagattacagccaaaggagacattaaccagaaacttcaaaaggttatacagtggttgctggaagaaaaattgtgtgcgctgcagtgtgctgtatttgataagactttggcagaattgaaaacacgagtggaaaagattgaatgtaacaagaggcataaaacagttctcactgaactacaggccaagatagccaggttaaccaaacgctttgaagcagccaaagaagatcttaagaaaagacatgaacatccacccaacccaccagtatcaccaggaaaaactgtaaatgatgtcaacagcaataataacatgtcttacagaaatgcaggcacagtgagacagatgctggagtccaaaagaaatgtaagcgagagtgcaccaccatcctttcaaactcctgtgaatacagtatcttcaaccaatcttgtcactcctccagcagttgtcagtagtcaacctaaattgcagactccagtgacttcgggttccctcacagcaacgtcagttcttcctgcacccaatacagctactgtagttgctactactcaggtgcctagtggaaatccccagcctacaatctctttacagcctttgccagtgattttgcatgtacctgttgcagtatcctcccagcctcagcttctacagagccatccagggactttggtgactaatcaaccatctggcaatgttgaattcatttctgtgcaaagcccacctacagtgagtggtcttaccaaaaatccagtatccttgccatccttgccaaatcccactaaaccaaacaacgttccttctgtgcccagtcctagtattcaaaggaaccctactgccagtgctgcaccattgggaacaacacttgctgtgcaggctgttccaacagcacactctattgtacaagccacaaggacttctttacccacagtgggcccatcaggactctatagtccatcaactaatcgaggtcctatacagatgaaaattccaatttctgcatttagtacttcgtctgctgcagaacagaacagcaataccaccccaagaattgaaaaccagacaaacaaaacaatagatgcttctgtcagtaagaaagcagctgatagcacatcacagtgtggaaaagccactggcagtgattcaagtggtgtcattgatctcacaatggatgatgaagagagtggagcttcacaagaccccaaaaaactaaatcacactcctgtatcaaccatgagttcttctcagcctgtgtcacgaccattgcaacccatacaaccagcaccgcctcttcaaccatctggggtgccaacaagtggaccatctcagaccaccatacacttactacctacagctccaactaccgtgaatgtaacacatcgtccagtaactcaggtgaccacaagactccctgtaccaagagctcctgcaaaccaccaggtggtttatacaactcttcctgcaccaccagctcaggctcccttgcgaggaactgttatgcaggctcctgctgttcggcaggtcaatccccaaaatagtgttacagttcgagtgcctcaaacaaccacatatgttgtaaacaatggactaaccctgggatcaacaggacctcagctcacagtgcatcaccgaccaccacaagtgcatactgagcccccacgccccgtgcacccagcacccttaccagaagctccacaaccacagcgtctgcccccagaagctgccagcacatctctgcctcagaagccacacttgaagttagcacgcgttcagagtcaaaatggcatagtactgtcatggagtgtcctggaggtggatcgaagctgtgccactgttgatagctaccatctctatgcttaccatgaggaacccagtgccactgtgccctcacaatggaaaaagattggggaagtcaaggcacttcccttgcccatggcatgtactctcacccagtttgtatctggtagcaaatactactttgcagtacgagccaaggatatttatggacgttttgggcctttctgtgatcctcagtcaacagatgtgatctcttctacccagagcagttaaaccttggagcctttatattttcctcttttaaaatttccaccttttggtcttgtttttaatcttgtgcatgataccccatgtaaaatccaccttgtgcaagatttcttggacagatgtgtgtatacactacatttgtttataaccagaagcaaaataaactcagcccacaaagctagaatcttttcctggacagtttaggctttggggtttggaaatgtaaatgtgtaccttgctttagttttgaggctggggaatatgtgtgggtgtttatgtgtgtttttccttatgtaggtgttattgcattggagtctcccattttcattctcaaatttacctcttaaagtacgaagtaagtagatcaaaggatttgagatgtgtaactggcatgattctgcttttgaaggatctatagtatcattttagttaagtgggtcaaacagaatcaaaacaaaacccaaagaaataaataaaaaacaaaatggctaaatagtttaaaataggttaattcgaacacaggaaaggatctatttgttgtttcttttgtctggtctcctgagttgttaattaggtgaaaaaagatctgcaatggccccctccctttcctaatctggcttttacatttattttgtgccttaaagattaactacaaagataaacatggccaaaaataaataaataaatatggccatatgtccgttgttgcttagtcttcccttgcagccttttacccttgatttctccttcatctctaccaaatatagcacaactcctcaagtaattttttttttttaagatggagttttgctcttgttgcagtgagctgagattgcgccattgcactccatcctgggagacaagagcgaaactctgcctcaaaaaaaaaaagaatttaaagtatatcctttgaggtcattttatgtaacaattagatataacctcctgtgtatctctctgttcctcttcaaagttattaaaattcagcttaggtcatggatttttaatatgagggccagctgtactggtgtcaggtaggtgttttggggtgtagataatttaggactggagggctgagttaagttttaggaggagaatgtggttgagaatattttgaaaggaatttatggagtttgtgaaataacttcgaagtcctcttcctttacaatatttgaattcatatttgtaccttctcaaaatagtgattcatttttcctagaattacaggagggagctcttttactaatgttgttttgtttgcaactttgatggcttataataggaagtattctagttgtaaagaaaactctttagagacttttgactggtcagtatactgaggtgtgagatttgattcatgatgaagaaagcctatagattgccaaaaaattaattctccaaaccacctttcactctcagaaaatgagaccacaaaggagtatgctataaatcaaatttgccaaccaattatgtagatattactcattctaggactaatgatgatggtaaagaagttgccagtgttatggcaatgaaaatttcagaaaggaggagttgatgatcttctagatgtatatgaacacctgtctatatctgcatgtatatgttttgacctgcagtggttgcaatgttgatatgtgttcaagattattcctgtctacaaaactgaaggcccatgttcaaattgttctttattgggtgtttttatggtcacgtggtaacaattttcttacctaacctacaaaaggttctcttgatgaacatttttatttatatttactaatcttttttaaaaaaagctttcatagcattatataatcagatgaagaaagcccagtagaataaaaaaaaaattcattagcctagcctatattatgttttctgtcaaaggaaaacaaattctcaaataggaattctaaaaatatttactaaagtaaaataactacttaaaatgttttattccagttgggaaggaagggtacagggagaaatcgcaattatttaggggagaagtatatttattataagatggtgtcctcaaattagcctaccatggcacgtaggggcagcagctatattagatttactagaggtgctaagttagaacactaggcttttattgaggcaggttttaatattgatagatgctttttgtttggtttgtttcttctgggagagaatggaggacttaagtagaagtagctactgataacagactttctagtagcagtttccactccacggttacctttttagtttcatagtatcttttcacaaagtattacaaataagctagattctcccagtttgggaatgcaagtttgctacatttttagcctggcaatatttgtgtaggtattgccttattggaaattctggaaacctgatactgcaacctgcaatgtaggatgtttgtatggcatttaaaggtaatggtgatgtttattattctatactttgcattctgtgagagtaattttcactctgtcttaagtgtgagtaagcctcttctaaaaatcttgttcttgccaagaaatttataaatcacatacgaagacgtctgttgctaacagttaactttatgaggtaactatatccttctatttctctggactcatttttaaaaaatatgccgaatactgcatactgtttaaggtagtatataagtttatgagagaagtggagagctttcttccttgaaaagtcggtatttgttgagataccatttgcctcacagagaggtgttccccactcccatccccattgccagataataaatattttgagaaaagtgacctaaaacagctgaaatcttaggtgcatctgtctgcagacctccttaagcaggctgtatcttacaattcccttactgcactgggtaagtgttaacttagtttttgttgtttgctcttttgctttaaatattctccaaattaccatttatgcaacatggttagggttaatactgcatggtattcatttatcttgtttcatgaactttccagtactgtacaaggtcaacaaagtaatgcctgtggtatcctcatctctcacttttttactctgtgattttagcacagtaaggtactgcaaagaccttccttccaaatgttctccttgactttatttcttgggccaattcagtatcctcaacatcctaagattttgttgttttatcactgacctgtggttggcctgttttattctaatttccagaaaagtcaagtcccagtatttgcaatatcaaataactctaaaaccgatgtgtgattctaccttccttactatttttactgggcaaatgccctatttttttaattattattatttttaacttttgggacacacaaaaatcagcaattctcatgaagcgtttgttagtgtggcagacttgtctaattcctgaaactcattcatccccttgagccagccaatggggaggaataggataatgcaaacacatgttttgttttctcattttcaaataatttaccatgttaaaataaacttttctttgttttttatttgtagagtcagctaagtacccatatttaaatgccgtctttattatttttttgaggtctttgtttttgtctgtttttgttttgttttgttttgtaaataaggtaactgggcaatcaaacaccttttggggattctggctttagtattttatcagccattttaaaattaaatataaaaatcctttgtaagaaacttgcatcctaatttttctttattgcaattgaaagtgtaaataataagacaatgtaagtaagaccttcctaatgtctaatacaaactgggctccagcaagtggccctatttttattagggttttgaaggtttgtgtgtgtgtgtgcgtgcgtgtgtgtgtttttcttttttaaatgtatagtagagtggtgtctgtataagtgttacctgtagtggggttttgtccagcaagcctgaaatttatactttgaaataaaactactgggtttttaa

SEQ ID NO: 440559 - DNA, 8001 bp, Homo sapiens
tgcccagtctcacacagtaggtttcctgggagagttggaattcaaatctgtgaatctgtctacagtctacagagttcatgttcttaattgggttattaaaagtgatgaatttttttaaaggaatgcttacttttaatattcagaatggacagtttagaagaacctcagaaaaaagtctttaaggctcgaaaaacgatgagagtgagtgatcgtcagcaacttgaagcagtgtacaaggtcaaagaagaactgttgaaaactgatgtcaagctgttaaatggcaaccatgaaaatggagatttggacccaacctcacctttggaaaacatggattacattaaagacaaggaagaggtgaatggcattgaagagatttgttttgatcctgaaggaagtaaagcagaatggaaggaaacaccctgtatcctaagtgttaatgtaaaaaacaagcaggatgatgatttaaattgtgaacctttgtctccccataatataactccagaaccagtctctaaactgcctgctgaaccagtttctggtgatccagcccctggtgatctggatgccggagatccagcctccggagtactggcctctggtgattccacctctggtgatcccacctctagcgagccctcctctagtgatgctgcctctggtgatgcaacctctggtgatgccccttctggtgatgtgtcccctggtgatgccacctctggtgatgccactgctgatgatctctcctctggtgatcccacctctagtgatcccatcccaggtgaaccggtccctgttgaacccatttctggtgattgtgccgctgatgatatagcctctagtgaaataacttctgttgatctggcttctggagcaccagcttccactgatccagcctctgatgatctggcctctggtgatctatcctctagtgaactggcctctgatgatctggccactggtgaactggcctctgatgagctgacttctgaatcaacctttgatcgtacctttgaaccaaagtctgtaccagtttgtgaaccagttcctgaaattgacaatatagaaccaagtagcaataaagatgatgattttcttgaaaaaaatggagctgatgaaaaattagagcaaattcagagtaaagactcattggatgagaaaaataaagctgataataatattgatgctaatgaagaaactctagaaacagatgatacaactatttgttcagatcgacctcctgaaaatgaaaagaaggtagaggaagatattatcacagagcttgctcttggagaagatgctatatctagcagtatggaaattgaccaaggtgaaaagaatgaagatgaaacttctgcagatcttgtagaaacgattaatgaaaatgttattgaagataacaaaagtgagaatatcttagaaaatacagactctatggagacagatgaaatcattcctattttggaaaagcttgcaccttctgaggatgaacttacttgcttttctaaaacatctctccttccaatcgatgagacaaatccagatttggaagagaaaatggaaagttcttttggttcaccatctaaacaagaaagtagtgagagtttgccaaaagaagcctttctggtcctctctgatgaagaggatatttcgggtgaaaaagatgagtctgaagttatatcgcaaaatgaaacgtgctctccagcagaagtagaaagtaatgaaaaggacaacagacctgaggaagaagagcaagtaatacatgaagatgatgaaagaccttctgagaaaaatgaattttctagacgaaaacgttctaaatcagaagacatggacaatgtacagtctaaacgtcgtcgatatatggaagaagaatatgaggcagaatttcaagtaaagattacagccaaaggagacattaaccagaaacttcaaaaggttatacagtggttgctggaagaaaaattgtgtgcgctgcagtgtgctgtatttgataagactttggcagaattgaaaacacgagtggaaaagattgaatgtaacaagaggcataaaacagttctcactgaactacaggccaagatagccaggttaaccaaacgctttgaagcagccaaagaagatcttaagaaaagacatgaacatccacccaacccaccagtatcaccaggaaaaactgtaaatgatgtcaacagcaataataacatgtcttacagaaatgcaggcacagtgagacagatgctggagtccaaaagaaatgtaagcgagagtgcaccaccatcctttcaaactcctgtgaatacagtatcttcaaccaatcttgtcactcctccagcagttgtcagtagtcaacctaaattgcagactccagtgacttcgggttccctcacagcaacgtcagttcttcctgcacccaatacagctactgtagttgctactactcaggtgcctagtggaaatccccagcctacaatctctttacagcctttgccagtgattttgcatgtacctgttgcagtatcctcccagcctcagcttctacagagccatccagggactttggtgactaatcaaccatctggcaatgttgaattcatttctgtgcaaagcccacctacagtgagtggtcttaccaaaaatccagtatccttgccatccttgccaaatcccactaaaccaaacaacgttccttctgtgcccagtcctagtattcaaaggaaccctactgccagtgctgcaccattgggaacaacacttgctgtgcaggctgttccaacagcacactctattgtacaagccacaaggacttctttacccacagtgggcccatcaggactctatagtccatcaactaatcgaggtcctatacagatgaaaattccaatttctgcatttagtacttcgtctgctgcagaacagaacagcaataccaccccaagaattgaaaaccagacaaacaaaacaatagatgcttctgtcagtaagaaagcagctgatagcacatcacagtgtggaaaagccactggcagtgattcaagtggtgtcattgatctcacaatggatgatgaagagagtggagcttcacaagaccccaaaaaactaaatcacactcctgtatcaaccatgagttcttctcagcctgtgtcacgaccattgcaacccatacaaccagcaccgcctcttcaaccatctggggtgccaacaagtggaccatctcagaccaccatacacttactacctacagctccaactaccgtgaatgtaacacatcgtccagtaactcaggtgaccacaagactccctgtaccaagagctcctgcaaaccaccaggtggtttatacaactcttcctgcaccaccagctcaggctcccttgcgaggaactgttatgcaggctcctgctgttcggcaggtcaatccccaaaatagtgttacagttcgagtgcctcaaacaaccacatatgttgtaaacaatggactaaccctgggatcaacaggacctcagctcacagtgcatcaccgaccaccacaagtgcatactgagcccccacgccccgtgcacccagcacccttaccagaagctccacaaccacagcgtctgcccccagaagctgccagcacatctctgcctcagaagccacacttgaagttagcacgcgttcagagtcaaaatggcatagtactgtcatggagtgtcctggaggtggatcgaagctgtgccactgttgatagctaccatctctatgcttaccatgaggaacccagtgccactgtgccctcacaatggaaaaagattggggaagtcaaggcacttcccttgcccatggcatgtactctcacccagtttgtatctggtagcaaatactactttgcagtacgagccaaggatatttatggacgttttgggcctttctgtgatcctcagtcaacagatgtgatctcttctacccagagcagttaaaccttggagcctttatattttcctcttttaaaatttccaccttttggtcttgtttttaatcttgtgcatgataccccatgtaaaatccaccttgtgcaagatttcttggacagatgtgtgtatacactacatttgtttataaccagaagcaaaataaactcagcccacaaagctagaatcttttcctggacagtttaggctttggggtttggaaatgtaaatgtgtaccttgctttagttttgaggctggggaatatgtgtgggtgtttatgtgtgtttttccttatgtaggtgttattgcattggagtctcccattttcattctcaaatttacctcttaaagtacgaagtaagtagatcaaaggatttgagatgtgtaactggcatgattctgcttttgaaggatctatagtatcattttagttaagtgggtcaaacagaatcaaaacaaaacccaaagaaataaataaaaaacaaaatggctaaatagtttaaaataggttaattcgaacacaggaaaggatctatttgttgtttcttttgtctggtctcctgagttgttaattaggtgaaaaaagatctgcaatggccccctccctttcctaatctggcttttacatttattttgtgccttaaagattaactacaaagataaacatggccaaaaataaataaataaatatggccatatgtccgttgttgcttagtcttcccttgcagccttttacccttgatttctccttcatctctaccaaatatagcacaactcctcaagtaattttttttttttaagatggagttttgctcttgttgcagtgagctgagattgcgccattgcactccatcctgggagacaagagcgaaactctgcctcaaaaaaaaaaagaatttaaagtatatcctttgaggtcattttatgtaacaattagatataacctcctgtgtatctctctgttcctcttcaaagttattaaaattcagcttaggtcatggatttttaatatgagggccagctgtactggtgtcaggtaggtgttttggggtgtagataatttaggactggagggctgagttaagttttaggaggagaatgtggttgagaatattttgaaaggaatttatggagtttgtgaaataacttcgaagtcctcttcctttacaatatttgaattcatatttgtaccttctcaaaatagtgattcatttttcctagaattacaggagggagctcttttactaatgttgttttgtttgcaactttgatggcttataataggaagtattctagttgtaaagaaaactctttagagacttttgactggtcagtatactgaggtgtgagatttgattcatgatgaagaaagcctatagattgccaaaaaattaattctccaaaccacctttcactctcagaaaatgagaccacaaaggagtatgctataaatcaaatttgccaaccaattatgtagatattactcattctaggactaatgatgatggtaaagaagttgccagtgttatggcaatgaaaatttcagaaaggaggagttgatgatcttctagatgtatatgaacacctgtctatatctgcatgtatatgttttgacctgcagtggttgcaatgttgatatgtgttcaagattattcctgtctacaaaactgaaggcccatgttcaaattgttctttattgggtgtttttatggtcacgtggtaacaattttcttacctaacctacaaaaggttctcttgatgaacatttttatttatatttactaatcttttttaaaaaaagctttcatagcattatataatcagatgaagaaagcccagtagaataaaaaaaaaattcattagcctagcctatattatgttttctgtcaaaggaaaacaaattctcaaataggaattctaaaaatatttactaaagtaaaataactacttaaaatgttttattccagttgggaaggaagggtacagggagaaatcgcaattatttaggggagaagtatatttattataagatggtgtcctcaaattagcctaccatggcacgtaggggcagcagctatattagatttactagaggtgctaagttagaacactaggcttttattgaggcaggttttaatattgatagatgctttttgtttggtttgtttcttctgggagagaatggaggacttaagtagaagtagctactgataacagactttctagtagcagtttccactccacggttacctttttagtttcatagtatcttttcacaaagtattacaaataagctagattctcccagtttgggaatgcaagtttgctacatttttagcctggcaatatttgtgtaggtattgccttattggaaattctggaaacctgatactgcaacctgcaatgtaggatgtttgtatggcatttaaaggtaatggtgatgtttattattctatactttgcattctgtgagagtaattttcactctgtcttaagtgtgagtaagcctcttctaaaaatcttgttcttgccaagaaatttataaatcacatacgaagacgtctgttgctaacagttaactttatgaggtaactatatccttctatttctctggactcatttttaaaaaatatgccgaatactgcatactgtttaaggtagtatataagtttatgagagaagtggagagctttcttccttgaaaagtcggtatttgttgagataccatttgcctcacagagaggtgttccccactcccatccccattgccagataataaatattttgagaaaagtgacctaaaacagctgaaatcttaggtgcatctgtctgcagacctccttaagcaggctgtatcttacaattcccttactgcactgggtaagtgttaacttagtttttgttgtttgctcttttgctttaaatattctccaaattaccatttatgcaacatggttagggttaatactgcatggtattcatttatcttgtttcatgaactttccagtactgtacaaggtcaacaaagtaatgcctgtggtatcctcatctctcacttttttactctgtgattttagcacagtaaggtactgcaaagaccttccttccaaatgttctccttgactttatttcttgggccaattcagtatcctcaacatcctaagattttgttgttttatcactgacctgtggttggcctgttttattctaatttccagaaaagtcaagtcccagtatttgcaatatcaaataactctaaaaccgatgtgtgattctaccttccttactatttttactgggcaaatgccctatttttttaattattattatttttaacttttgggacacacaaaaatcagcaattctcatgaagcgtttgttagtgtggcagacttgtctaattcctgaaactcattcatccccttgagccagccaatggggaggaataggataatgcaaacacatgttttgttttctcattttcaaataatttaccatgttaaaataaacttttctttgttttttatttgtagagtcagctaagtacccatatttaaatgccgtctttattatttttttgaggtctttgtttttgtctgtttttgttttgttttgttttgtaaataaggtaactgggcaatcaaacaccttttggggattctggctttagtattttatcagccattttaaaattaaatataaaaatcctttgtaagaaacttgcatcctaatttttctttattgcaattgaaagtgtaaataataagacaatgtaagtaagaccttcctaatgtctaatacaaactgggctccagcaagtggccctatttttattagggttttgaaggtttgtgtgtgtgtgtgcgtgcgtgtgtgtgtttttcttttttaaatgtatagtagagtggtgtctgtataagtgttacctgtagtggggttttgtccagcaagcctgaaatttatactttgaaataaaactactgggtttttaaacacacacacacaaacaaaaaacaacacaaaaaaaacaccaaacaaaaaaacaacaacac

SEQ ID NO: 440560 - DNA, 6750 bp, Homo sapiens
tgcccagtctcacacagtaggtttcctgggagagttggaattcaaatctgtgaatctgtctacagtctacagagttcatgttcttaattgggttattaaaagtgatgaatttttttaaaggaatgcttacttttaatattcagaatggacagtttagaagaacctcagaaaaaagtctttaaggctcgaaaaacgatgagagtgagtgatcgtcagcaacttgaagcagtgtacaaggtcaaagaagaactgttgaaaactgatgtcaagctgttaaatggcaaccatgaaaatggagatttggacccaacctcacctttggaaaacatggattacattaaagacaaggaagaggtgaatggcattgaagagatttgttttgatcctgaaggaagtaaagcagaatggaaggaaacaccctgtatcctaagtgttaatgtaaaaaacaagcaggatgatgatttaaattgtgaacctttgtctccccataatataactccagaaccagtctctaaactgcctgctgaaccagtttctggtgatccagcccctggtgatctggatgccggagatccagcctccggagtactggcctctggtgattccacctctggtgatcccacctctagcgagccctcctctagtgatgctgcctctggtgatgcaacctctggtgatgccccttctggtgatgtgtcccctggtgatgccacctctggtgatgccactgctgatgatctctcctctggtgatcccacctctagtgatcccatcccaggtgaaccggtccctgttgaacccatttctggtgattgtgccgctgatgatatagcctctagtgaaataacttctgttgatctggcttctggagcaccagcttccactgatccagcctctgatgatctggcctctggtgatctatcctctagtgaactggcctctgatgatctggccactggtgaactggcctctgatgagctgacttctgaatcaacctttgatcgtacctttgaaccaaagtctgtaccagtttgtgaaccagttcctgaaattgacaatatagaaccaagtagcaataaagatgatgattttcttgaaaaaaatggagctgatgaaaaattagagcaaattcagagtaaagactcattggatgagaaaaataaagctgataataatattgatgctaatgaagaaactctagaaacagatgatacaactatttgttcagatcgacctcctgaaaatgaaaagaaggtagaggaagatattatcacagagcttgctcttggagaagatgctatatctagcagtatggaaattgaccaaggtgaaaagaatgaagatgaaacttctgcagatcttgtagaaacgattaatgaaaatgttattgaagataacaaaagtgagaatatcttagaaaatacagactctatggagacagatgaaatcattcctattttggaaaagcttgcaccttctgaggatgaacttacttgcttttctaaaacatctctccttccaatcgatgagacaaatccagatttggaagagaaaatggaaagttcttttggttcaccatctaaacaagaaagtagtgagagtttgccaaaagaagcctttctggtcctctctgatgaagaggatatttcgggtgaaaaagatgagtctgaagttatatcgcaaaatgaaacgtgctctccagcagaagtagaaagtaatgaaaaggacaacagacctgaggaagaagagcaagtaatacatgaagatgatgaaagaccttctgagaaaaatgaattttctagacgaaaacgttctaaatcagaagacatggacaatgtacagtctaaacgtcgtcgatatatggaagaagaatatgaggcagaatttcaagtaaagattacagccaaaggagacattaaccagaaacttcaaaaggttatacagtggttgctggaagaaaaattgtgtgcgctgcagtgtgctgtatttgataagactttggcagaattgaaaacacgagtggaaaagattgaatgtaacaagaggcataaaacagttctcactgaactacaggccaagatagccaggttaaccaaacgctttgaagcagccaaagaagatcttaagaaaagacatgaacatccacccaacccaccagtatcaccaggaaaaactgtaaatgatgtcaacagcaataataacatgtcttacagaaatgcaggcacagtgagacagatgctggagtccaaaagaaatgtaagcgagagtgcaccaccatcctttcaaactcctgtgaatacagtatcttcaaccaatcttgtcactcctccagcagttgtcagtagtcaacctaaattgcagactccagtgacttcgggttccctcacagcaacgtcagttcttcctgcacccaatacagctactgtagttgctactactcaggtgcctagtggaaatccccagcctacaatctctttacagcctttgccagtgattttgcatgtacctgttgcagtatcctcccagcctcagcttctacagagccatccagggactttggtgactaatcaaccatctggcaatgttgaattcatttctgtgcaaagcccacctacagtgagtggtcttaccaaaaatccagtatccttgccatccttgccaaatcccactaaaccaaacaacgttccttctgtgcccagtcctagtattcaaaggaaccctactgccagtgctgcaccattgggaacaacacttgctgtgcaggctgttccaacagcacactctattgtacaagccacaaggacttctttacccacagtgggcccatcaggactctatagtccatcaactaatcgaggtcctatacagatgaaaattccaatttctgcatttagtacttcgtctgctgcagaacagaacagcaataccaccccaagaattgaaaaccagacaaacaaaacaatagatgcttctgtcagtaagaaagcagctgatagcacatcacagtgtggaaaagccactggcagtgattcaagtggtgtcattgatctcacaatggatgatgaagagagtggagcttcacaagaccccaaaaaactaaatcacactcctgtatcaaccatgagttcttctcagcctgtgtcacgaccattgcaacccatacaaccagcaccgcctcttcaaccatctggggtgccaacaagtggaccatctcagaccaccatacacttactacctacagctccaactaccgtgaatgtaacacatcgtccagtaactcaggtgaccacaagactccctgtaccaagagctcctgcaaaccaccaggtggtttatacaactcttcctgcaccaccagctcaggctcccttgcgaggaactgttatgcaggctcctgctgttcggcaggtcaatccccaaaatagtgttacagttcgagtgcctcaaacaaccacatatgttgtaaacaatggactaaccctgggatcaacaggacctcagctcacagtgcatcaccgaccaccacaagtgcatactgagcccccacgccccgtgcacccagcacccttaccagaagctccacaaccacagcgtctgcccccagaagctgccagcacatctctgcctcagaagccacacttgaagttagcacgcgttcagagtcaaaatggcatagtactgtcatggagtgtcctggaggtggatcgaagctgtgccactgttgatagctaccatctctatgcttaccatgaggaacccagtgccactgtgccctcacaatggaaaaagattggggaagtcaaggcacttcccttgcccatggcatgtactctcacccagtttgtatctggtagcaaatactactttgcagtacgagccaaggatatttatggacgttttgggcctttctgtgatcctcagtcaacagatgtgatctcttctacccagagcagttaaaccttggagcctttatattttcctcttttaaaatttccaccttttggtcttgtttttaatcttgtgcatgataccccatgtaaaatccaccttgtgcaagatttcttggacagatgtgtgtatacactacatttgtttataaccagaagcaaaataaactcagcccacaaagctagaatcttttcctggacagtttaggctttggggtttggaaatgtaaatgtgtaccttgctttagttttgaggctggggaatatgtgtgggtgtttatgtgtgtttttccttatgtaggtgttattgcattggagtctcccattttcattctcaaatttacctcttaaagtacgaagtaagtagatcaaaggatttgagatgtgtaactggcatgattctgcttttgaaggatctatagtatcattttagttaagtgggtcaaacagaatcaaaacaaaacccaaagaaataaataaaaaacaaaatggctaaatagtttaaaataggttaattcgaacacaggaaaggatctatttgttgtttcttttgtctggtctcctgagttgttaattaggtgaaaaaagatctgcaatggccccctccctttcctaatctggcttttacatttattttgtgccttaaagattaactacaaagataaacatggccaaaaataaataaataaatatggccatatgtccgttgttgcttagtcttcccttgcagccttttacccttgatttctccttcatctctaccaaatatagcacaactcctcaagtaattttttttttttaagatggagttttgctcttgttgcagtgagctgagattgcgccattgcactccatcctgggagacaagagcgaaactctgcctcaaaaaaaaaaagaatttaaagtatatcctttgaggtcattttatgtaacaattagatataacctcctgtgtatctctctgttcctcttcaaagttattaaaattcagcttaggtcatggatttttaatatgagggccagctgtactggtgtcaggtaggtgttttggggtgtagataatttaggactggagggctgagttaagttttaggaggagaatgtggttgagaatattttgaaaggaatttatggagtttgtgaaataacttcgaagtcctcttcctttacaatatttgaattcatatttgtaccttctcaaaatagtgattcatttttcctagaattacaggagggagctcttttactaatgttgttttgtttgcaactttgatggcttataataggaagtattctagttgtaaagaaaactctttagagacttttgactggtcagtatactgaggtgtgagatttgattcatgatgaagaaagcctatagattgccaaaaaattaattctccaaaccacctttcactctcagaaaatgagaccacaaaggagtatgctataaatcaaatttgccaaccaattatgtagatattactcattctaggactaatgatgatggtaaagaagttgccagtgttatggcaatgaaaatttcagaaaggaggagttgatgatcttctagatgtatatgaacacctgtctatatctgcatgtatatgttttgacctgcagtggttgcaatgttgatatgtgttcaagattattcctgtctacaaaactgaaggcccatgttcaaattgttctttattgggtgtttttatggtcacgtggtaacaattttcttacctaacctacaaaaggttctcttgatgaacatttttatttatatttactaatcttttttaaaaaaagctttcatagcattatataatcagatgaagaaagcccagtagaataaaaaaaaaattcattagcctagcctatattatgttttctgtcaaaggaaaacaaattctcaaataggaattctaaaaatatttactaaagtaaaataactacttaaaatgttttattccagttgggaaggaagggtacagggagaaatcgcaattatttaggggagaagtatatttattataagatggtgtcctcaaattagcctaccatggcacgtaggggcagcagctatattagatttactagaggtgctaagttagaacactaggcttttattgaggcaggttttaatattgatagatgctttttgtttggtttgtttcttctgggagagaatggaggacttaagtagaagtagctactgataacagactttctagtagcagtttccactccacggttacctttttagtttcatagtatcttttcacaaagtattacaaataagctagattctcccagtttgggaatgcaagtttgctacatttttagcctggcaatatttgtgtaggtattgccttattggaaattctggaaacctgatactgcaacctgcaatgtaggatgtttgtatggcatttaaaggtaatggtgatgtttattattctatactttgcattctgtgagagtaattttcactctgtcttaagtgtgagtaagcctcttctaaaaatcttgttcttgccaagaaatttataaatcacatacgaagacgtctgttgctaacagttaactttatgaggtaactatatccttctatttctctggactcatttttaaaaaatatgccgaatactgcatactgtttaaggtagtatataagtttatgagagaagtggagagctttcttccttgaaaagtcggtatttgttgagataccatttgcctcacagagaggtgttccccactcccatccccattgccagataataaatattttgagaaaagtgaccta

SEQ ID NO: 440561 - DNA, 5799 bp, Homo sapiens
tgcccagtctcacacagtaggtttcctgggagagttggaattcaaatctgtgaatctgtctacagtctacagagttcatgttcttaattgggttattaaaagtgatgaatttttttaaaggaatgcttacttttaatattcagaatggacagtttagaagaacctcagaaaaaagtctttaaggctcgaaaaacgatgagagtgagtgatcgtcagcaacttgaagcagtgtacaaggtcaaagaagaactgttgaaaactgatgtcaagctgttaaatggcaaccatgaaaatggagatttggacccaacctcacctttggaaaacatggattacattaaagacaaggaagaggtgaatggcattgaagagatttgttttgatcctgaaggaagtaaagcagaatggaaggaaacaccctgtatcctaagtgttaatgtaaaaaacaagcaggatgatgatttaaattgtgaacctttgtctccccataatataactccagaaccagtctctaaactgcctgctgaaccagtttctggtgatccagcccctggtgatctggatgccggagatccagcctccggagtactggcctctggtgattccacctctggtgatcccacctctagcgagccctcctctagtgatgctgcctctggtgatgcaacctctggtgatgccccttctggtgatgtgtcccctggtgatgccacctctggtgatgccactgctgatgatctctcctctggtgatcccacctctagtgatcccatcccaggtgaaccggtccctgttgaacccatttctggtgattgtgccgctgatgatatagcctctagtgaaataacttctgttgatctggcttctggagcaccagcttccactgatccagcctctgatgatctggcctctggtgatctatcctctagtgaactggcctctgatgatctggccactggtgaactggcctctgatgagctgacttctgaatcaacctttgatcgtacctttgaaccaaagtctgtaccagtttgtgaaccagttcctgaaattgacaatatagaaccaagtagcaataaagatgatgattttcttgaaaaaaatggagctgatgaaaaattagagcaaattcagagtaaagactcattggatgagaaaaataaagctgataataatattgatgctaatgaagaaactctagaaacagatgatacaactatttgttcagatcgacctcctgaaaatgaaaagaaggtagaggaagatattatcacagagcttgctcttggagaagatgctatatctagcagtatggaaattgaccaaggtgaaaagaatgaagatgaaacttctgcagatcttgtagaaacgattaatgaaaatgttattgaagataacaaaagtgagaatatcttagaaaatacagactctatggagacagatgaaatcattcctattttggaaaagcttgcaccttctgaggatgaacttacttgcttttctaaaacatctctccttccaatcgatgagacaaatccagatttggaagagaaaatggaaagttcttttggttcaccatctaaacaagaaagtagtgagagtttgccaaaagaagcctttctggtcctctctgatgaagaggatatttcgggtgaaaaagatgagtctgaagttatatcgcaaaatgaaacgtgctctccagcagaagtagaaagtaatgaaaaggacaacagacctgaggaagaagagcaagtaatacatgaagatgatgaaagaccttctgagaaaaatgaattttctagacgaaaacgttctaaatcagaagacatggacaatgtacagtctaaacgtcgtcgatatatggaagaagaatatgaggcagaatttcaagtaaagattacagccaaaggagacattaaccagaaacttcaaaaggttatacagtggttgctggaagaaaaattgtgtgcgctgcagtgtgctgtatttgataagactttggcagaattgaaaacacgagtggaaaagattgaatgtaacaagaggcataaaacagttctcactgaactacaggccaagatagccaggttaaccaaacgctttgaagcagccaaagaagatcttaagaaaagacatgaacatccacccaacccaccagtatcaccaggaaaaactgtaaatgatgtcaacagcaataataacatgtcttacagaaatgcaggcacagtgagacagatgctggagtccaaaagaaatgtaagcgagagtgcaccaccatcctttcaaactcctgtgaatacagtatcttcaaccaatcttgtcactcctccagcagttgtcagtagtcaacctaaattgcagactccagtgacttcgggttccctcacagcaacgtcagttcttcctgcacccaatacagctactgtagttgctactactcaggtgcctagtggaaatccccagcctacaatctctttacagcctttgccagtgattttgcatgtacctgttgcagtatcctcccagcctcagcttctacagagccatccagggactttggtgactaatcaaccatctggcaatgttgaattcatttctgtgcaaagcccacctacagtgagtggtcttaccaaaaatccagtatccttgccatccttgccaaatcccactaaaccaaacaacgttccttctgtgcccagtcctagtattcaaaggaaccctactgccagtgctgcaccattgggaacaacacttgctgtgcaggctgttccaacagcacactctattgtacaagccacaaggacttctttacccacagtgggcccatcaggactctatagtccatcaactaatcgaggtcctatacagatgaaaattccaatttctgcatttagtacttcgtctgctgcagaacagaacagcaataccaccccaagaattgaaaaccagacaaacaaaacaatagatgcttctgtcagtaagaaagcagctgatagcacatcacagtgtggaaaagccactggcagtgattcaagtggtgtcattgatctcacaatggatgatgaagagagtggagcttcacaagaccccaaaaaactaaatcacactcctgtatcaaccatgagttcttctcagcctgtgtcacgaccattgcaacccatacaaccagcaccgcctcttcaaccatctggggtgccaacaagtggaccatctcagaccaccatacacttactacctacagctccaactaccgtgaatgtaacacatcgtccagtaactcaggtgaccacaagactccctgtaccaagagctcctgcaaaccaccaggtggtttatacaactcttcctgcaccaccagctcaggctcccttgcgaggaactgttatgcaggctcctgctgttcggcaggtcaatccccaaaatagtgttacagttcgagtgcctcaaacaaccacatatgttgtaaacaatggactaaccctgggatcaacaggacctcagctcacagtgcatcaccgaccaccacaagtgcatactgagcccccacgccccgtgcacccagcacccttaccagaagctccacaaccacagcgtctgcccccagaagctgccagcacatctctgcctcagaagccacacttgaagttagcacgcgttcagagtcaaaatggcatagtactgtcatggagtgtcctggaggtggatcgaagctgtgccactgttgatagctaccatctctatgcttaccatgaggaacccagtgccactgtgccctcacaatggaaaaagattggggaagtcaaggcacttcccttgcccatggcatgtactctcacccagtttgtatctggtagcaaatactactttgcagtacgagccaaggatatttatggacgttttgggcctttctgtgatcctcagtcaacagatgtgatctcttctacccagagcagttaaaccttggagcctttatattttcctcttttaaaatttccaccttttggtcttgtttttaatcttgtgcatgataccccatgtaaaatccaccttgtgcaagatttcttggacagatgtgtgtatacactacatttgtttataaccagaagcaaaataaactcagcccacaaagctagaatcttttcctggacagtttaggctttggggtttggaaatgtaaatgtgtaccttgctttagttttgaggctggggaatatgtgtgggtgtttatgtgtgtttttccttatgtaggtgttattgcattggagtctcccattttcattctcaaatttacctcttaaagtacgaagtaagtagatcaaaggatttgagatgtgtaactggcatgattctgcttttgaaggatctatagtatcattttagttaagtgggtcaaacagaatcaaaacaaaacccaaagaaataaataaaaaacaaaatggctaaatagtttaaaataggttaattcgaacacaggaaaggatctatttgttgtttcttttgtctggtctcctgagttgttaattaggtgaaaaaagatctgcaatggccccctccctttcctaatctggcttttacatttattttgtgccttaaagattaactacaaagataaacatggccaaaaataaataaataaatatggccatatgtccgttgttgcttagtcttcccttgcagccttttacccttgatttctccttcatctctaccaaatatagcacaactcctcaagtaattttttttttttaagatggagttttgctcttgttgcagtgagctgagattgcgccattgcactccatcctgggagacaagagcgaaactctgcctcaaaaaaaaaaagaatttaaagtatatcctttgaggtcattttatgtaacaattagatataacctcctgtgtatctctctgttcctcttcaaagttattaaaattcagcttaggtcatggatttttaatatgagggccagctgtactggtgtcaggtaggtgttttggggtgtagataatttaggactggagggctgagttaagttttaggaggagaatgtggttgagaatattttgaaaggaatttatggagtttgtgaaataacttcgaagtcctcttcctttacaatatttgaattcatatttgtaccttctcaaaatagtgattcatttttcctagaattacaggagggagctcttttactaatgttgttttgtttgcaactttgatggcttataataggaagtattctagttgtaaagaaaactctttagagacttttgactggtcagtatactgaggtgtgagatttgattcatgatgaagaaagcctatagattgccaaaaaattaattctccaaaccacctttcactctcagaaaatgagaccacaaaggagtatgctataaatcaaatttgccaaccaattatgtagatattactcattctaggactaatgatgatggtaaagaagttgccagtgttatggcaatgaaaatttcagaaaggaggagttgatgatcttctagatgtatatgaacacctgtctatatctgcatgtatatgttttgacctgcagtggttgcaatgttgatatgtgttcaagattattcctgtctacaaaactgaaggcccatgttcaaattgttctttattgggtgtttttatggtcacgtggtaacaattttcttacctaacctacaaaaggttctcttgatgaacatttttatttatatttactaatcttttttaaaaaaagctttcatagcttttttatcagttgaggcctatatatttacacgtggtgg

SEQ ID NO: 440562 - DNA, 5895 bp, Homo sapiens
ttcacagggcaatctcaattacaatatatacaccagacaaacaaaacaatagatgcttctgtcagtaagaaagcagctgatagcacatcacagcatccacccaacccaccagtatcaccaggaaaaactgtaaatgatgtcaacagcaataataacatgtcttacagaaatgcaggcacagtgagacagatgctggagtccaaaagaaatgtaagcgagagtgcaccaccatcctttcaaactcctgtgaatacagtatcttcaaccaatcttgtcactcctccagcagttgtcagtagtcaacctaaattgcagactccagtgacttcgggttccctcacagcaacgtcagttcttcctgcacccaatacagctactgtagttgctactactcaggtgcctagtggaaatccccagcctacaatctctttacagcctttgccagtgattttgcatgtacctgttgcagtatcctcccagcctcagcttctacagagccatccagggactttggtgactaatcaaccatctggcaatgttgaattcatttctgtgcaaagcccacctacagtgagtggtcttaccaaaaatccagtatccttgccatccttgccaaatcccactaaaccaaacaacgttccttctgtgcccagtcctagtattcaaaggaaccctactgccagtgctgcaccattgggaacaacacttgctgtgcaggctgttccaacagcacactctattgtacaagccacaaggacttctttacccacagtgggcccatcaggactctatagtccatcaactaatcgaggtcctatacagatgaaaattccaatttctgcatttagtacttcgtctgctgcagaacagaacagcaataccaccccaagaattgaaaaccagacaaacaaaacaatagatgcttctgtcagtaagaaagcagctgatagcacatcacagtgtggaaaagccactggcagtgattcaagtggtgtcattgatctcacaatggatgatgaagagagtggagcttcacaagaccccaaaaaactaaatcacactcctgtatcaaccatgagttcttctcagcctgtgtcacgaccattgcaacccatacaaccagcaccgcctcttcaaccatctggggtgccaacaagtggaccatctcagaccaccatacacttactacctacagctccaactaccgtgaatgtaacacatcgtccagtaactcaggtgaccacaagactccctgtaccaagagctcctgcaaaccaccaggtggtttatacaactcttcctgcaccaccagctcaggctcccttgcgaggaactgttatgcaggctcctgctgttcggcaggtcaatccccaaaatagtgttacagttcgagtgcctcaaacaaccacatatgttgtaaacaatggactaaccctgggatcaacaggacctcagctcacagtgcatcaccgaccaccacaagtgcatactgagcccccacgccccgtgcacccagcacccttaccagaagctccacaaccacagcgtctgcccccagaagctgccagcacatctctgcctcagaagccacacttgaagttagcacgcgttcagagtcaaaatggcatagtactgtcatggagtgtcctggaggtggatcgaagctgtgccactgttgatagctaccatctctatgcttaccatgaggaacccagtgccactgtgccctcacaatggaaaaagattggggaagtcaaggcacttcccttgcccatggcatgtactctcacccagtttgtatctggtagcaaatactactttgcagtacgagccaaggatatttatggacgttttgggcctttctgtgatcctcagtcaacagatgtgatctcttctacccagagcagttaaaccttggagcctttatattttcctcttttaaaatttccaccttttggtcttgtttttaatcttgtgcatgataccccatgtaaaatccaccttgtgcaagatttcttggacagatgtgtgtatacactacatttgtttataaccagaagcaaaataaactcagcccacaaagctagaatcttttcctggacagtttaggctttggggtttggaaatgtaaatgtgtaccttgctttagttttgaggctggggaatatgtgtgggtgtttatgtgtgtttttccttatgtaggtgttattgcattggagtctcccattttcattctcaaatttacctcttaaagtacgaagtaagtagatcaaaggatttgagatgtgtaactggcatgattctgcttttgaaggatctatagtatcattttagttaagtgggtcaaacagaatcaaaacaaaacccaaagaaataaataaaaaacaaaatggctaaatagtttaaaataggttaattcgaacacaggaaaggatctatttgttgtttcttttgtctggtctcctgagttgttaattaggtgaaaaaagatctgcaatggccccctccctttcctaatctggcttttacatttattttgtgccttaaagattaactacaaagataaacatggccaaaaataaataaataaatatggccatatgtccgttgttgcttagtcttcccttgcagccttttacccttgatttctccttcatctctaccaaatatagcacaactcctcaagtaattttttttttttaagatggagttttgctcttgttgcagtgagctgagattgcgccattgcactccatcctgggagacaagagcgaaactctgcctcaaaaaaaaaaagaatttaaagtatatcctttgaggtcattttatgtaacaattagatataacctcctgtgtatctctctgttcctcttcaaagttattaaaattcagcttaggtcatggatttttaatatgagggccagctgtactggtgtcaggtaggtgttttggggtgtagataatttaggactggagggctgagttaagttttaggaggagaatgtggttgagaatattttgaaaggaatttatggagtttgtgaaataacttcgaagtcctcttcctttacaatatttgaattcatatttgtaccttctcaaaatagtgattcatttttcctagaattacaggagggagctcttttactaatgttgttttgtttgcaactttgatggcttataataggaagtattctagttgtaaagaaaactctttagagacttttgactggtcagtatactgaggtgtgagatttgattcatgatgaagaaagcctatagattgccaaaaaattaattctccaaaccacctttcactctcagaaaatgagaccacaaaggagtatgctataaatcaaatttgccaaccaattatgtagatattactcattctaggactaatgatgatggtaaagaagttgccagtgttatggcaatgaaaatttcagaaaggaggagttgatgatcttctagatgtatatgaacacctgtctatatctgcatgtatatgttttgacctgcagtggttgcaatgttgatatgtgttcaagattattcctgtctacaaaactgaaggcccatgttcaaattgttctttattgggtgtttttatggtcacgtggtaacaattttcttacctaacctacaaaaggttctcttgatgaacatttttatttatatttactaatcttttttaaaaaaagctttcatagcattatataatcagatgaagaaagcccagtagaataaaaaaaaaattcattagcctagcctatattatgttttctgtcaaaggaaaacaaattctcaaataggaattctaaaaatatttactaaagtaaaataactacttaaaatgttttattccagttgggaaggaagggtacagggagaaatcgcaattatttaggggagaagtatatttattataagatggtgtcctcaaattagcctaccatggcacgtaggggcagcagctatattagatttactagaggtgctaagttagaacactaggcttttattgaggcaggttttaatattgatagatgctttttgtttggtttgtttcttctgggagagaatggaggacttaagtagaagtagctactgataacagactttctagtagcagtttccactccacggttacctttttagtttcatagtatcttttcacaaagtattacaaataagctagattctcccagtttgggaatgcaagtttgctacatttttagcctggcaatatttgtgtaggtattgccttattggaaattctggaaacctgatactgcaacctgcaatgtaggatgtttgtatggcatttaaaggtaatggtgatgtttattattctatactttgcattctgtgagagtaattttcactctgtcttaagtgtgagtaagcctcttctaaaaatcttgttcttgccaagaaatttataaatcacatacgaagacgtctgttgctaacagttaactttatgaggtaactatatccttctatttctctggactcatttttaaaaaatatgccgaatactgcatactgtttaaggtagtatataagtttatgagagaagtggagagctttcttccttgaaaagtcggtatttgttgagataccatttgcctcacagagaggtgttccccactcccatccccattgccagataataaatattttgagaaaagtgacctaaaacagctgaaatcttaggtgcatctgtctgcagacctccttaagcaggctgtatcttacaattcccttactgcactgggtaagtgttaacttagtttttgttgtttgctcttttgctttaaatattctccaaattaccatttatgcaacatggttagggttaatactgcatggtattcatttatcttgtttcatgaactttccagtactgtacaaggtcaacaaagtaatgcctgtggtatcctcatctctcacttttttactctgtgattttagcacagtaaggtactgcaaagaccttccttccaaatgttctccttgactttatttcttgggccaattcagtatcctcaacatcctaagattttgttgttttatcactgacctgtggttggcctgttttattctaatttccagaaaagtcaagtcccagtatttgcaatatcaaataactctaaaaccgatgtgtgattctaccttccttactatttttactgggcaaatgccctatttttttaattattattatttttaacttttgggacacacaaaaatcagcaattctcatgaagcgtttgttagtgtggcagacttgtctaattcctgaaactcattcatccccttgagccagccaatggggaggaataggataatgcaaacacatgttttgttttctcattttcaaataatttaccatgttaaaataaacttttctttgttttttatttgtagagtcagctaagtacccatatttaaatgccgtctttattatttttttgaggtctttgtttttgtctgtttttgttttgttttgttttgtaaataaggtaactgggcaatcaaacaccttttggggattctggctttagtattttatcagccattttaaaattaaatataaaaatcctttgtaagaaacttgcatcctaatttttctttattgcaattgaaagtgtaaataataagacaatgtaagtaagaccttcctaatgtctaatacaaactgggctccagcaagtggccctatttttattagggttttgaaggtttgtgtgtgtgtgtgcgtgcgtgtgtgtgtttttcttttttaaatgtatagtagagtggtgtctgtataagtgttacctgtagtggggttttgtccagcaagcctgaaatttatactttgaaataaaactactgggtttttaa

SEQ ID NO: 440563 - DNA, 5789 bp, Homo sapiens
atgagtacgacctgatgtttcgaggtgtgcctgtcgttggtttgcaatgttcttacttggaaaatgcaggcacagtgagacagatgctggagtccaaaagaaatgtaagcgagagtgcaccaccatcctttcaaactcctgtgaatacagtatcttcaaccaatcttgtcactcctccagcagttgtcagtagtcaacctaaattgcagactccagtgacttcgggttccctcacagcaacgtcagttcttcctgcacccaatacagctactgtagttgctactactcaggtgcctagtggaaatccccagcctacaatctctttacagcctttgccagtgattttgcatgtacctgttgcagtatcctcccagcctcagcttctacagagccatccagggactttggtgactaatcaaccatctggcaatgttgaattcatttctgtgcaaagcccacctacagtgagtggtcttaccaaaaatccagtatccttgccatccttgccaaatcccactaaaccaaacaacgttccttctgtgcccagtcctagtattcaaaggaaccctactgccagtgctgcaccattgggaacaacacttgctgtgcaggctgttccaacagcacactctattgtacaagccacaaggacttctttacccacagtgggcccatcaggactctatagtccatcaactaatcgaggtcctatacagatgaaaattccaatttctgcatttagtacttcgtctgctgcagaacagaacagcaataccaccccaagaattgaaaaccagacaaacaaaacaatagatgcttctgtcagtaagaaagcagctgatagcacatcacagtgtggaaaagccactggcagtgattcaagtggtgtcattgatctcacaatggatgatgaagagagtggagcttcacaagaccccaaaaaactaaatcacactcctgtatcaaccatgagttcttctcagcctgtgtcacgaccattgcaacccatacaaccagcaccgcctcttcaaccatctggggtgccaacaagtggaccatctcagaccaccatacacttactacctacagctccaactaccgtgaatgtaacacatcgtccagtaactcaggtgaccacaagactccctgtaccaagagctcctgcaaaccaccaggtggtttatacaactcttcctgcaccaccagctcaggctcccttgcgaggaactgttatgcaggctcctgctgttcggcaggtcaatccccaaaatagtgttacagttcgagtgcctcaaacaaccacatatgttgtaaacaatggactaaccctgggatcaacaggacctcagctcacagtgcatcaccgaccaccacaagtgcatactgagcccccacgccccgtgcacccagcacccttaccagaagctccacaaccacagcgtctgcccccagaagctgccagcacatctctgcctcagaagccacacttgaagttagcacgcgttcagagtcaaaatggcatagtactgtcatggagtgtcctggaggtggatcgaagctgtgccactgttgatagctaccatctctatgcttaccatgaggaacccagtgccactgtgccctcacaatggaaaaagattggggaagtcaaggcacttcccttgcccatggcatgtactctcacccagtttgtatctggtagcaaatactactttgcagtacgagccaaggatatttatggacgttttgggcctttctgtgatcctcagtcaacagatgtgatctcttctacccagagcagttaaaccttggagcctttatattttcctcttttaaaatttccaccttttggtcttgtttttaatcttgtgcatgataccccatgtaaaatccaccttgtgcaagatttcttggacagatgtgtgtatacactacatttgtttataaccagaagcaaaataaactcagcccacaaagctagaatcttttcctggacagtttaggctttggggtttggaaatgtaaatgtgtaccttgctttagttttgaggctggggaatatgtgtgggtgtttatgtgtgtttttccttatgtaggtgttattgcattggagtctcccattttcattctcaaatttacctcttaaagtacgaagtaagtagatcaaaggatttgagatgtgtaactggcatgattctgcttttgaaggatctatagtatcattttagttaagtgggtcaaacagaatcaaaacaaaacccaaagaaataaataaaaaacaaaatggctaaatagtttaaaataggttaattcgaacacaggaaaggatctatttgttgtttcttttgtctggtctcctgagttgttaattaggtgaaaaaagatctgcaatggccccctccctttcctaatctggcttttacatttattttgtgccttaaagattaactacaaagataaacatggccaaaaataaataaataaatatggccatatgtccgttgttgcttagtcttcccttgcagccttttacccttgatttctccttcatctctaccaaatatagcacaactcctcaagtaattttttttttttaagatggagttttgctcttgttgcagtgagctgagattgcgccattgcactccatcctgggagacaagagcgaaactctgcctcaaaaaaaaaaagaatttaaagtatatcctttgaggtcattttatgtaacaattagatataacctcctgtgtatctctctgttcctcttcaaagttattaaaattcagcttaggtcatggatttttaatatgagggccagctgtactggtgtcaggtaggtgttttggggtgtagataatttaggactggagggctgagttaagttttaggaggagaatgtggttgagaatattttgaaaggaatttatggagtttgtgaaataacttcgaagtcctcttcctttacaatatttgaattcatatttgtaccttctcaaaatagtgattcatttttcctagaattacaggagggagctcttttactaatgttgttttgtttgcaactttgatggcttataataggaagtattctagttgtaaagaaaactctttagagacttttgactggtcagtatactgaggtgtgagatttgattcatgatgaagaaagcctatagattgccaaaaaattaattctccaaaccacctttcactctcagaaaatgagaccacaaaggagtatgctataaatcaaatttgccaaccaattatgtagatattactcattctaggactaatgatgatggtaaagaagttgccagtgttatggcaatgaaaatttcagaaaggaggagttgatgatcttctagatgtatatgaacacctgtctatatctgcatgtatatgttttgacctgcagtggttgcaatgttgatatgtgttcaagattattcctgtctacaaaactgaaggcccatgttcaaattgttctttattgggtgtttttatggtcacgtggtaacaattttcttacctaacctacaaaaggttctcttgatgaacatttttatttatatttactaatcttttttaaaaaaagctttcatagcattatataatcagatgaagaaagcccagtagaataaaaaaaaaattcattagcctagcctatattatgttttctgtcaaaggaaaacaaattctcaaataggaattctaaaaatatttactaaagtaaaataactacttaaaatgttttattccagttgggaaggaagggtacagggagaaatcgcaattatttaggggagaagtatatttattataagatggtgtcctcaaattagcctaccatggcacgtaggggcagcagctatattagatttactagaggtgctaagttagaacactaggcttttattgaggcaggttttaatattgatagatgctttttgtttggtttgtttcttctgggagagaatggaggacttaagtagaagtagctactgataacagactttctagtagcagtttccactccacggttacctttttagtttcatagtatcttttcacaaagtattacaaataagctagattctcccagtttgggaatgcaagtttgctacatttttagcctggcaatatttgtgtaggtattgccttattggaaattctggaaacctgatactgcaacctgcaatgtaggatgtttgtatggcatttaaaggtaatggtgatgtttattattctatactttgcattctgtgagagtaattttcactctgtcttaagtgtgagtaagcctcttctaaaaatcttgttcttgccaagaaatttataaatcacatacgaagacgtctgttgctaacagttaactttatgaggtaactatatccttctatttctctggactcatttttaaaaaatatgccgaatactgcatactgtttaaggtagtatataagtttatgagagaagtggagagctttcttccttgaaaagtcggtatttgttgagataccatttgcctcacagagaggtgttccccactcccatccccattgccagataataaatattttgagaaaagtgacctaaaacagctgaaatcttaggtgcatctgtctgcagacctccttaagcaggctgtatcttacaattcccttactgcactgggtaagtgttaacttagtttttgttgtttgctcttttgctttaaatattctccaaattaccatttatgcaacatggttagggttaatactgcatggtattcatttatcttgtttcatgaactttccagtactgtacaaggtcaacaaagtaatgcctgtggtatcctcatctctcacttttttactctgtgattttagcacagtaaggtactgcaaagaccttccttccaaatgttctccttgactttatttcttgggccaattcagtatcctcaacatcctaagattttgttgttttatcactgacctgtggttggcctgttttattctaatttccagaaaagtcaagtcccagtatttgcaatatcaaataactctaaaaccgatgtgtgattctaccttccttactatttttactgggcaaatgccctatttttttaattattattatttttaacttttgggacacacaaaaatcagcaattctcatgaagcgtttgttagtgtggcagacttgtctaattcctgaaactcattcatccccttgagccagccaatggggaggaataggataatgcaaacacatgttttgttttctcattttcaaataatttaccatgttaaaataaacttttctttgttttttatttgtagagtcagctaagtacccatatttaaatgccgtctttattatttttttgaggtctttgtttttgtctgtttttgttttgttttgttttgtaaataaggtaactgggcaatcaaacaccttttggggattctggctttagtattttatcagccattttaaaattaaatataaaaatcctttgtaagaaacttgcatcctaatttttctttattgcaattgaaagtgtaaataataagacaatgtaagtaagaccttcctaatgtctaatacaaactgggctccagcaagtggccctatttttattagggttttgaaggtttgtgtgtgtgtgtgcgtgcgtgtgtgtgtttttcttttttaaatgtatagtagagtggtgtctgtataagtgttacctgtagtggggttttgtccagcaagcctgaaatttatactttgaaataaaactactgggtttttaa

SEQ ID NO: 440564 - DNA, 4781 bp, Homo sapiens
ggtggcacatattctccattgactatttgagaaagggtttgtggtagttagaatttttttttagtgcttgcatgtaagaaagtttttttatccacaggctgattgatagcttggctgaatacgaacaggacctctaggttagaaatatctttcctttcgaatcttgaaaacattgcttcactgccttcaaatatttaatcagttttccaccaaatttacaatagaattatcattttatcctgtaatttttttgtttgtttgtaggtgttacagttcgagtgcctcaaacaaccacatatgttgtaaacaatggactaaccctgggatcaacaggacctcagctcacagtgcatcaccgaccaccacaagtgcatactgagcccccacgccccgtgcacccagcacccttaccagaagctccacaaccacagcgtctgcccccagaagctgccagcacatctctgcctcagaagccacacttgaagttagcacgcgttcagagtcaaaatggcatagtactgtcatggagtgtcctggaggtggatcgaagctgtgccactgttgatagctaccatctctatgcttaccatgaggaacccagtgccactgtgccctcacaatggaaaaagattggggaagtcaaggcacttcccttgcccatggcatgtactctcacccagtttgtatctggtagcaaatactactttgcagtacgagccaaggatatttatggacgttttgggcctttctgtgatcctcagtcaacagatgtgatctcttctacccagagcagttaaaccttggagcctttatattttcctcttttaaaatttccaccttttggtcttgtttttaatcttgtgcatgataccccatgtaaaatccaccttgtgcaagatttcttggacagatgtgtgtatacactacatttgtttataaccagaagcaaaataaactcagcccacaaagctagaatcttttcctggacagtttaggctttggggtttggaaatgtaaatgtgtaccttgctttagttttgaggctggggaatatgtgtgggtgtttatgtgtgtttttccttatgtaggtgttattgcattggagtctcccattttcattctcaaatttacctcttaaagtacgaagtaagtagatcaaaggatttgagatgtgtaactggcatgattctgcttttgaaggatctatagtatcattttagttaagtgggtcaaacagaatcaaaacaaaacccaaagaaataaataaaaaacaaaatggctaaatagtttaaaataggttaattcgaacacaggaaaggatctatttgttgtttcttttgtctggtctcctgagttgttaattaggtgaaaaaagatctgcaatggccccctccctttcctaatctggcttttacatttattttgtgccttaaagattaactacaaagataaacatggccaaaaataaataaataaatatggccatatgtccgttgttgcttagtcttcccttgcagccttttacccttgatttctccttcatctctaccaaatatagcacaactcctcaagtaattttttttttttaagatggagttttgctcttgttgcagtgagctgagattgcgccattgcactccatcctgggagacaagagcgaaactctgcctcaaaaaaaaaaagaatttaaagtatatcctttgaggtcattttatgtaacaattagatataacctcctgtgtatctctctgttcctcttcaaagttattaaaattcagcttaggtcatggatttttaatatgagggccagctgtactggtgtcaggtaggtgttttggggtgtagataatttaggactggagggctgagttaagttttaggaggagaatgtggttgagaatattttgaaaggaatttatggagtttgtgaaataacttcgaagtcctcttcctttacaatatttgaattcatatttgtaccttctcaaaatagtgattcatttttcctagaattacaggagggagctcttttactaatgttgttttgtttgcaactttgatggcttataataggaagtattctagttgtaaagaaaactctttagagacttttgactggtcagtatactgaggtgtgagatttgattcatgatgaagaaagcctatagattgccaaaaaattaattctccaaaccacctttcactctcagaaaatgagaccacaaaggagtatgctataaatcaaatttgccaaccaattatgtagatattactcattctaggactaatgatgatggtaaagaagttgccagtgttatggcaatgaaaatttcagaaaggaggagttgatgatcttctagatgtatatgaacacctgtctatatctgcatgtatatgttttgacctgcagtggttgcaatgttgatatgtgttcaagattattcctgtctacaaaactgaaggcccatgttcaaattgttctttattgggtgtttttatggtcacgtggtaacaattttcttacctaacctacaaaaggttctcttgatgaacatttttatttatatttactaatcttttttaaaaaaagctttcatagcattatataatcagatgaagaaagcccagtagaataaaaaaaaaattcattagcctagcctatattatgttttctgtcaaaggaaaacaaattctcaaataggaattctaaaaatatttactaaagtaaaataactacttaaaatgttttattccagttgggaaggaagggtacagggagaaatcgcaattatttaggggagaagtatatttattataagatggtgtcctcaaattagcctaccatggcacgtaggggcagcagctatattagatttactagaggtgctaagttagaacactaggcttttattgaggcaggttttaatattgatagatgctttttgtttggtttgtttcttctgggagagaatggaggacttaagtagaagtagctactgataacagactttctagtagcagtttccactccacggttacctttttagtttcatagtatcttttcacaaagtattacaaataagctagattctcccagtttgggaatgcaagtttgctacatttttagcctggcaatatttgtgtaggtattgccttattggaaattctggaaacctgatactgcaacctgcaatgtaggatgtttgtatggcatttaaaggtaatggtgatgtttattattctatactttgcattctgtgagagtaattttcactctgtcttaagtgtgagtaagcctcttctaaaaatcttgttcttgccaagaaatttataaatcacatacgaagacgtctgttgctaacagttaactttatgaggtaactatatccttctatttctctggactcatttttaaaaaatatgccgaatactgcatactgtttaaggtagtatataagtttatgagagaagtggagagctttcttccttgaaaagtcggtatttgttgagataccatttgcctcacagagaggtgttccccactcccatccccattgccagataataaatattttgagaaaagtgacctaaaacagctgaaatcttaggtgcatctgtctgcagacctccttaagcaggctgtatcttacaattcccttactgcactgggtaagtgttaacttagtttttgttgtttgctcttttgctttaaatattctccaaattaccatttatgcaacatggttagggttaatactgcatggtattcatttatcttgtttcatgaactttccagtactgtacaaggtcaacaaagtaatgcctgtggtatcctcatctctcacttttttactctgtgattttagcacagtaaggtactgcaaagaccttccttccaaatgttctccttgactttatttcttgggccaattcagtatcctcaacatcctaagattttgttgttttatcactgacctgtggttggcctgttttattctaatttccagaaaagtcaagtcccagtatttgcaatatcaaataactctaaaaccgatgtgtgattctaccttccttactatttttactgggcaaatgccctatttttttaattattattatttttaacttttgggacacacaaaaatcagcaattctcatgaagcgtttgttagtgtggcagacttgtctaattcctgaaactcattcatccccttgagccagccaatggggaggaataggataatgcaaacacatgttttgttttctcattttcaaataatttaccatgttaaaataaacttttctttgttttttatttgtagagtcagctaagtacccatatttaaatgccgtctttattatttttttgaggtctttgtttttgtctgtttttgttttgttttgttttgtaaataaggtaactgggcaatcaaacaccttttggggattctggctttagtattttatcagccattttaaaattaaatataaaaatcctttgtaagaaacttgcatcctaatttttctttattgcaattgaaagtgtaaataataagacaatgtaagtaagaccttcctaatgtctaatacaaactgggctccagcaagtggccctatttttattagggttttgaaggtttgtgtgtgtgtgtgcgtgcgtgtgtgtgtttttcttttttaaatgtatagtagagtggtgtctgtataagtgttacctgtagtggggttttgtccagcaagcctgaaatttatactttgaaataaaactactgggtttttaa

SEQ ID NO: 440565 - DNA, 3591 bp, Homo sapiens
  misc_feature (3565)..(3565): n is a, c, g, or t
tgcccagtctcacacagtaggtttcctgggagagttggaattcaaatctgtgaatctgtctacagtctacagagttcatgttcttaattgggttattaaaagtgatgaatttttttaaaggaatgcttacttttaatattcagaatggacagtttagaagaacctcagaaaaaagtctttaaggctcgaaaaacgatgagagtgagtgatcgtcagcaacttgaagcagtgtacaaggtcaaagaagaactgttgaaaactgatgtcaagctgttaaatggcaaccatgaaaatggagatttggacccaacctcacctttggaaaacatggattacattaaagacaaggaagaggtgaatggcattgaagagatttgttttgatcctgaaggaagtaaagcagaatggaaggaaacaccctgtatcctaagtgttaatgtaaaaaacaagcaggatgatgatttaaattgtgaacctttgtctccccataatataactccagaaccagtctctaaactgcctgctgaaccagtttctggtgatccagcccctggtgatctggatgccggagatccagcctccggagtactggcctctggtgattccacctctggtgatcccacctctagcgagccctcctctagtgatgctgcctctggtgatgcaacctctggtgatgccccttctggtgatgtgtcccctggtgatgccacctctggtgatgccactgctgatgatctctcctctggtgatcccacctctagtgatcccatcccaggtgaaccggtccctgttgaacccatttctggtgattgtgccgctgatgatatagcctctagtgaaataacttctgttgatctggcttctggagcaccagcttccactgatccagcctctgatgatctggcctctggtgatctatcctctagtgaactggcctctgatgatctggccactggtgaactggcctctgatgagctgacttctgaatcaacctttgatcgtacctttgaaccaaagtctgtaccagtttgtgaaccagttcctgaaattgacaatatagaaccaagtagcaataaagatgatgattttcttgaaaaaaatggagctgatgaaaaattagagcaaattcagagtaaagactcattggatgagaaaaataaagctgataataatattgatgctaatgaagaaactctagaaacagatgatacaactatttgttcagatcgacctcctgaaaatgaaaagaaggtagaggaagatattatcacagagcttgctcttggagaagatgctatatctagcagtatggaaattgaccaaggtgaaaagaatgaagatgaaacttctgcagatcttgtagaaacgattaatgaaaatgttattgaagataacaaaagtgagaatatcttagaaaatacagactctatggagacagatgaaatcattcctattttggaaaagcttgcaccttctgaggatgaacttacttgcttttctaaaacatctctccttccaatcgatgagacaaatccagatttggaagagaaaatggaaagttcttttggttcaccatctaaacaagaaagtagtgagagtttgccaaaagaagcctttctggtcctctctgatgaagaggatatttcgggtgaaaaagatgagtctgaagttatatcgcaaaatgaaacgtgctctccagcagaagtagaaagtaatgaaaaggacaacagacctgaggaagaagagcaagtaatacatgaagatgatgaaagaccttctgagaaaaatgaattttctagacgaaaacgttctaaatcagaagacatggacaatgtacagtctaaacgtcgtcgatatatggaagaagaatatgaggcagaatttcaagtaaagattacagccaaaggagacattaaccagaaacttcaaaaggttatacagtggttgctggaagaaaaattgtgtgcgctgcagtgtgctgtatttgataagactttggcagaattgaaaacacgagtggaaaagattgaatgtaacaagaggcataaaacagttctcactgaactacaggccaagatagccaggttaaccaaacgctttgaagcagccaaagaagatcttaagaaaagacatgaacatccacccaacccaccagtatcaccaggaaaaactgtaaatgatgtcaacagcaataataacatgtcttacagaaatgcaggcacagtgagacagatgctggagtccaaaagaaatgtaagcgagagtgcaccaccatcctttcaaactcctgtgaatacagtatcttcaaccaatcttgtcactcctccagcagttgtcagtagtcaacctaaattgcagactccagtgacttcgggttccctcacagcaacgtcagttcttcctgcacccaatacagctactgtagttgctactactcaggtgcctagtggaaatccccagcctacaatctctttacagcctttgccagtgattttgcatgtacctgttgcagtatcctcccagcctcagcttctacagagccatccagggactttggtgactaatcaaccatctggcaatgttgaattcatttctgtgcaaagcccacctacagtgagtggtcttaccaaaaatccagtatccttgccatccttgccaaatcccactaaaccaaacaacgttccttctgtgcccagtcctagtattcaaaggaaccctactgccagtgctgcaccattgggaacaacacttgctgtgcaggctgttccaacagcacactctattgtacaagccacaaggacttctttacccacagtgggcccatcaggactctatagtccatcaactaatcgaggtcctatacagatgaaaattccaatttctgcatttagtacttcgtctgctgcagaacagaacagcaataccaccccaagaattgaaaaccagacaaacaaaacaatagatgcttctgtcagtaagaaagcagctgatagcacatcacagtgtggaaaagccactggcagtgattcaagtggtgtcattgatctcacaatggatgatgaagagagtggagcttcacaagaccccaaaaaactaaatcacactcctgtatcaaccatgagttcttctcagcctgtgtcacgaccattgcaacccatacaaccagcaccgcctcttcaaccatctggggtgccaacaagtggaccatctcagaccaccatacacttactacctacagctccaactaccgtgaatgtaacacatcgtccagtaactcaggtgaccacaagactccctgtaccaagagctcctgcaaaccaccaggtggtttatacaactcttcctgcaccaccagctcaggctcccttgcgaggaactgttatgcaggctcctgctgttcggcaggtcaatccccaaaatagtgttacagttcgagtgcctcaaacaaccacatatgttgtaaacaatggactaaccctgggatcaacaggacctcagctcacagtgcatcaccgaccaccacaagtgcatactgagcccccacgccccgtgcacccagtcntgaacattctactaattttaaaagac

SEQ ID NO: 440566 - DNA, 3554 bp, Homo sapiens
atttgtctcttaatacctaaagaaaggccgccattaacccactgccaccctggtctcattatgtgtgtgcgtgatgttatcacccaacactaactccttagtattctttcaaaggaagcaaatagtaagattacaatatagaatgagctaaaatatcaaggggaaagcttcatttcctctttattctctttatcgtccttcccattttaaccttttaactttgttttgatggtgccaagttgagtctgatgtacccattgttagctttggatagaatttaaagtatatcccagaattagctgggcatgttggtgcatgcctgtaatcccagctactcaggaggcaaggctggagaatcgcttgaacccgggaggcggaggttgcagtgagctgagattgcgccattgcactccatcctgggagacaagagcgaaactctgcctcaaaaaaaaaaagaatttaaagtatatcctttgaggtcattttatgtaacaattagatataacctcctgtgtatctctctgttcctcttcaaagttattaaaattcagcttaggtcatggatttttaatatgagggccagctgtactggtgtcaggtaggtgttttggggtgtagataatttaggactggagggctgagttaagttttaggaggagaatgtggttgagaatattttgaaaggaatttatggagtttgtgaaataacttcgaagtcctcttcctttacaatatttgaattcatatttgtaccttctcaaaatagtgattcatttttcctagaattacaggagggagctcttttactaatgttgttttgtttgcaactttgatggcttataataggaagtattctagttgtaaagaaaactctttagagacttttgactggtcagtatactgaggtgtgagatttgattcatgatgaagaaagcctatagattgccaaaaaattaattctccaaaccacctttcactctcagaaaatgagaccacaaaggagtatgctataaatcaaatttgccaaccaattatgtagatattactcattctaggactaatgatgatggtaaagaagttgccagtgttatggcaatgaaaatttcagaaaggaggagttgatgatcttctagatgtatatgaacacctgtctatatctgcatgtatatgttttgacctgcagtggttgcaatgttgatatgtgttcaagattattcctgtctacaaaactgaaggcccatgttcaaattgttctttattgggtgtttttatggtcacgtggtaacaattttcttacctaacctacaaaaggttctcttgatgaacatttttatttatatttactaatcttttttaaaaaaagctttcatagcattatataatcagatgaagaaagcccagtagaataaaaaaaaaattcattagcctagcctatattatgttttctgtcaaaggaaaacaaattctcaaataggaattctaaaaatatttactaaagtaaaataactacttaaaatgttttattccagttgggaaggaagggtacagggagaaatcgcaattatttaggggagaagtatatttattataagatggtgtcctcaaattagcctaccatggcacgtaggggcagcagctatattagatttactagaggtgctaagttagaacactaggcttttattgaggcaggttttaatattgatagatgctttttgtttggtttgtttcttctgggagagaatggaggacttaagtagaagtagctactgataacagactttctagtagcagtttccactccacggttacctttttagtttcatagtatcttttcacaaagtattacaaataagctagattctcccagtttgggaatgcaagtttgctacatttttagcctggcaatatttgtgtaggtattgccttattggaaattctggaaacctgatactgcaacctgcaatgtaggatgtttgtatggcatttaaaggtaatggtgatgtttattattctatactttgcattctgtgagagtaattttcactctgtcttaagtgtgagtaagcctcttctaaaaatcttgttcttgccaagaaatttataaatcacatacgaagacgtctgttgctaacagttaactttatgaggtaactatatccttctatttctctggactcatttttaaaaaatatgccgaatactgcatactgtttaaggtagtatataagtttatgagagaagtggagagctttcttccttgaaaagtcggtatttgttgagataccatttgcctcacagagaggtgttccccactcccatccccattgccagataataaatattttgagaaaagtgacctaaaacagctgaaatcttaggtgcatctgtctgcagacctccttaagcaggctgtatcttacaattcccttactgcactgggtaagtgttaacttagtttttgttgtttgctcttttgctttaaatattctccaaattaccatttatgcaacatggttagggttaatactgcatggtattcatttatcttgtttcatgaactttccagtactgtacaaggtcaacaaagtaatgcctgtggtatcctcatctctcacttttttactctgtgattttagcacagtaaggtactgcaaagaccttccttccaaatgttctccttgactttatttcttgggccaattcagtatcctcaacatcctaagattttgttgttttatcactgacctgtggttggcctgttttattctaatttccagaaaagtcaagtcccagtatttgcaatatcaaataactctaaaaccgatgtgtgattctaccttccttactatttttactgggcaaatgccctatttttttaattattattatttttaacttttgggacacacaaaaatcagcaattctcatgaagcgtttgttagtgtggcagacttgtctaattcctgaaactcattcatccccttgagccagccaatggggaggaataggataatgcaaacacatgttttgttttctcattttcaaataatttaccatgttaaaataaacttttctttgttttttatttgtagagtcagctaagtacccatatttaaatgccgtctttattatttttttgaggtctttgtttttgtctgtttttgttttgttttgttttgtaaataaggtaactgggcaatcaaacaccttttggggattctggctttagtattttatcagccattttaaaattaaatataaaaatcctttgtaagaaacttgcatcctaatttttctttattgcaattgaaagtgtaaataataagacaatgtaagtaagaccttcctaatgtctaatacaaactgggctccagcaagtggccctatttttattagggttttgaaggtttgtgtgtgtgtgtgcgtgcgtgtgtgtgtttttcttttttaaatgtatagtagagtggtgtctgtataagtgttacctgtagtggggttttgtccagcaagcctgaaatttatactttgaaataaaactactgggtttttaa

SEQ ID NO: 440567 - DNA, 3736 bp, Homo sapiens
cacacacacacaggtgcatgcatagtctcatcttagccgggcatggtggcgacaatcacatttaactccaaaaatttgacgtgctattttcttctaaaactatagatgcttttatttttggtcactatttaactttgtgtaaagtggaccaagagaaaaccatattgtggaagacagtttttcacacattttagtatccgtgttgcacactgtgttagagattatgaaaaccattctagttcagtttatcacccaaagctatcacccaacactaactccttagtattctttcaaaggaagcaaatagtaagattacaatatagaatgagctaaaatatcaaggggaaagcttcatttcctctttattctctttatcgtccttcccattttaaccttttaactttgttttgatggtgccaagttgagtctgatgtacccattgttagctttggatagaatttaaagtatatcccagaattagctgggcatgttggtgcatgcctgtaatcccagctactcaggaggcaaggctggagaatcgcttgaacccgggaggcggaggttgcagtgagctgagattgcgccattgcactccatcctgggagacaagagcgaaactctgcctcaaaaaaaaaaagaatttaaagtatatcctttgaggtcattttatgtaacaattagatataacctcctgtgtatctctctgttcctcttcaaagttattaaaattcagcttaggtcatggatttttaatatgagggccagctgtactggtgtcaggtaggtgttttggggtgtagataatttaggactggagggctgagttaagttttaggaggagaatgtggttgagaatattttgaaaggaatttatggagtttgtgaaataacttcgaagtcctcttcctttacaatatttgaattcatatttgtaccttctcaaaatagtgattcatttttcctagaattacaggagggagctcttttactaatgttgttttgtttgcaactttgatggcttataataggaagtattctagttgtaaagaaaactctttagagacttttgactggtcagtatactgaggtgtgagatttgattcatgatgaagaaagcctatagattgccaaaaaattaattctccaaaccacctttcactctcagaaaatgagaccacaaaggagtatgctataaatcaaatttgccaaccaattatgtagatattactcattctaggactaatgatgatggtaaagaagttgccagtgttatggcaatgaaaatttcagaaaggaggagttgatgatcttctagatgtatatgaacacctgtctatatctgcatgtatatgttttgacctgcagtggttgcaatgttgatatgtgttcaagattattcctgtctacaaaactgaaggcccatgttcaaattgttctttattgggtgtttttatggtcacgtggtaacaattttcttacctaacctacaaaaggttctcttgatgaacatttttatttatatttactaatcttttttaaaaaaagctttcatagcattatataatcagatgaagaaagcccagtagaataaaaaaaaaattcattagcctagcctatattatgttttctgtcaaaggaaaacaaattctcaaataggaattctaaaaatatttactaaagtaaaataactacttaaaatgttttattccagttgggaaggaagggtacagggagaaatcgcaattatttaggggagaagtatatttattataagatggtgtcctcaaattagcctaccatggcacgtaggggcagcagctatattagatttactagaggtgctaagttagaacactaggcttttattgaggcaggttttaatattgatagatgctttttgtttggtttgtttcttctgggagagaatggaggacttaagtagaagtagctactgataacagactttctagtagcagtttccactccacggttacctttttagtttcatagtatcttttcacaaagtattacaaataagctagattctcccagtttgggaatgcaagtttgctacatttttagcctggcaatatttgtgtaggtattgccttattggaaattctggaaacctgatactgcaacctgcaatgtaggatgtttgtatggcatttaaaggtaatggtgatgtttattattctatactttgcattctgtgagagtaattttcactctgtcttaagtgtgagtaagcctcttctaaaaatcttgttcttgccaagaaatttataaatcacatacgaagacgtctgttgctaacagttaactttatgaggtaactatatccttctatttctctggactcatttttaaaaaatatgccgaatactgcatactgtttaaggtagtatataagtttatgagagaagtggagagctttcttccttgaaaagtcggtatttgttgagataccatttgcctcacagagaggtgttccccactcccatccccattgccagataataaatattttgagaaaagtgacctaaaacagctgaaatcttaggtgcatctgtctgcagacctccttaagcaggctgtatcttacaattcccttactgcactgggtaagtgttaacttagtttttgttgtttgctcttttgctttaaatattctccaaattaccatttatgcaacatggttagggttaatactgcatggtattcatttatcttgtttcatgaactttccagtactgtacaaggtcaacaaagtaatgcctgtggtatcctcatctctcacttttttactctgtgattttagcacagtaaggtactgcaaagaccttccttccaaatgttctccttgactttatttcttgggccaattcagtatcctcaacatcctaagattttgttgttttatcactgacctgtggttggcctgttttattctaatttccagaaaagtcaagtcccagtatttgcaatatcaaataactctaaaaccgatgtgtgattctaccttccttactatttttactgggcaaatgccctatttttttaattattattatttttaacttttgggacacacaaaaatcagcaattctcatgaagcgtttgttagtgtggcagacttgtctaattcctgaaactcattcatccccttgagccagccaatggggaggaataggataatgcaaacacatgttttgttttctcattttcaaataatttaccatgttaaaataaacttttctttgttttttatttgtagagtcagctaagtacccatatttaaatgccgtctttattatttttttgaggtctttgtttttgtctgtttttgttttgttttgttttgtaaataaggtaactgggcaatcaaacaccttttggggattctggctttagtattttatcagccattttaaaattaaatataaaaatcctttgtaagaaacttgcatcctaatttttctttattgcaattgaaagtgtaaataataagacaatgtaagtaagaccttcctaatgtctaatacaaactgggctccagcaagtggccctatttttattagggttttgaaggtttgtgtgtgtgtgtgcgtgcgtgtgtgtgtttttcttttttaaatgtatagtagagtggtgtctgtataagtgttacctgtagtggggttttgtccagcaagcctgaaatttatactttgaaataaaactactgggtttttaa

SEQ ID NO: 440568 - DNA, 3776 bp, Homo sapiens
gatacttaactatctagatcaaagtatagtcgaagcgtggtcgtctcaaggcggattctctagaatctatctgctcgttttcgttcttgtgactcggccgtcatcttacacacgtcccgactgggtaaatcctggagaaaatggctaaatagtttaaaataggttaattcgaacacaggaaaggatctatttgttgtttcttttgtctggtctcctgagttgttaattaggtgaaaaaagatctgcaatggccccctccctttcctaatctggcttttacatttattttgtgccttaaagattaactacaaagataaacatggccaaaaataaataaataaatatggccatatgtccgttgttgcttagtcttcccttgcagccttttacccttgatttctccttcatctctaccaaatatagcacaactcctcaagtaattttttttttttaagatggagttttgctcttgttgcccaggctagagtgcggtggcacaatcttggctcactgcaacctctgcctcctgggttcaagcaattcttctgtctcactactcaggaggcaaggctggagaatcgcttgaacccgggaggcggaggttgcagtgagctgagattgcgccattgcactccatcctgggagacaagagcgaaactctgcctcaaaaaaaaaaagaatttaaagtatatcctttgaggtcattttatgtaacaattagatataacctcctgtgtatctctctgttcctcttcaaagttattaaaattcagcttaggtcatggatttttaatatgagggccagctgtactggtgtcaggtaggtgttttggggtgtagataatttaggactggagggctgagttaagttttaggaggagaatgtggttgagaatattttgaaaggaatttatggagtttgtgaaataacttcgaagtcctcttcctttacaatatttgaattcatatttgtaccttctcaaaatagtgattcatttttcctagaattacaggagggagctcttttactaatgttgttttgtttgcaactttgatggcttataataggaagtattctagttgtaaagaaaactctttagagacttttgactggtcagtatactgaggtgtgagatttgattcatgatgaagaaagcctatagattgccaaaaaattaattctccaaaccacctttcactctcagaaaatgagaccacaaaggagtatgctataaatcaaatttgccaaccaattatgtagatattactcattctaggactaatgatgatggtaaagaagttgccagtgttatggcaatgaaaatttcagaaaggaggagttgatgatcttctagatgtatatgaacacctgtctatatctgcatgtatatgttttgacctgcagtggttgcaatgttgatatgtgttcaagattattcctgtctacaaaactgaaggcccatgttcaaattgttctttattgggtgtttttatggtcacgtggtaacaattttcttacctaacctacaaaaggttctcttgatgaacatttttatttatatttactaatcttttttaaaaaaagctttcatagcattatataatcagatgaagaaagcccagtagaataaaaaaaaaattcattagcctagcctatattatgttttctgtcaaaggaaaacaaattctcaaataggaattctaaaaatatttactaaagtaaaataactacttaaaatgttttattccagttgggaaggaagggtacagggagaaatcgcaattatttaggggagaagtatatttattataagatggtgtcctcaaattagcctaccatggcacgtaggggcagcagctatattagatttactagaggtgctaagttagaacactaggcttttattgaggcaggttttaatattgatagatgctttttgtttggtttgtttcttctgggagagaatggaggacttaagtagaagtagctactgataacagactttctagtagcagtttccactccacggttacctttttagtttcatagtatcttttcacaaagtattacaaataagctagattctcccagtttgggaatgcaagtttgctacatttttagcctggcaatatttgtgtaggtattgccttattggaaattctggaaacctgatactgcaacctgcaatgtaggatgtttgtatggcatttaaaggtaatggtgatgtttattattctatactttgcattctgtgagagtaattttcactctgtcttaagtgtgagtaagcctcttctaaaaatcttgttcttgccaagaaatttataaatcacatacgaagacgtctgttgctaacagttaactttatgaggtaactatatccttctatttctctggactcatttttaaaaaatatgccgaatactgcatactgtttaaggtagtatataagtttatgagagaagtggagagctttcttccttgaaaagtcggtatttgttgagataccatttgcctcacagagaggtgttccccactcccatccccattgccagataataaatattttgagaaaagtgacctaaaacagctgaaatcttaggtgcatctgtctgcagacctccttaagcaggctgtatcttacaattcccttactgcactgggtaagtgttaacttagtttttgttgtttgctcttttgctttaaatattctccaaattaccatttatgcaacatggttagggttaatactgcatggtattcatttatcttgtttcatgaactttccagtactgtacaaggtcaacaaagtaatgcctgtggtatcctcatctctcacttttttactctgtgattttagcacagtaaggtactgcaaagaccttccttccaaatgttctccttgactttatttcttgggccaattcagtatcctcaacatcctaagattttgttgttttatcactgacctgtggttggcctgttttattctaatttccagaaaagtcaagtcccagtatttgcaatatcaaataactctaaaaccgatgtgtgattctaccttccttactatttttactgggcaaatgccctatttttttaattattattatttttaacttttgggacacacaaaaatcagcaattctcatgaagcgtttgttagtgtggcagacttgtctaattcctgaaactcattcatccccttgagccagccaatggggaggaataggataatgcaaacacatgttttgttttctcattttcaaataatttaccatgttaaaataaacttttctttgttttttatttgtagagtcagctaagtacccatatttaaatgccgtctttattatttttttgaggtctttgtttttgtctgtttttgttttgttttgttttgtaaataaggtaactgggcaatcaaacaccttttggggattctggctttagtattttatcagccattttaaaattaaatataaaaatcctttgtaagaaacttgcatcctaatttttctttattgcaattgaaagtgtaaataataagacaatgtaagtaagaccttcctaatgtctaatacaaactgggctccagcaagtggccctatttttattagggttttgaaggtttgtgtgtgtgtgtgcgtgcgtgtgtgtgtttttcttttttaaatgtatagtagagtggtgtctgtataagtgttacctgtagtggggttttgtccagcaagcctgaaatttatactttgaaataaaactactgggtttttaa

SEQ ID NO: 440569 - DNA, 3103 bp, Homo sapiens
atcatcttcaattattaacatctttgtttttttaactaagagtttcacctctgaataaactactcattgaagttctttgacttctaccattcaaagaaaataatcactgactctgtataccagattaaatttgggacacaaaaagagtgatgagttctgttctctcttaatatcctcgtgctattaagtttctcttgagaacataagataaacatttctttgatgcacaatggtatcttcagcactgaatgagcggtgacattcacttaataaaccacgggttcttctttcaacttaattaatatcctttggaggaacctatgagaacctcatcatatcatgtacagcctattgtgccttactcataaagctcttctaaaatagagatttaagaagaagtattctagttgtaaagaaaactctttagagacttttgactggtcagtatactgaggtgtgagatttgattcatgatgaagaaagcctatagattgccaaaaaattaattctccaaaccacctttcactctcagaaaatgagaccacaaaggagtatgctataaatcaaatttgccaaccaattatgtagatattactcattctaggactaatgatgatggtaaagaagttgccagtgttatggcaatgaaaatttcagaaaggaggagttgatgatcttctagatgtatatgaacacctgtctatatctgcatgtatatgttttgacctgcagtggttgcaatgttgatatgtgttcaagattattcctgtctacaaaactgaaggcccatgttcaaattgttctttattgggtgtttttatggtcacgtggtaacaattttcttacctaacctacaaaaggttctcttgatgaacatttttatttatatttactaatcttttttaaaaaaagctttcatagcattatataatcagatgaagaaagcccagtagaataaaaaaaaaattcattagcctagcctatattatgttttctgtcaaaggaaaacaaattctcaaataggaattctaaaaatatttactaaagtaaaataactacttaaaatgttttattccagttgggaaggaagggtacagggagaaatcgcaattatttaggggagaagtatatttattataagatggtgtcctcaaattagcctaccatggcacgtaggggcagcagctatattagatttactagaggtgctaagttagaacactaggcttttattgaggcaggttttaatattgatagatgctttttgtttggtttgtttcttctgggagagaatggaggacttaagtagaagtagctactgataacagactttctagtagcagtttccactccacggttacctttttagtttcatagtatcttttcacaaagtattacaaataagctagattctcccagtttgggaatgcaagtttgctacatttttagcctggcaatatttgtgtaggtattgccttattggaaattctggaaacctgatactgcaacctgcaatgtaggatgtttgtatggcatttaaaggtaatggtgatgtttattattctatactttgcattctgtgagagtaattttcactctgtcttaagtgtgagtaagcctcttctaaaaatcttgttcttgccaagaaatttataaatcacatacgaagacgtctgttgctaacagttaactttatgaggtaactatatccttctatttctctggactcatttttaaaaaatatgccgaatactgcatactgtttaaggtagtatataagtttatgagagaagtggagagctttcttccttgaaaagtcggtatttgttgagataccatttgcctcacagagaggtgttccccactcccatccccattgccagataataaatattttgagaaaagtgacctaaaacagctgaaatcttaggtgcatctgtctgcagacctccttaagcaggctgtatcttacaattcccttactgcactgggtaagtgttaacttagtttttgttgtttgctcttttgctttaaatattctccaaattaccatttatgcaacatggttagggttaatactgcatggtattcatttatcttgtttcatgaactttccagtactgtacaaggtcaacaaagtaatgcctgtggtatcctcatctctcacttttttactctgtgattttagcacagtaaggtactgcaaagaccttccttccaaatgttctccttgactttatttcttgggccaattcagtatcctcaacatcctaagattttgttgttttatcactgacctgtggttggcctgttttattctaatttccagaaaagtcaagtcccagtatttgcaatatcaaataactctaaaaccgatgtgtgattctaccttccttactatttttactgggcaaatgccctatttttttaattattattatttttaacttttgggacacacaaaaatcagcaattctcatgaagcgtttgttagtgtggcagacttgtctaattcctgaaactcattcatccccttgagccagccaatggggaggaataggataatgcaaacacatgttttgttttctcattttcaaataatttaccatgttaaaataaacttttctttgttttttatttgtagagtcagctaagtacccatatttaaatgccgtctttattatttttttgaggtctttgtttttgtctgtttttgttttgttttgttttgtaaataaggtaactgggcaatcaaacaccttttggggattctggctttagtattttatcagccattttaaaattaaatataaaaatcctttgtaagaaacttgcatcctaatttttctttattgcaattgaaagtgtaaataataagacaatgtaagtaagaccttcctaatgtctaatacaaactgggctccagcaagtggccctatttttattagggttttgaaggtttgtgtgtgtgtgtgcgtgcgtgtgtgtgtttttcttttttaaatgtatagtagagtggtgtctgtataagtgttacctgtagtggggttttgtccagcaagcctgaaatttatactttgaaataaaactactgggtttttaa

SEQ ID NO: 440570 - DNA, 3051 bp, Homo sapiens
tgcccagtctcacacagtaggtttcctgggagagttggaattcaaatctgtgaatctgtctacagtctacagagttcatgttcttaattgggttattaaaagtgatgaatttttttaaaggaatgcttacttttaatattcagaatggacagtttagaagaacctcagaaaaaagtctttaaggctcgaaaaacgatgagagtgagtgatcgtcagcaacttgaagcagtgtacaaggtcaaagaagaactgttgaaaactgatgtcaagctgttaaatggcaaccatgaaaatggagatttggacccaacctcacctttggaaaacatggattacattaaagacaaggaagaggtgaatggcattgaagagatttgttttgatcctgaaggaagtaaagcagaatggaaggaaacaccctgtatcctaagtgttaatgtaaaaaacaagcaggatgatgatttaaattgtgaacctttgtctccccataatataactccagaaccagtctctaaactgcctgctgaaccagtttctggtgatccagcccctggtgatctggatgccggagatccagcctccggagtactggcctctggtgattccacctctggtgatcccacctctagcgagccctcctctagtgatgctgcctctggtgatgcaacctctggtgatgccccttctggtgatgtgtcccctggtgatgccacctctggtgatgccactgctgatgatctctcctctggtgatcccacctctagtgatcccatcccaggtgaaccggtccctgttgaacccatttctggtgattgtgccgctgatgatatagcctctagtgaaataacttctgttgatctggcttctggagcaccagcttccactgatccagcctctgatgatctggcctctggtgatctatcctctagtgaactggcctctgatgatctggccactggtgaactggcctctgatgagctgacttctgaatcaacctttgatcgtacctttgaaccaaagtctgtaccagtttgtgaaccagttcctgaaattgacaatatagaaccaagtagcaataaagatgatgattttcttgaaaaaaatggagctgatgaaaaattagagcaaattcagagtaaagactcattggatgagaaaaataaagctgataataatattgatgctaatgaagaaactctagaaacagatgatacaactatttgttcagatcgacctcctgaaaatgaaaagaaggtagaggaagatattatcacagagcttgctcttggagaagatgctatatctagcagtatggaaattgaccaaggtgaaaagaatgaagatgaaacttctgcagatcttgtagaaacgattaatgaaaatgttattgaagataacaaaagtgagaatatcttagaaaatacagactctatggagacagatgaaatcattcctattttggaaaagcttgcaccttctgaggatgaacttacttgcttttctaaaacatctctccttccaatcgatgagacaaatccagatttggaagagaaaatggaaagttcttttggttcaccatctaaacaagaaagtagtgagagtttgccaaaagaagcctttctggtcctctctgatgaagaggatatttcgggtgaaaaagatgagtctgaagttatatcgcaaaatgaaacgtgctctccaggttagcatataacttaaatgttaaagattttttattgactttgatgaactgtttaataaaacattatcataatgttttaaatttattttagctgcagagaaagttgagaatagtgatgactctatagaaagatgtcttaacttcatagaattcagaattagtgtgtgtactctgtgagtagcattgtactaaatactaagaagggagataaaataagtagaaaatatgcccttatagtctggaaatagagatgaagtagagcaccataacactgagataacagcttaagttagtacataattgactagagttgtagcagttctttcttgctatcacttagcgaacaaataacttagaactaaaagcctaatagtttaatctatttgcttcaagtgtaacaaattatattttcaattaatattcccaatgaaatcctgttctttaatattctttgtccaggaatgacagcaccattgttgtaagccagaaaccttaaagcttgattatccatttgataaagactttacccatttgctccctcagcccttttgattctacccagcctattctcttccccattttctgaatgagctccctgtaacccaattctcttatttgatattgtccgtctatgtcttagatctctgttacttttaggttgatttcaaactccttatgtaaaaggtacattaactttatggtttgttcagtacctatctctcccatctcttttattttatttattattcctagagaaaaagaatgagaaaaattctaccttcttttatggtcaaactgaaaaacattattcctctatgaaactttctaagcctgtggaagactgagaaaagcatgaatacctttcttttcccattatatcacattcttttagatttagacatctctgagagaagtgaccttgctagcataaaacaccatctaatttcttcaaagaaaaaaaaatggaggcaggtctaagagacagagacaacttttttccccaatatatcataccagcttttggaggtagagatttttttcttattaaaaaatggcttttttttttttttggccaggtaaggtggctcacacctataatcctaggactttgggaggctgaggcaggcagattgcttgagctcaggagttcgagaccagcctgggcaacatggtgagaccccgtctctacaaaagtacaaaaattagccaggcgtggtggcacttgtctgtagtccagggtacttgagggcctgaggtagggggatcacttgaacctgggtggtcgaggctgcagtgagccgagatcgcgccactactccagcctgggtgacaaagtaagaccctgcctc

SEQ ID NO: 440571 - DNA, 2323 bp, Homo sapiens
tgcccagtctcacacagtaggtttcctgggagagttggaattcaaatctgtgaatctgtctacagtctacagagttcatgttcttaattgggttattaaaagtgatgaatttttttaaaggaatgcttacttttaatattcagaatggacagtttagaagaacctcagaaaaaagtctttaaggctcgaaaaacgatgagagtgagtgatcgtcagcaacttgaagcagtgtacaaggtcaaagaagaactgttgaaaactgatgtcaagctgttaaatggcaaccatgaaaatggagatttggacccaacctcacctttggaaaacatggattacattaaagacaaggaagaggtgaatggcattgaagagatttgttttgatcctgaaggaagtaaagcagaatggaaggaaacaccctgtatcctaagtgttaatgtaaaaaacaagcaggatgatgatttaaattgtgaacctttgtctccccataatataactccagaaccagtctctaaactgcctgctgaaccagtttctggtgatccagcccctggtgatctggatgccggagatccagcctccggagtactggcctctggtgattccacctctggtgatcccacctctagcgagccctcctctagtgatgctgcctctggtgatgcaacctctggtgatgccccttctggtgatgtgtcccctggtgatgccacctctggtgatgccactgctgatgatctctcctctggtgatcccacctctagtgatcccatcccaggtgaaccggtccctgttgaacccatttctggtgattgtgccgctgatgatatagcctctagtgaaataacttctgttgatctggcttctggagcaccagcttccactgatccagcctctgatgatctggcctctggtgatctatcctctagtgaactggcctctgatgatctggccactggtgaactggcctctgatgagctgacttctgaatcaacctttgatcgtacctttgaaccaaagtctgtaccagtttgtgaaccagttcctgaaattgacaatatagaaccaagtagcaataaagatgatgattttcttgaaaaaaatggagctgatgaaaaattagagcaaattcagagtaaagactcattggatgagaaaaataaagctgataataatattgatgctaatgaagaaactctagaaacagatgatacaactatttgttcagatcgacctcctgaaaatgaaaagaaggtagaggaagatattatcacagagcttgctcttggagaagatgctatatctagcagtatggaaattgaccaaggtgaaaagaatgaagatgaaacttctgcagatcttgtagaaacgattaatgaaaatgttattgaagataacaaaagtgagaatatcttagaaaatacagactctatggagacagatgaaatcattcctattttggaaaagcttgcaccttctgaggatgaacttacttgcttttctaaaacatctctccttccaatcgatgagacaaatccagatttggaagagaaaatggaaagttcttttggttcaccatctaaacaagaaagtagtgagagtttgccaaaagaagcctttctggtcctctctgatgaagaggatatttcgggtgaaaaagatgagtctgaagttatatcgcaaaatgaaacgtgctctccagcagaagtagaaagtaatgaaaaggacaacagacctgaggaagaagagcaagtaatacatgaagatgatgaaagaccttctgagaaaaatgaattttctagacgaaaacgttctaaatcagaagacatggacaatgtacagtctaaacgtcgtcgatatatggaagaagaatatgaggcagaatttcaagtaaagattacagccaaaggagacattaaccagaaacttcaaaaggtattgtgtcaattataagttataaaccatattgaataaatagcaccactatcttcttctaggtttctgacattattctgtattttattgacataatgtggtttatcatagaaagaaagaacttgaagaaagtggttgagcttttaaagtctattactggccagatgtggtggatcacccctgtaatcccaatcctttgggaggctgaggtggatggatcacctgaagtcaggagttcaagaccagcctgaccaacatggtgaaactctgactctactaatacattagctggatgttgtggtgggtgcctgtaatcccagctacctgggaggctgaggcaggagaatcacttgcccgggaggtggaggtggcagtgagccgagatcat

SEQ ID NO: 440572 - DNA, 367 bp, Homo sapiens
gtaagagatttttcttgtatatggccccaagatacatgtagttctcttcagcatttagttggaatggcatataataatgttaaattttgcaaaaatttcttataatgtcatattaaaagtattgttataagttcaagagatctgtactacaacatagaaactatagtatagttaaaatcaatgtagtatattcttgaaaatagctgatagagcagattttaagtattgtcaccacacacaaaaaaggtaagtatgtgagatcatgcatatgtcagctagatttagccattctgcagtgtatgcatatttcaaacatgttgtataccataaatatatataatttttgtcaattaaaaaatagttttca

SEQ ID NO: 440573 - DNA, 7941 bp, Homo sapiens
tgcccagtctcacacagtaggtttcctgggagagttggaattcaaatctgtgaatctgtctacagtctacagagttcatgttcttaattgggttattaaaagtgatgaatttttttaaaggaatgcttacttttaatattcagaatggacagtttagaagaacctcagaaaaaagtctttaaggctcgaaaaacgatgagagtgagtgatcgtcagcaacttgaagcagtgtacaaggtcaaagaagaactgttgaaaactgatgtcaagctgttaaatggcaaccatgaaaatggagatttggacccaacctcacctttggaaaacatggattacattaaagacaaggaagaggtgaatggcattgaagagatttgttttgatcctgaaggaagtaaagcagaatggaaggaaacaccctgtatcctaagtgttaatgtaaaaaacaagcaggatgatgatttaaattgtgaacctttgtctccccataatataactccagaaccagtctctaaactgcctgctgaaccagtttctggtgatccagcccctggtgatctggatgccggagatccagcctccggagtactggcctctggtgattccacctctggtgatcccacctctagcgagccctcctctagtgatgctgcctctggtgatgcaacctctggtgatgccccttctggtgatgtgtcccctggtgatgccacctctggtgatgccactgctgatgatctctcctctggtgatcccacctctagtgatcccatcccaggtgaaccggtccctgttgaacccatttctggtgattgtgccgctgatgatatagcctctagtgaaataacttctgttgatctggcttctggagcaccagcttccactgatccagcctctgatgatctggcctctggtgatctatcctctagtgaactggcctctgatgatctggccactggtgaactggcctctgatgagctgacttctgaatcaacctttgatcgtacctttgaaccaaagtctgtaccagtttgtgaaccagttcctgaaattgacaatatagaaccaagtagcaataaagatgatgattttcttgaaaaaaatggagctgatgaaaaattagagcaaattcagagtaaagactcattggatgagaaaaataaagctgataataatattgatgctaatgaagaaactctagaaacagatgatacaactatttgttcagatcgacctcctgaaaatgaaaagaaggtagaggaagatattatcacagagcttgctcttggagaagatgctatatctagcagtatggaaattgaccaaggtgaaaagaatgaagatgaaacttctgcagatcttgtagaaacgattaatgaaaatgttattgaagataacaaaagtgagaatatcttagaaaatacagactctatggagacagatgaaatcattcctattttggaaaagcttgcaccttctgaggatgaacttacttgcttttctaaaacatctctccttccaatcgatgagacaaatccagatttggaagagaaaatggaaagttcttttggttcaccatctaaacaagaaagtagtgagagtttgccaaaagaagcctttctggtcctctctgatgaagaggatatttcgggtgaaaaagatgagtctgaagttatatcgcaaaatgaaacgtgctctccagcagaagtagaaagtaatgaaaaggacaacagacctgaggaagaagagcaagtaatacatgaagatgatgaaagaccttctgagaaaaatgaattttctagacgaaaacgttctaaatcagaagacatggacaatgtacagtctaaacgtcgtcgatatatggaagaagaatatgaggcagaatttcaagtaaagattacagccaaaggagacattaaccagaaacttcaaaaggttatacagtggttgctggaagaaaaattgtgtgcgctgcagtgtgctgtatttgataagactttggcagaattgaaaacacgagtggaaaagattgaatgtaacaagaggcataaaacagttctcactgaactacaggccaagatagccaggttaaccaaacgctttgaagcagccaaagaagatcttaagaaaagacatgaacatccacccaacccaccagtatcaccaggaaaaactgtaaatgatgtcaacagcaataataacatgtcttacagaaatgcaggcacagtgagacagatgctggagtccaaaagaaatgtaagcgagagtgcaccaccatcctttcaaactcctgtgaatacagtatcttcaaccaatcttgtcactcctccagcagttgtcagtagtcaacctaaattgcagactccagtgacttcgggttccctcacagcaacgtcagttcttcctgcacccaatacagctactgtagttgctactactcaggtgcctagtggaaatccccagcctacaatctctttacagcctttgccagtgattttgcatgtacctgttgcagtatcctcccagcctcagcttctacagagccatccagggactttggtgactaatcaaccatctggcaatgttgaattcatttctgtgcaaagcccacctacagtgagtggtcttaccaaaaatccagtatccttgccatccttgccaaatcccactaaaccaaacaacgttccttctgtgcccagtcctagtattcaaaggaaccctactgccagtgctgcaccattgggaacaacacttgctgtgcaggctgttccaacagcacactctattgtacaagccacaaggacttctttacccacagtgggcccatcaggactctatagtccatcaactaatcgaggtcctatacagatgaaaattccaatttctgcatttagtacttcgtctgctgcagaacagaacagcaataccaccccaagaattgaaaaccagacaaacaaaacaatagatgcttctgtcagtaagaaagcagctgatagcacatcacagtgtggaaaagccactggcagtgattcaagtggtgtcattgatctcacaatggatgatgaagagagtggagcttcacaagaccccaaaaaactaaatcacactcctgtatcaaccatgagttcttctcagcctgtgtcacgaccattgcaacccatacaaccagcaccgcctcttcaaccatctggggtgccaacaagtggaccatctcagaccaccatacacttactacctacagctccaactaccgtgaatgtaacacatcgtccagtaactcaggtgaccacaagactccctgtaccaagagctcctgcaaaccaccaggtggtttatacaactcttcctgcaccaccagctcaggctcccttgcgaggaactgttatgcaggctcctgctgttcggcaggtcaatccccaaaatagtgttacagttcgagtgcctcaaacaaccacatatgttgtaaacaatggactaaccctgggatcaacaggacctcagctcacagtgcatcaccgaccaccacaagtgcatactgagcccccacgccccgtgcacccagcacccttaccagaagctccacaaccacagcgtctgcccccagaagctgccagcacatctctgcctcagaagccacacttgaagttagcacgcgttcagagtcaaaatggcatagtactgtcatggagtgtcctggaggtggatcgaagctgtgccactgttgatagctaccatctctatgcttaccatgaggaacccagtgccactgtgccctcacaatggaaaaagattggggaagtcaaggcacttcccttgcccatggcatgtactctcacccagtttgtatctggtagcaaatactactttgcagtacgagccaaggatatttatggacgttttgggcctttctgtgatcctcagtcaacagatgtgatctcttctacccagagcagttaaaccttggagcctttatattttcctcttttaaaatttccaccttttggtcttgtttttaatcttgtgcatgataccccatgtaaaatccaccttgtgcaagatttcttggacagatgtgtgtatacactacatttgtttataaccagaagcaaaataaactcagcccacaaagctagaatcttttcctggacagtttaggctttggggtttggaaatgtaaatgtgtaccttgctttagttttgaggctggggaatatgtgtgggtgtttatgtgtgtttttccttatgtaggtgttattgcattggagtctcccattttcattctcaaatttacctcttaaagtacgaagtaagtagatcaaaggatttgagatgtgtaactggcatgattctgcttttgaaggatctatagtatcattttagttaagtgggtcaaacagaatcaaaacaaaacccaaagaaataaataaaaaacaaaatggctaaatagtttaaaataggttaattcgaacacaggaaaggatctatttgttgtttcttttgtctggtctcctgagttgttaattaggtgaaaaaagatctgcaatggccccctccctttcctaatctggcttttacatttattttgtgccttaaagattaactacaaagataaacatggccaaaaataaataaataaatatggccatatgtccgttgttgcttagtcttcccttgcagccttttacccttgatttctccttcatctctaccaaatatagcacaactcctcaagtaattttttttttttaagatggagttttgctcttgttgcagtgagctgagattgcgccattgcactccatcctgggagacaagagcgaaactctgcctcaaaaaaaaaaagaatttaaagtatatcctttgaggtcattttatgtaacaattagatataacctcctgtgtatctctctgttcctcttcaaagttattaaaattcagcttaggtcatggatttttaatatgagggccagctgtactggtgtcaggtaggtgttttggggtgtagataatttaggactggagggctgagttaagttttaggaggagaatgtggttgagaatattttgaaaggaatttatggagtttgtgaaataacttcgaagtcctcttcctttacaatatttgaattcatatttgtaccttctcaaaatagtgattcatttttcctagaattacaggagggagctcttttactaatgttgttttgtttgcaactttgatggcttataataggaagtattctagttgtaaagaaaactctttagagacttttgactggtcagtatactgaggtgtgagatttgattcatgatgaagaaagcctatagattgccaaaaaattaattctccaaaccacctttcactctcagaaaatgagaccacaaaggagtatgctataaatcaaatttgccaaccaattatgtagatattactcattctaggactaatgatgatggtaaagaagttgccagtgttatggcaatgaaaatttcagaaaggaggagttgatgatcttctagatgtatatgaacacctgtctatatctgcatgtatatgttttgacctgcagtggttgcaatgttgatatgtgttcaagattattcctgtctacaaaactgaaggcccatgttcaaattgttctttattgggtgtttttatggtcacgtggtaacaattttcttacctaacctacaaaaggttctcttgatgaacatttttatttatatttactaatcttttttaaaaaaagctttcatagcattatataatcagatgaagaaagcccagtagaataaaaaaaaaattcattagcctagcctatattatgttttctgtcaaaggaaaacaaattctcaaataggaattctaaaaatatttactaaagtaaaataactacttaaaatgttttattccagttgggaaggaagggtacagggagaaatcgcaattatttaggggagaagtatatttattataagatggtgtcctcaaattagcctaccatggcacgtaggggcagcagctatattagatttactagaggtgctaagttagaacactaggcttttattgaggcaggttttaatattgatagatgctttttgtttggtttgtttcttctgggagagaatggaggacttaagtagaagtagctactgataacagactttctagtagcagtttccactccacggttacctttttagtttcatagtatcttttcacaaagtattacaaataagctagattctcccagtttgggaatgcaagtttgctacatttttagcctggcaatatttgtgtaggtattgccttattggaaattctggaaacctgatactgcaacctgcaatgtaggatgtttgtatggcatttaaaggtaatggtgatgtttattattctatactttgcattctgtgagagtaattttcactctgtcttaagtgtgagtaagcctcttctaaaaatcttgttcttgccaagaaatttataaatcacatacgaagacgtctgttgctaacagttaactttatgaggtaactatatccttctatttctctggactcatttttaaaaaatatgccgaatactgcatactgtttaaggtagtatataagtttatgagagaagtggagagctttcttccttgaaaagtcggtatttgttgagataccatttgcctcacagagaggtgttccccactcccatccccattgccagataataaatattttgagaaaagtgacctaaaacagctgaaatcttaggtgcatctgtctgcagacctccttaagcaggctgtatcttacaattcccttactgcactgggtaagtgttaacttagtttttgttgtttgctcttttgctttaaatattctccaaattaccatttatgcaacatggttagggttaatactgcatggtattcatttatcttgtttcatgaactttccagtactgtacaaggtcaacaaagtaatgcctgtggtatcctcatctctcacttttttactctgtgattttagcacagtaaggtactgcaaagaccttccttccaaatgttctccttgactttatttcttgggccaattcagtatcctcaacatcctaagattttgttgttttatcactgacctgtggttggcctgttttattctaatttccagaaaagtcaagtcccagtatttgcaatatcaaataactctaaaaccgatgtgtgattctaccttccttactatttttactgggcaaatgccctatttttttaattattattatttttaacttttgggacacacaaaaatcagcaattctcatgaagcgtttgttagtgtggcagacttgtctaattcctgaaactcattcatccccttgagccagccaatggggaggaataggataatgcaaacacatgttttgttttctcattttcaaataatttaccatgttaaaataaacttttctttgttttttatttgtagagtcagctaagtacccatatttaaatgccgtctttattatttttttgaggtctttgtttttgtctgtttttgttttgttttgttttgtaaataaggtaactgggcaatcaaacaccttttggggattctggctttagtattttatcagccattttaaaattaaatataaaaatcctttgtaagaaacttgcatcctaatttttctttattgcaattgaaagtgtaaataataagacaatgtaagtaagaccttcctaatgtctaatacaaactgggctccagcaagtggccctatttttattagggttttgaaggtttgtgtgtgtgtgtgcgtgcgtgtgtgtgtttttcttttttaaatgtatagtagagtggtgtctgtataagtgttacctgtagtggggttttgtccagcaagcctgaaatttatactttgaaataaaactactgggtttttaa

SEQ ID NO: 440574 - DNA, 8071 bp, Homo sapiens
tgcccagtctcacacagtaggtttcctgggagagttggaattcaaatctgtgaatctgtctacagtctacagagttcatgttcttaattgggttattaaaagtgatgaatttttttaaaggaatgcttacttttaatattcagaatggacagtttagaagaacctcagaaaaaagtctttaaggctcgaaaaacgatgagagtgagtgatcgtcagcaacttgaagcagtgtacaaggtcaaagaagaactgttgaaaactgatgtcaagctgttaaatggcaaccatgaaaatggagatttggacccaacctcacctttggaaaacatggattacattaaagacaaggaagaggtgaatggcattgaagagatttgttttgatcctgaaggaagtaaagcagaatggaaggaaacaccctgtatcctaagtgttaatgtaaaaaacaagcaggatgatgatttaaattgtgaacctttgtctccccataatataactccagaaccagtctctaaactgcctgctgaaccagtttctggtgatccagcccctggtgatctggatgccggagatccagcctccggagtactggcctctggtgattccacctctggtgatcccacctctagcgagccctcctctagtgatgctgcctctggtgatgcaacctctggtgatgccccttctggtgatgtgtcccctggtgatgccacctctggtgatgccactgctgatgatctctcctctggtgatcccacctctagtgatcccatcccaggtgaaccggtccctgttgaacccatttctggtgattgtgccgctgatgatatagcctctagtgaaataacttctgttgatctggcttctggagcaccagcttccactgatccagcctctgatgatctggcctctggtgatctatcctctagtgaactggcctctgatgatctggccactggtgaactggcctctgatgagctgacttctgaatcaacctttgatcgtacctttgaaccaaagtctgtaccagtttgtgaaccagttcctgaaattgacaatatagaaccaagtagcaataaagatgatgattttcttgaaaaaaatggagctgatgaaaaattagagcaaattcagagtaaagactcattggatgagaaaaataaagctgataataatattgatgctaatgaagaaactctagaaacagatgatacaactatttgttcagatcgacctcctgaaaatgaaaagaaggtagaggaagatattatcacagagcttgctcttggagaagatgctatatctagcagtatggaaattgaccaaggtgaaaagaatgaagatgaaacttctgcagatcttgtagaaacgattaatgaaaatgttattgaagataacaaaagtgagaatatcttagaaaatacagactctatggagacagatgaaatcattcctattttggaaaagcttgcaccttctgaggatgaacttacttgcttttctaaaacatctctccttccaatcgatgagacaaatccagatttggaagagaaaatggaaagttcttttggttcaccatctaaacaagaaagtagtgagagtttgccaaaagaagcctttctggtcctctctgatgaagaggatatttcgggtgaaaaagatgagtctgaagttatatcgcaaaatgaaacgtgctctccagcagaagtagaaagtaatgaaaaggacaacagacctgaggaagaagagcaagtaatacatgaagatgatgaaagaccttctgagaaaaatgaattttctagacgaaaacgttctaaatcagaagacatggacaatgtacagtctaaacgtcgtcgatatatggaagaagaatatgaggcagaatttcaagtaaagattacagccaaaggagacattaaccagaaacttcaaaaggttatacagtggttgctggaagaaaaattgtgtgcgctgcagtgtgctgtatttgataagactttggcagaattgaaaacacgagtggaaaagattgaatgtaacaagaggcataaaacagttctcactgaactacaggccaagatagccaggttaaccaaacgctttgaagcagccaaagaagatcttaagaaaagacatgaacatccacccaacccaccagtatcaccaggaaaaactgtaaatgatgtcaacagcaataataacatgtcttacagaaatgcaggcacagtgagacagatgctggagtccaaaagaaatgtaagcgagagtgcaccaccatcctttcaaactcctgtgaatacagtatcttcaaccaatcttgtcactcctccagcagttgtcagtagtcaacctaaattgcagactccagtgacttcgggttccctcacagcaacgtcagttcttcctgcacccaatacagctactgtagttgctactactcaggtgcctagtggaaatccccagcctacaatctctttacagcctttgccagtgattttgcatgtacctgttgcagtatcctcccagcctcagcttctacagagccatccagggactttggtgactaatcaaccatctggcaatgttgaattcatttctgtgcaaagcccacctacagtgagtggtcttaccaaaaatccagtatccttgccatccttgccaaatcccactaaaccaaacaacgttccttctgtgcccagtcctagtattcaaaggaaccctactgccagtgctgcaccattgggaacaacacttgctgtgcaggctgttccaacagcacactctattgtacaagccacaaggacttctttacccacagtgggcccatcaggactctatagtccatcaactaatcgaggtcctatacagatgaaaattccaatttctgcatttagtacttcgtctgctgcagaacagaacagcaataccaccccaagaattgaaaaccagacaaacaaaacaatagatgcttctgtcagtaagaaagcagctgatagcacatcacagtgtggaaaagccactggcagtgattcaagtggtgtcattgatctcacaatggatgatgaagagagtggagcttcacaagaccccaaaaaactaaatcacactcctgtatcaaccatgagttcttctcagcctgtgtcacgaccattgcaacccatacaaccagcaccgcctcttcaaccatctggggtgccaacaagtggaccatctcagaccaccatacacttactacctacagctccaactaccgtgaatgtaacacatcgtccagtaactcaggtgaccacaagactccctgtaccaagagctcctgcaaaccaccaggtggtttatacaactcttcctgcaccaccagctcaggctcccttgcgaggaactgttatgcaggctcctgctgttcggcaggtcaatccccaaaatagtgttacagttcgagtgcctcaaacaaccacatatgttgtaaacaatggactaaccctgggatcaacaggacctcagctcacagtgcatcaccgaccaccacaagtgcatactgagcccccacgccccgtgcacccagcacccttaccagaagctccacaaccacagcgtctgcccccagaagctgccagcacatctctgcctcagaagccacacttgaagttagcacgcgttcagagtcaaaatggcatagtactgtcatggagtgtcctggaggtggatcgaagctgtgccactgttgatagctaccatctctatgcttaccatgaggaacccagtgccactgtgccctcacaatggaaaaagattggggaagtcaaggcacttcccttgcccatggcatgtactctcacccagtttgtatctggtagcaaatactactttgcagtacgagccaaggatatttatggacgttttgggcctttctgtgatcctcagtcaacagatgtgatctcttctacccagagcagttaaaccttggagcctttatattttcctcttttaaaatttccaccttttggtcttgtttttaatcttgtgcatgataccccatgtaaaatccaccttgtgcaagatttcttggacagatgtgtgtatacactacatttgtttataaccagaagcaaaataaactcagcccacaaagctagaatcttttcctggacagtttaggctttggggtttggaaatgtaaatgtgtaccttgctttagttttgaggctggggaatatgtgtgggtgtttatgtgtgtttttccttatgtaggtgttattgcattggagtctcccattttcattctcaaatttacctcttaaagtacgaagtaagtagatcaaaggatttgagatgtgtaactggcatgattctgcttttgaaggatctatagtatcattttagttaagtgggtcaaacagaatcaaaacaaaacccaaagaaataaataaaaaacaaaatggctaaatagtttaaaataggttaattcgaacacaggaaaggatctatttgttgtttcttttgtctggtctcctgagttgttaattaggtgaaaaaagatctgcaatggccccctccctttcctaatctggcttttacatttattttgtgccttaaagattaactacaaagataaacatggccaaaaataaataaataaatatggccatatgtccgttgttgcttagtcttcccttgcagccttttacccttgatttctccttcatctctaccaaatatagcacaactcctcaagtaattttttttttttaagatggagttttgctcttgttgcccaggctagagtgcggtggcacaatcttggctcactgcaacctctgcctcctgggttcaagcaattcttctgtctcactactcaggaggcaaggctggagaatcgcttgaacccgggaggcggaggttgcagtgagctgagattgcgccattgcactccatcctgggagacaagagcgaaactctgcctcaaaaaaaaaaagaatttaaagtatatcctttgaggtcattttatgtaacaattagatataacctcctgtgtatctctctgttcctcttcaaagttattaaaattcagcttaggtcatggatttttaatatgagggccagctgtactggtgtcaggtaggtgttttggggtgtagataatttaggactggagggctgagttaagttttaggaggagaatgtggttgagaatattttgaaaggaatttatggagtttgtgaaataacttcgaagtcctcttcctttacaatatttgaattcatatttgtaccttctcaaaatagtgattcatttttcctagaattacaggagggagctcttttactaatgttgttttgtttgcaactttgatggcttataataggaagtattctagttgtaaagaaaactctttagagacttttgactggtcagtatactgaggtgtgagatttgattcatgatgaagaaagcctatagattgccaaaaaattaattctccaaaccacctttcactctcagaaaatgagaccacaaaggagtatgctataaatcaaatttgccaaccaattatgtagatattactcattctaggactaatgatgatggtaaagaagttgccagtgttatggcaatgaaaatttcagaaaggaggagttgatgatcttctagatgtatatgaacacctgtctatatctgcatgtatatgttttgacctgcagtggttgcaatgttgatatgtgttcaagattattcctgtctacaaaactgaaggcccatgttcaaattgttctttattgggtgtttttatggtcacgtggtaacaattttcttacctaacctacaaaaggttctcttgatgaacatttttatttatatttactaatcttttttaaaaaaagctttcatagcattatataatcagatgaagaaagcccagtagaataaaaaaaaaattcattagcctagcctatattatgttttctgtcaaaggaaaacaaattctcaaataggaattctaaaaatatttactaaagtaaaataactacttaaaatgttttattccagttgggaaggaagggtacagggagaaatcgcaattatttaggggagaagtatatttattataagatggtgtcctcaaattagcctaccatggcacgtaggggcagcagctatattagatttactagaggtgctaagttagaacactaggcttttattgaggcaggttttaatattgatagatgctttttgtttggtttgtttcttctgggagagaatggaggacttaagtagaagtagctactgataacagactttctagtagcagtttccactccacggttacctttttagtttcatagtatcttttcacaaagtattacaaataagctagattctcccagtttgggaatgcaagtttgctacatttttagcctggcaatatttgtgtaggtattgccttattggaaattctggaaacctgatactgcaacctgcaatgtaggatgtttgtatggcatttaaaggtaatggtgatgtttattattctatactttgcattctgtgagagtaattttcactctgtcttaagtgtgagtaagcctcttctaaaaatcttgttcttgccaagaaatttataaatcacatacgaagacgtctgttgctaacagttaactttatgaggtaactatatccttctatttctctggactcatttttaaaaaatatgccgaatactgcatactgtttaaggtagtatataagtttatgagagaagtggagagctttcttccttgaaaagtcggtatttgttgagataccatttgcctcacagagaggtgttccccactcccatccccattgccagataataaatattttgagaaaagtgacctaaaacagctgaaatcttaggtgcatctgtctgcagacctccttaagcaggctgtatcttacaattcccttactgcactgggtaagtgttaacttagtttttgttgtttgctcttttgctttaaatattctccaaattaccatttatgcaacatggttagggttaatactgcatggtattcatttatcttgtttcatgaactttccagtactgtacaaggtcaacaaagtaatgcctgtggtatcctcatctctcacttttttactctgtgattttagcacagtaaggtactgcaaagaccttccttccaaatgttctccttgactttatttcttgggccaattcagtatcctcaacatcctaagattttgttgttttatcactgacctgtggttggcctgttttattctaatttccagaaaagtcaagtcccagtatttgcaatatcaaataactctaaaaccgatgtgtgattctaccttccttactatttttactgggcaaatgccctatttttttaattattattatttttaacttttgggacacacaaaaatcagcaattctcatgaagcgtttgttagtgtggcagacttgtctaattcctgaaactcattcatccccttgagccagccaatggggaggaataggataatgcaaacacatgttttgttttctcattttcaaataatttaccatgttaaaataaacttttctttgttttttatttgtagagtcagctaagtacccatatttaaatgccgtctttattatttttttgaggtctttgtttttgtctgtttttgttttgttttgttttgtaaataaggtaactgggcaatcaaacaccttttggggattctggctttagtattttatcagccattttaaaattaaatataaaaatcctttgtaagaaacttgcatcctaatttttctttattgcaattgaaagtgtaaataataagacaatgtaagtaagaccttcctaatgtctaatacaaactgggctccagcaagtggccctatttttattagggttttgaaggtttgtgtgtgtgtgtgcgtgcgtgtgtgtgtttttcttttttaaatgtatagtagagtggtgtctgtataagtgttacctgtagtggggttttgtccagcaagcctgaaatttatactttgaaataaaactactgggtttttaa

SEQ ID NO: 440575 - DNA, 7232 bp, Homo sapiens
tgcccagtctcacacagtaggtttcctgggagagttggaattcaaatctgtgaatctgtctacagtctacagagttcatgttcttaattgggttattaaaagtgatgaatttttttaaaggaatgcttacttttaatattcagaatggacagtttagaagaacctcagaaaaaagtctttaaggctcgaaaaacgatgagagtgagtgatcgtcagcaacttgaagcagtgtacaaggtcaaagaagaactgttgaaaactgatgtcaagctgttaaatggcaaccatgaaaatggagatttggacccaacctcacctttggaaaacatggattacattaaagacaaggaagaggtgaatggcattgaagagatttgttttgatcctgaaggaagtaaagcagaatggaaggaaacaccctgtatcctaagtgttaatgtaaaaaacaagcaggatgatgatttaaattgtgaacctttgtctccccataatataactccagaaccagtctctaaactgcctgctgaaccagtttctggtgatccagcccctggtgatctggatgccggagatccagcctccggagtactggcctctggtgattccacctctggtgatcccacctctagcgagccctcctctagtgatgctgcctctggtgatgcaacctctggtgatgccccttctggtgatgtgtcccctggtgatgccacctctggtgatgccactgctgatgatctctcctctggtgatcccacctctagtgatcccatcccaggtgaaccggtccctgttgaacccatttctggtgattgtgccgctgatgatatagcctctagtgaaataacttctgttgatctggcttctggagcaccagcttccactgatccagcctctgatgatctggcctctggtgatctatcctctagtgaactggcctctgatgatctggccactggtgaactggcctctgatgagctgacttctgaatcaacctttgatcgtacctttgaaccaaagtctgtaccagtttgtgaaccagttcctgaaattgacaatatagaaccaagtagcaataaagatgatgattttcttgaaaaaaatggagctgatgaaaaattagagcaaattcagagtaaagactcattggatgagaaaaataaagctgataataatattgatgctaatgaagaaactctagaaacagatgatacaactatttgttcagatcgacctcctgaaaatgaaaagaaggtagaggaagatattatcacagagcttgctcttggagaagatgctatatctagcagtatggaaattgaccaaggtgaaaagaatgaagatgaaacttctgcagatcttgtagaaacgattaatgaaaatgttattgaagataacaaaagtgagaatatcttagaaaatacagactctatggagacagatgaaatcattcctattttggaaaagcttgcaccttctgaggatgaacttacttgcttttctaaaacatctctccttccaatcgatgagacaaatccagatttggaagagaaaatggaaagttcttttggttcaccatctaaacaagaaagtagtgagagtttgccaaaagaagcctttctggtcctctctgatgaagaggatatttcgggtgaaaaagatgagtctgaagttatatcgcaaaatgaaacgtgctctccagcagaagtagaaagtaatgaaaaggacaacagacctgaggaagaagagcaagtaatacatgaagatgatgaaagaccttctgagaaaaatgaattttctagacgaaaacgttctaaatcagaagacatggacaatgtacagtctaaacgtcgtcgatatatggaagaagaatatgaggcagaatttcaagtaaagattacagccaaaggagacattaaccagaaacttcaaaaggttatacagtggttgctggaagaaaaattgtgtgcgctgcagtgtgctgtatttgataagactttggcagaattgaaaacacgagtggaaaagattgaatgtaacaagaggcataaaacagttctcactgaactacaggccaagatagccaggttaaccaaacgctttgaagcagccaaagaagatcttaagaaaagacatgaacatccacccaacccaccagtatcaccaggaaaaactgtaaatgatgtcaacagcaataataacatgtcttacagaaatgcaggcacagtgagacagatgctggagtccaaaagaaatgtaagcgagagtgcaccaccatcctttcaaactcctgtgaatacagtatcttcaaccaatcttgtcactcctccagcagttgtcagtagtcaacctaaattgcagactccagtgacttcgggttccctcacagcaacgtcagttcttcctgcacccaatacagctactgtagttgctactactcaggtgcctagtggaaatccccagcctacaatctctttacagcctttgccagtgattttgcatgtacctgttgcagtatcctcccagcctcagcttctacagagccatccagggactttggtgactaatcaaccatctggcaatgttgaattcatttctgtgcaaagcccacctacagtgagtggtcttaccaaaaatccagtatccttgccatccttgccaaatcccactaaaccaaacaacgttccttctgtgcccagtcctagtattcaaaggaaccctactgccagtgctgcaccattgggaacaacacttgctgtgcaggctgttccaacagcacactctattgtacaagccacaaggacttctttacccacagtgggcccatcaggactctatagtccatcaactaatcgaggtcctatacagatgaaaattccaatttctgcatttagtacttcgtctgctgcagaacagaacagcaataccaccccaagaattgaaaaccagacaaacaaaacaatagatgcttctgtcagtaagaaagcagctgatagcacatcacagtgtggaaaagccactggcagtgattcaagtggtgtcattgatctcacaatggatgatgaagagagtggagcttcacaagaccccaaaaaactaaatcacactcctgtatcaaccatgagttcttctcagcctgtgtcacgaccattgcaacccatacaaccagcaccgcctcttcaaccatctggggtgccaacaagtggaccatctcagaccaccatacacttactacctacagctccaactaccgtgaatgtaacacatcgtccagtaactcaggtgaccacaagactccctgtaccaagagctcctgcaaaccaccaggtggtttatacaactcttcctgcaccaccagctcaggctcccttgcgaggaactgttatgcaggctcctgctgttcggcaggtcaatccccaaaatagtgttacagttcgagtgcctcaaacaaccacatatgttgtaaacaatggactaaccctgggatcaacaggacctcagctcacagtgcatcaccgaccaccacaagtgcatactgagcccccacgccccgtgcacccagcacccttaccagaagctccacaaccacagcgtctgcccccagaagctgccagcacatctctgcctcagaagccacacttgaagttagcacgcgttcagagtcaaaatggcatagtactgtcatggagtgtcctggaggtggatcgaagctgtgccactgttgatagctaccatctctatgcttaccatgaggaacccagtgccactgtgccctcacaatggaaaaagattggggaagtcaaggcacttcccttgcccatggcatgtactctcacccagtttgtatctggtagcaaatactactttgcagtacgagccaaggatatttatggacgttttgggcctttctgtgatcctcagtcaacagatgtgatctcttctacccagagcagttaaaccttggagcctttatattttcctcttttaaaatttccaccttttggtcttgtttttaatcttgtgcatgataccccatgtaaaatccaccttgtgcaagatttcttggacagatgtgtgtatacactacatttgtttataaccagaagcaaaataaactcagcccacaaagctagaatcttttcctggacagtttaggctttggggtttggaaatgtaaatgtgtaccttgctttagttttgaggctggggaatatgtgtgggtgtttatgtgtgtttttccttatgtaggtgttattgcattggagtctcccattttcattctcaaatttacctcttaaagtacgaagtaagtagatcaaaggatttgagatgtgtaactggcatgattctgcttttgaaggatctatagtatcattttagttaagtgggtcaaacagaatcaaaacaaaacccaaagaaataaataaaaaacaaaatggctaaatagtttaaaataggttaattcgaacacaggaaaggatctatttgttgtttcttttgtctggtctcctgagttgttaattaggtgaaaaaagatctgcaatggccccctccctttcctaatctggcttttacatttattttgtgccttaaagattaactacaaagataaacatggccaaaaataaataaataaatatggccatatgtccgttgttgcttagtcttcccttgcagccttttacccttgatttctccttcatctctaccaaatatagcacaactcctcaagtaattttttttttttaagatggagttttgctcttgttgcagtgagctgagattgcgccattgcactccatcctgggagacaagagcgaaactctgcctcaaaaaaaaaaagaatttaaagtatatcctttgaggtcattttatgtaacaattagatataacctcctgtgtatctctctgttcctcttcaaagttattaaaattcagcttaggtcatggatttttaatatgagggccagctgtactggtgtcaggtaggtgttttggggtgtagataatttaggactggagggctgagttaagttttaggaggagaatgtggttgagaatattttgaaaggaatttatggagtttgtgaaataacttcgaagtcctcttcctttacaatatttgaattcatatttgtaccttctcaaaatagtgattcatttttcctagaattacaggagggagctcttttactaatgttgttttgtttgcaactttgatggcttataataggaagtattctagttgtaaagaaaactctttagagacttttgactggtcagtatactgaggtgtgagatttgattcatgatgaagaaagcctatagattgccaaaaaattaattctccaaaccacctttcactctcagaaaatgagaccacaaaggagtatgctataaatcaaatttgccaaccaattatgtagatattactcattctaggactaatgatgatggtaaagaagttgccagtgttatggcaatgaaaatttcagaaaggaggagttgatgatcttctagatgtatatgaacacctgtctatatctgcatgtatatgttttgacctgcagtggttgcaatgttgatatgtgttcaagattattcctgtctacaaaactgaaggcccatgttcaaattgttctttattgggtgtttttatggtcacgtggtaacaattttcttacctaacctacaaaaggttctcttgatgaacatttttatttatatttactaatcttttttaaaaaaagctttcatagcattatataatcagatgaagaaagcccagtagaataaaaaaaaaattcattagcctagcctatattatgttttctgtcaaaggaaaacaaattctcaaataggaattctaaaaatatttactaaagtaaaataactacttaaaatgttttattccagttgggaaggaagggtacagggagaaatcgcaattatttaggggagaagtatatttattataagatggtgtcctcaaattagcctaccatggcacgtaggggcagcagctatattagatttactagaggtgctaagttagaacactaggcttttattgaggcaggttttaatattgatagatgctttttgtttggtttgtttcttctgggagagaatggaggacttaagtagaagtagctactgataacagactttctagtagcagtttccactccacggttacctttttagtttcatagtatcttttcacaaagtattacaaataagctagattctcccagtttgggaatgcaagtttgctacatttttagcctggcaatatttgtgtaggtattgccttattggaaattctggaaacctgatactgcaacctgcaatgtaggatgtttgtatggcatttaaaggtaatggtgatgtttattattctatactttgcattctgtgagagtaattttcactctgtcttaagtgtgagtaagcctcttctaaaaatcttgttcttgccaagaaatttataaatcacatacgaagacgtctgttgctaacagttaactttatgaggtaactatatccttctatttctctggactcatttttaaaaaatatgccgaatactgcatactgtttaaggtagtatataagtttatgagagaagtggagagctttcttccttgaaaagtcggtatttgttgagataccatttgcctcacagagaggtgttccccactcccatccccattgccagataataaatattttgagaaaagtgacctaaaacagctgaaatcttaggtgcatctgtctgcagacctccttaagcaggctgtatcttacaattcccttactgcactgggtaagtgttaacttagtttttgttgtttgctcttttgctttaaatattctccaaattaccatttatgcaacatggttagggttaatactgcatggtattcatttatcttgtttcatgaactttccagtactgtacaaggtcaacaaagtaatgcctgtggtatcctcatctctcacttttttactctgtgattttagcacagtaaggtactgcaaagaccttccttccaaatgttctccttgactttatttcttgggccaattcagtatcctcaacatcctaagattttgttgttttatcactgacctgtggttggcctgttttattctaatttccagaaaagtcaagtcccagtatttgcaatatcaaataactctattttttaattaattaatattttaaa

SEQ ID NO: 440576 - DNA, 5842 bp, Homo sapiens
tgcccagtctcacacagtaggtttcctgggagagttggaattcaaatctgtgaatctgtctacagtctacagagttcatgttcttaattgggttattaaaagtgatgaatttttttaaaggaatgcttacttttaatattcagaatggacagtttagaagaacctcagaaaaaagtctttaaggctcgaaaaacgatgagagtgagtgatcgtcagcaacttgaagcagtgtacaaggtcaaagaagaactgttgaaaactgatgtcaagctgttaaatggcaaccatgaaaatggagatttggacccaacctcacctttggaaaacatggattacattaaagacaaggaagaggtgaatggcattgaagagatttgttttgatcctgaaggaagtaaagcagaatggaaggaaacaccctgtatcctaagtgttaatgtaaaaaacaagcaggatgatgatttaaattgtgaacctttgtctccccataatataactccagaaccagtctctaaactgcctgctgaaccagtttctggtgatccagcccctggtgatctggatgccggagatccagcctccggagtactggcctctggtgattccacctctggtgatcccacctctagcgagccctcctctagtgatgctgcctctggtgatgcaacctctggtgatgccccttctggtgatgtgtcccctggtgatgccacctctggtgatgccactgctgatgatctctcctctggtgatcccacctctagtgatcccatcccaggtgaaccggtccctgttgaacccatttctggtgattgtgccgctgatgatatagcctctagtgaaataacttctgttgatctggcttctggagcaccagcttccactgatccagcctctgatgatctggcctctggtgatctatcctctagtgaactggcctctgatgatctggccactggtgaactggcctctgatgagctgacttctgaatcaacctttgatcgtacctttgaaccaaagtctgtaccagtttgtgaaccagttcctgaaattgacaatatagaaccaagtagcaataaagatgatgattttcttgaaaaaaatggagctgatgaaaaattagagcaaattcagagtaaagactcattggatgagaaaaataaagctgataataatattgatgctaatgaagaaactctagaaacagatgatacaactatttgttcagatcgacctcctgaaaatgaaaagaaggtagaggaagatattatcacagagcttgctcttggagaagatgctatatctagcagtatggaaattgaccaaggtgaaaagaatgaagatgaaacttctgcagatcttgtagaaacgattaatgaaaatgttattgaagataacaaaagtgagaatatcttagaaaatacagactctatggagacagatgaaatcattcctattttggaaaagcttgcaccttctgaggatgaacttacttgcttttctaaaacatctctccttccaatcgatgagacaaatccagatttggaagagaaaatggaaagttcttttggttcaccatctaaacaagaaagtagtgagagtttgccaaaagaagcctttctggtcctctctgatgaagaggatatttcgggtgaaaaagatgagtctgaagttatatcgcaaaatgaaacgtgctctccagcagaagtagaaagtaatgaaaaggacaacagacctgaggaagaagagcaagtaatacatgaagatgatgaaagaccttctgagaaaaatgaattttctagacgaaaacgttctaaatcagaagacatggacaatgtacagtctaaacgtcgtcgatatatggaagaagaatatgaggcagaatttcaagtaaagattacagccaaaggagacattaaccagaaacttcaaaaggttatacagtggttgctggaagaaaaattgtgtgcgctgcagtgtgctgtatttgataagactttggcagaattgaaaacacgagtggaaaagattgaatgtaacaagaggcataaaacagttctcactgaactacaggccaagatagccaggttaaccaaacgctttgaagcagccaaagaagatcttaagaaaagacatgaacatccacccaacccaccagtatcaccaggaaaaactgtaaatgatgtcaacagcaataataacatgtcttacagaaatgcaggcacagtgagacagatgctggagtccaaaagaaatgtaagcgagagtgcaccaccatcctttcaaactcctgtgaatacagtatcttcaaccaatcttgtcactcctccagcagttgtcagtagtcaacctaaattgcagactccagtgacttcgggttccctcacagcaacgtcagttcttcctgcacccaatacagctactgtagttgctactactcaggtgcctagtggaaatccccagcctacaatctctttacagcctttgccagtgattttgcatgtacctgttgcagtatcctcccagcctcagcttctacagagccatccagggactttggtgactaatcaaccatctggcaatgttgaattcatttctgtgcaaagcccacctacagtgagtggtcttaccaaaaatccagtatccttgccatccttgccaaatcccactaaaccaaacaacgttccttctgtgcccagtcctagtattcaaaggaaccctactgccagtgctgcaccattgggaacaacacttgctgtgcaggctgttccaacagcacactctattgtacaagccacaaggacttctttacccacagtgggcccatcaggactctatagtccatcaactaatcgaggtcctatacagatgaaaattccaatttctgcatttagtacttcgtctgctgcagaacagaacagcaataccaccccaagaattgaaaaccagacaaacaaaacaatagatgcttctgtcagtaagaaagcagctgatagcacatcacagtgtggaaaagccactggcagtgattcaagtggtgtcattgatctcacaatggatgatgaagagagtggagcttcacaagaccccaaaaaactaaatcacactcctgtatcaaccatgagttcttctcagcctgtgtcacgaccattgcaacccatacaaccagcaccgcctcttcaaccatctggggtgccaacaagtggaccatctcagaccaccatacacttactacctacagctccaactaccgtgaatgtaacacatcgtccagtaactcaggtgaccacaagactccctgtaccaagagctcctgcaaaccaccaggtggtttatacaactcttcctgcaccaccagctcaggctcccttgcgaggaactgttatgcaggctcctgctgttcggcaggtcaatccccaaaatagtgttacagttcgagtgcctcaaacaaccacatatgttgtaaacaatggactaaccctgggatcaacaggacctcagctcacagtgcatcaccgaccaccacaagtgcatactgagcccccacgccccgtgcacccagcacccttaccagaagctccacaaccacagcgtctgcccccagaagctgccagcacatctctgcctcagaagccacacttgaagttagcacgcgttcagagtcaaaatggcatagtactgtcatggagtgtcctggaggtggatcgaagctgtgccactgttgatagctaccatctctatgcttaccatgaggaacccagtgccactgtgccctcacaatggaaaaagattggggaagtcaaggcacttcccttgcccatggcatgtactctcacccagtttgtatctggtagcaaatactactttgcagtacgagccaaggatatttatggacgttttgggcctttctgtgatcctcagtcaacagatgtgatctcttctacccagagcagttaaaccttggagcctttatattttcctcttttaaaatttccaccttttggtcttgtttttaatcttgtgcatgataccccatgtaaaatccaccttgtgcaagatttcttggacagatgtgtgtatacactacatttgtttataaccagaagcaaaataaactcagcccacaaagctagaatcttttcctggacagtttaggctttggggtttggaaatgtaaatgtgtaccttgctttagttttgaggctggggaatatgtgtgggtgtttatgtgtgtttttccttatgtaggtgttattgcattggagtctcccattttcattctcaaatttacctcttaaagtacgaagtaagtagatcaaaggatttgagatgtgtaactggcatgattctgcttttgaaggatctatagtatcattttagttaagtgggtcaaacagaatcaaaacaaaacccaaagaaataaataaaaaacaaaatggctaaatagtttaaaataggttaattcgaacacaggaaaggatctatttgttgtttcttttgtctggtctcctgagttgttaattaggtgaaaaaagatctgcaatggccccctccctttcctaatctggcttttacatttattttgtgccttaaagattaactacaaagataaacatggccaaaaataaataaataaatatggccatatgtccgttgttgcttagtcttcccttgcagccttttacccttgatttctccttcatctctaccaaatatagcacaactcctcaagtaattttttttttttaagatggagttttgctcttgttgcagtgagctgagattgcgccattgcactccatcctgggagacaagagcgaaactctgcctcaaaaaaaaaaagaatttaaagtatatcctttgaggtcattttatgtaacaattagatataacctcctgtgtatctctctgttcctcttcaaagttattaaaattcagcttaggtcatggatttttaatatgagggccagctgtactggtgtcaggtaggtgttttggggtgtagataatttaggactggagggctgagttaagttttaggaggagaatgtggttgagaatattttgaaaggaatttatggagtttgtgaaataacttcgaagtcctcttcctttacaatatttgaattcatatttgtaccttctcaaaatagtgattcatttttcctagaattacaggagggagctcttttactaatgttgttttgtttgcaactttgatggcttataataggaagtattctagttgtaaagaaaactctttagagacttttgactggtcagtatactgaggtgtgagatttgattcatgatgaagaaagcctatagattgccaaaaaattaattctccaaaccacctttcactctcagaaaatgagaccacaaaggagtatgctataaatcaaatttgccaaccaattatgtagatattactcattctaggactaatgatgatggtaaagaagttgccagtgttatggcaatgaaaatttcagaaaggaggagttgatgatcttctagatgtatatgaacacctgtctatatctgcatgtatatgttttgacctgcagtggttgcaatgttgatatgtgttcaagattattcctgtctacaaaactgaaggcccatgttcaaattgttctttattgggtgtttttatggtcacgtggtaacaattttcttacctaacctacaaaaggttctcttgatgaacatttttatttatatttactaatcttttttaaaaaaagctttcatagcattatataatcagatgaagaaagcccagtagaataaaaaaaaagtcgacgcggccgcgaatttagtagtagtagtagtaggc

SEQ ID NO: 440577 - DNA, 6259 bp, Homo sapiens
  misc_feature (131)..(131): n is a, c, g, or t
  misc_feature (365)..(365): n is a, c, g, or t
cagggactttggtgactaatcaaccatctggcaatgttgaattcatttctgtgcaaagcccacctacagtgagtgtcttaccaaaaatccagtatccttgccatccttgccaaatcccactaaaccaaacnacgttccttctgtgcccagtcctagtattcaaaggaaccctactgccagtgctgcaccattgggaacaacacttgctgtgcaggctgttccaacagcacactctattgtacaagccacaaggacttctttacccacagtgggcccatcaggactctatagtccatcaactaatcgaggtcctatacagatgaaaattccaatttctgcatttagtacttcgtctgctgcagaanagaacagcaataccaccccaagaattgaaaaccagacaaacaaaacaatagatgcttctgtcagtaagaaagcagctgatagcacatcacagcatccacccaacccaccagtatcaccaggaaaaactgtaaatgatgtcaacagcaataataacatgtcttacagaaatgcaggcacagtgagacagatgctggagtccaaaagaaatgtaagcgagagtgcaccaccatcctttcaaactcctgtgaatacagtatcttcaaccaatcttgtcactcctccagcagttgtcagtagtcaacctaaattgcagactccagtgacttcgggttccctcacagcaacgtcagttcttcctgcacccaatacagctactgtagttgctactactcaggtgcctagtggaaatccccagcctacaatctctttacagcctttgccagtgattttgcatgtacctgttgcagtatcctcccagcctcagcttctacagagccatccagggactttggtgactaatcaaccatctggcaatgttgaattcatttctgtgcaaagcccacctacagtgagtggtcttaccaaaaatccagtatccttgccatccttgccaaatcccactaaaccaaacaacgttccttctgtgcccagtcctagtattcaaaggaaccctactgccagtgctgcaccattgggaacaacacttgctgtgcaggctgttccaacagcacactctattgtacaagccacaaggacttctttacccacagtgggcccatcaggactctatagtccatcaactaatcgaggtcctatacagatgaaaattccaatttctgcatttagtacttcgtctgctgcagaacagaacagcaataccaccccaagaattgaaaaccagacaaacaaaacaatagatgcttctgtcagtaagaaagcagctgatagcacatcacagtgtggaaaagccactggcagtgattcaagtggtgtcattgatctcacaatggatgatgaagagagtggagcttcacaagaccccaaaaaactaaatcacactcctgtatcaaccatgagttcttctcagcctgtgtcacgaccattgcaacccatacaaccagcaccgcctcttcaaccatctggggtgccaacaagtggaccatctcagaccaccatacacttactacctacagctccaactaccgtgaatgtaacacatcgtccagtaactcaggtgaccacaagactccctgtaccaagagctcctgcaaaccaccaggtggtttatacaactcttcctgcaccaccagctcaggctcccttgcgaggaactgttatgcaggctcctgctgttcggcaggtcaatccccaaaatagtgttacagttcgagtgcctcaaacaaccacatatgttgtaaacaatggactaaccctgggatcaacaggacctcagctcacagtgcatcaccgaccaccacaagtgcatactgagcccccacgccccgtgcacccagcacccttaccagaagctccacaaccacagcgtctgcccccagaagctgccagcacatctctgcctcagaagccacacttgaagttagcacgcgttcagagtcaaaatggcatagtactgtcatggagtgtcctggaggtggatcgaagctgtgccactgttgatagctaccatctctatgcttaccatgaggaacccagtgccactgtgccctcacaatggaaaaagattggggaagtcaaggcacttcccttgcccatggcatgtactctcacccagtttgtatctggtagcaaatactactttgcagtacgagccaaggatatttatggacgttttgggcctttctgtgatcctcagtcaacagatgtgatctcttctacccagagcagttaaaccttggagcctttatattttcctcttttaaaatttccaccttttggtcttgtttttaatcttgtgcatgataccccatgtaaaatccaccttgtgcaagatttcttggacagatgtgtgtatacactacatttgtttataaccagaagcaaaataaactcagcccacaaagctagaatcttttcctggacagtttaggctttggggtttggaaatgtaaatgtgtaccttgctttagttttgaggctggggaatatgtgtgggtgtttatgtgtgtttttccttatgtaggtgttattgcattggagtctcccattttcattctcaaatttacctcttaaagtacgaagtaagtagatcaaaggatttgagatgtgtaactggcatgattctgcttttgaaggatctatagtatcattttagttaagtgggtcaaacagaatcaaaacaaaacccaaagaaataaataaaaaacaaaatggctaaatagtttaaaataggttaattcgaacacaggaaaggatctatttgttgtttcttttgtctggtctcctgagttgttaattaggtgaaaaaagatctgcaatggccccctccctttcctaatctggcttttacatttattttgtgccttaaagattaactacaaagataaacatggccaaaaataaataaataaatatggccatatgtccgttgttgcttagtcttcccttgcagccttttacccttgatttctccttcatctctaccaaatatagcacaactcctcaagtaattttttttttttaagatggagttttgctcttgttgcagtgagctgagattgcgccattgcactccatcctgggagacaagagcgaaactctgcctcaaaaaaaaaaagaatttaaagtatatcctttgaggtcattttatgtaacaattagatataacctcctgtgtatctctctgttcctcttcaaagttattaaaattcagcttaggtcatggatttttaatatgagggccagctgtactggtgtcaggtaggtgttttggggtgtagataatttaggactggagggctgagttaagttttaggaggagaatgtggttgagaatattttgaaaggaatttatggagtttgtgaaataacttcgaagtcctcttcctttacaatatttgaattcatatttgtaccttctcaaaatagtgattcatttttcctagaattacaggagggagctcttttactaatgttgttttgtttgcaactttgatggcttataataggaagtattctagttgtaaagaaaactctttagagacttttgactggtcagtatactgaggtgtgagatttgattcatgatgaagaaagcctatagattgccaaaaaattaattctccaaaccacctttcactctcagaaaatgagaccacaaaggagtatgctataaatcaaatttgccaaccaattatgtagatattactcattctaggactaatgatgatggtaaagaagttgccagtgttatggcaatgaaaatttcagaaaggaggagttgatgatcttctagatgtatatgaacacctgtctatatctgcatgtatatgttttgacctgcagtggttgcaatgttgatatgtgttcaagattattcctgtctacaaaactgaaggcccatgttcaaattgttctttattgggtgtttttatggtcacgtggtaacaattttcttacctaacctacaaaaggttctcttgatgaacatttttatttatatttactaatcttttttaaaaaaagctttcatagcattatataatcagatgaagaaagcccagtagaataaaaaaaaaattcattagcctagcctatattatgttttctgtcaaaggaaaacaaattctcaaataggaattctaaaaatatttactaaagtaaaataactacttaaaatgttttattccagttgggaaggaagggtacagggagaaatcgcaattatttaggggagaagtatatttattataagatggtgtcctcaaattagcctaccatggcacgtaggggcagcagctatattagatttactagaggtgctaagttagaacactaggcttttattgaggcaggttttaatattgatagatgctttttgtttggtttgtttcttctgggagagaatggaggacttaagtagaagtagctactgataacagactttctagtagcagtttccactccacggttacctttttagtttcatagtatcttttcacaaagtattacaaataagctagattctcccagtttgggaatgcaagtttgctacatttttagcctggcaatatttgtgtaggtattgccttattggaaattctggaaacctgatactgcaacctgcaatgtaggatgtttgtatggcatttaaaggtaatggtgatgtttattattctatactttgcattctgtgagagtaattttcactctgtcttaagtgtgagtaagcctcttctaaaaatcttgttcttgccaagaaatttataaatcacatacgaagacgtctgttgctaacagttaactttatgaggtaactatatccttctatttctctggactcatttttaaaaaatatgccgaatactgcatactgtttaaggtagtatataagtttatgagagaagtggagagctttcttccttgaaaagtcggtatttgttgagataccatttgcctcacagagaggtgttccccactcccatccccattgccagataataaatattttgagaaaagtgacctaaaacagctgaaatcttaggtgcatctgtctgcagacctccttaagcaggctgtatcttacaattcccttactgcactgggtaagtgttaacttagtttttgttgtttgctcttttgctttaaatattctccaaattaccatttatgcaacatggttagggttaatactgcatggtattcatttatcttgtttcatgaactttccagtactgtacaaggtcaacaaagtaatgcctgtggtatcctcatctctcacttttttactctgtgattttagcacagtaaggtactgcaaagaccttccttccaaatgttctccttgactttatttcttgggccaattcagtatcctcaacatcctaagattttgttgttttatcactgacctgtggttggcctgttttattctaatttccagaaaagtcaagtcccagtatttgcaatatcaaataactctaaaaccgatgtgtgattctaccttccttactatttttactgggcaaatgccctatttttttaattattattatttttaacttttgggacacacaaaaatcagcaattctcatgaagcgtttgttagtgtggcagacttgtctaattcctgaaactcattcatccccttgagccagccaatggggaggaataggataatgcaaacacatgttttgttttctcattttcaaataatttaccatgttaaaataaacttttctttgttttttatttgtagagtcagctaagtacccatatttaaatgccgtctttattatttttttgaggtctttgtttttgtctgtttttgttttgttttgttttgtaaataaggtaactgggcaatcaaacaccttttggggattctggctttagtattttatcagccattttaaaattaaatataaaaatcctttgtaagaaacttgcatcctaatttttctttattgcaattgaaagtgtaaataataagacaatgtaagtaagaccttcctaatgtctaatacaaactgggctccagcaagtggccctatttttattagggttttgaaggtttgtgtgtgtgtgtgcgtgcgtgtgtgtgtttttcttttttaaatgtatagtagagtggtgtctgtataagtgttacctgtagtggggttttgtccagcaagcctgaaatttatactttgaaataaaactactgggtttttaa

SEQ ID NO: 440578 - DNA, 4891 bp, Homo sapiens
cttcgctgcaccactcagcgtcaggctgctccttgtcgaggaacatgttattgcaggctctctgctgttacggcacggtcaaggccccaaaagttgtgttacagttgcgagtgccgtcaaacaactcacatattgttgtaaacaactggactaaaccctgggagtcaacaggacctcagctaacagtgcatcaccggatcaagagaagtgcatagtgagcaaccacggcgccggtgcaacacagctccctgtaccaagagctcctgcaaaccaccaggtggtttatacaactcttcctgcaccaccagctcaggctcccttgcgaggaactgttatgcaggctcctgctgttcggcaggtcaatccccaaaatagtgttacagttcgagtgcctcaaacaaccacatatgttgtaaacaatggactaaccctgggatcaacaggacctcagctcacagtgcatcaccgaccaccacaagtgcatactgagcccccacgccccgtgcacccagcacccttaccagaagctccacaaccacagcgtctgcccccagaagctgccagcacatctctgcctcagaagccacacttgaagttagcacgcgttcagagtcaaaatggcatagtactgtcatggagtgtcctggaggtggatcgaagctgtgccactgttgatagctaccatctctatgcttaccatgaggaacccagtgccactgtgccctcacaatggaaaaagattggggaagtcaaggcacttcccttgcccatggcatgtactctcacccagtttgtatctggtagcaaatactactttgcagtacgagccaaggatatttatggacgttttgggcctttctgtgatcctcagtcaacagatgtgatctcttctacccagagcagttaaaccttggagcctttatattttcctcttttaaaatttccaccttttggtcttgtttttaatcttgtgcatgataccccatgtaaaatccaccttgtgcaagatttcttggacagatgtgtgtatacactacatttgtttataaccagaagcaaaataaactcagcccacaaagctagaatcttttcctggacagtttaggctttggggtttggaaatgtaaatgtgtaccttgctttagttttgaggctggggaatatgtgtgggtgtttatgtgtgtttttccttatgtaggtgttattgcattggagtctcccattttcattctcaaatttacctcttaaagtacgaagtaagtagatcaaaggatttgagatgtgtaactggcatgattctgcttttgaaggatctatagtatcattttagttaagtgggtcaaacagaatcaaaacaaaacccaaagaaataaataaaaaacaaaatggctaaatagtttaaaataggttaattcgaacacaggaaaggatctatttgttgtttcttttgtctggtctcctgagttgttaattaggtgaaaaaagatctgcaatggccccctccctttcctaatctggcttttacatttattttgtgccttaaagattaactacaaagataaacatggccaaaaataaataaataaatatggccatatgtccgttgttgcttagtcttcccttgcagccttttacccttgatttctccttcatctctaccaaatatagcacaactcctcaagtaattttttttttttaagatggagttttgctcttgttgcagtgagctgagattgcgccattgcactccatcctgggagacaagagcgaaactctgcctcaaaaaaaaaaagaatttaaagtatatcctttgaggtcattttatgtaacaattagatataacctcctgtgtatctctctgttcctcttcaaagttattaaaattcagcttaggtcatggatttttaatatgagggccagctgtactggtgtcaggtaggtgttttggggtgtagataatttaggactggagggctgagttaagttttaggaggagaatgtggttgagaatattttgaaaggaatttatggagtttgtgaaataacttcgaagtcctcttcctttacaatatttgaattcatatttgtaccttctcaaaatagtgattcatttttcctagaattacaggagggagctcttttactaatgttgttttgtttgcaactttgatggcttataataggaagtattctagttgtaaagaaaactctttagagacttttgactggtcagtatactgaggtgtgagatttgattcatgatgaagaaagcctatagattgccaaaaaattaattctccaaaccacctttcactctcagaaaatgagaccacaaaggagtatgctataaatcaaatttgccaaccaattatgtagatattactcattctaggactaatgatgatggtaaagaagttgccagtgttatggcaatgaaaatttcagaaaggaggagttgatgatcttctagatgtatatgaacacctgtctatatctgcatgtatatgttttgacctgcagtggttgcaatgttgatatgtgttcaagattattcctgtctacaaaactgaaggcccatgttcaaattgttctttattgggtgtttttatggtcacgtggtaacaattttcttacctaacctacaaaaggttctcttgatgaacatttttatttatatttactaatcttttttaaaaaaagctttcatagcattatataatcagatgaagaaagcccagtagaataaaaaaaaaattcattagcctagcctatattatgttttctgtcaaaggaaaacaaattctcaaataggaattctaaaaatatttactaaagtaaaataactacttaaaatgttttattccagttgggaaggaagggtacagggagaaatcgcaattatttaggggagaagtatatttattataagatggtgtcctcaaattagcctaccatggcacgtaggggcagcagctatattagatttactagaggtgctaagttagaacactaggcttttattgaggcaggttttaatattgatagatgctttttgtttggtttgtttcttctgggagagaatggaggacttaagtagaagtagctactgataacagactttctagtagcagtttccactccacggttacctttttagtttcatagtatcttttcacaaagtattacaaataagctagattctcccagtttgggaatgcaagtttgctacatttttagcctggcaatatttgtgtaggtattgccttattggaaattctggaaacctgatactgcaacctgcaatgtaggatgtttgtatggcatttaaaggtaatggtgatgtttattattctatactttgcattctgtgagagtaattttcactctgtcttaagtgtgagtaagcctcttctaaaaatcttgttcttgccaagaaatttataaatcacatacgaagacgtctgttgctaacagttaactttatgaggtaactatatccttctatttctctggactcatttttaaaaaatatgccgaatactgcatactgtttaaggtagtatataagtttatgagagaagtggagagctttcttccttgaaaagtcggtatttgttgagataccatttgcctcacagagaggtgttccccactcccatccccattgccagataataaatattttgagaaaagtgacctaaaacagctgaaatcttaggtgcatctgtctgcagacctccttaagcaggctgtatcttacaattcccttactgcactgggtaagtgttaacttagtttttgttgtttgctcttttgctttaaatattctccaaattaccatttatgcaacatggttagggttaatactgcatggtattcatttatcttgtttcatgaactttccagtactgtacaaggtcaacaaagtaatgcctgtggtatcctcatctctcacttttttactctgtgattttagcacagtaaggtactgcaaagaccttccttccaaatgttctccttgactttatttcttgggccaattcagtatcctcaacatcctaagattttgttgttttatcactgacctgtggttggcctgttttattctaatttccagaaaagtcaagtcccagtatttgcaatatcaaataactctaaaaccgatgtgtgattctaccttccttactatttttactgggcaaatgccctatttttttaattattattatttttaacttttgggacacacaaaaatcagcaattctcatgaagcgtttgttagtgtggcagacttgtctaattcctgaaactcattcatccccttgagccagccaatggggaggaataggataatgcaaacacatgttttgttttctcattttcaaataatttaccatgttaaaataaacttttctttgttttttatttgtagagtcagctaagtacccatatttaaatgccgtctttattatttttttgaggtctttgtttttgtctgtttttgttttgttttgttttgtaaataaggtaactgggcaatcaaacaccttttggggattctggctttagtattttatcagccattttaaaattaaatataaaaatcctttgtaagaaacttgcatcctaatttttctttattgcaattgaaagtgtaaataataagacaatgtaagtaagaccttcctaatgtctaatacaaactgggctccagcaagtggccctatttttattagggttttgaaggtttgtgtgtgtgtgtgcgtgcgtgtgtgtgtttttcttttttaaatgtatagtagagtggtgtctgtataagtgttacctgtagtggggttttgtccagcaagcctgaaatttatactttgaaataaaactactgggtttttaa

SEQ ID NO: 440579 - DNA, 3911 bp, Homo sapiens
tgcccagtctcacacagtaggtttcctgggagagttggaattcaaatctgtgaatctgtctacagtctacagagttcatgttcttaattgggttattaaaagtgatgaatttttttaaaggaatgcttacttttaatattcagaatggacagtttagaagaacctcagaaaaaagtctttaaggctcgaaaaacgatgagagtgagtgatcgtcagcaacttgaagcagtgtacaaggtcaaagaagaactgttgaaaactgatgtcaagctgttaaatggcaaccatgaaaatggagatttggacccaacctcacctttggaaaacatggattacattaaagacaaggaagaggtgaatggcattgaagagatttgttttgatcctgaaggaagtaaagcagaatggaaggaaacaccctgtatcctaagtgttaatgtaaaaaacaagcaggatgatgatttaaattgtgaacctttgtctccccataatataactccagaaccagtctctaaactgcctgctgaaccagtttctggtgatccagcccctggtgatctggatgccggagatccagcctccggagtactggcctctggtgattccacctctggtgatcccacctctagcgagccctcctctagtgatgctgcctctggtgatgcaacctctggtgatgccccttctggtgatgtgtcccctggtgatgccacctctggtgatgccactgctgatgatctctcctctggtgatcccacctctagtgatcccatcccaggtgaaccggtccctgttgaacccatttctggtgattgtgccgctgatgatatagcctctagtgaaataacttctgttgatctggcttctggagcaccagcttccactgatccagcctctgatgatctggcctctggtgatctatcctctagtgaactggcctctgatgatctggccactggtgaactggcctctgatgagctgacttctgaatcaacctttgatcgtacctttgaaccaaagtctgtaccagtttgtgaaccagttcctgaaattgacaatatagaaccaagtagcaataaagatgatgattttcttgaaaaaaatggagctgatgaaaaattagagcaaattcagagtaaagactcattggatgagaaaaataaagctgataataatattgatgctaatgaagaaactctagaaacagatgatacaactatttgttcagatcgacctcctgaaaatgaaaagaaggtagaggaagatattatcacagagcttgctcttggagaagatgctatatctagcagtatggaaattgaccaaggtgaaaagaatgaagatgaaacttctgcagatcttgtagaaacgattaatgaaaatgttattgaagataacaaaagtgagaatatcttagaaaatacagactctatggagacagatgaaatcattcctattttggaaaagcttgcaccttctgaggatgaacttacttgcttttctaaaacatctctccttccaatcgatgagacaaatccagatttggaagagaaaatggaaagttcttttggttcaccatctaaacaagaaagtagtgagagtttgccaaaagaagcctttctggtcctctctgatgaagaggatatttcgggtgaaaaagatgagtctgaagttatatcgcaaaatgaaacgtgctctccagcagaagtagaaagtaatgaaaaggacaacagacctgaggaagaagagcaagtaatacatgaagatgatgaaagaccttctgagaaaaatgaattttctagacgaaaacgttctaaatcagaagacatggacaatgtacagtctaaacgtcgtcgatatatggaagaagaatatgaggcagaatttcaagtaaagattacagccaaaggagacattaaccagaaacttcaaaaggttatacagtggttgctggaagaaaaattgtgtgcgctgcagtgtgctgtatttgataagactttggcagaattgaaaacacgagtggaaaagattgaatgtaacaagaggcataaaacagttctcactgaactacaggccaagatagccaggttaaccaaacgctttgaagcagccaaagaagatcttaagaaaagacatgaacatccacccaacccaccagtatcaccaggaaaaactgtaaatgatgtcaacagcaataataacatgtcttacagaaatgcaggcacagtgagacagatgctggagtccaaaagaaatgtaagcgagagtgcaccaccatcctttcaaactcctgtgaatacagtatcttcaaccaatcttgtcactcctccagcagttgtcagtagtcaacctaaattgcagactccagtgacttcgggttccctcacagcaacgtcagttcttcctgcacccaatacagctactgtagttgctactactcaggtgcctagtggaaatccccagcctacaatctctttacagcctttgccagtgattttgcatgtacctgttgcagtatcctcccagcctcagcttctacagagccatccagggactttggtgactaatcaaccatctggcaatgttgaattcatttctgtgcaaagcccacctacagtgagtggtcttaccaaaaatccagtatccttgccatccttgccaaatcccactaaaccaaacaacgttccttctgtgcccagtcctagtattcaaaggaaccctactgccagtgctgcaccattgggaacaacacttgctgtgcaggctgttccaacagcacactctattgtacaagccacaaggacttctttacccacagtgggcccatcaggactctatagtccatcaactaatcgaggtcctatacagatgaaaattccaatttctgcatttagtacttcgtctgctgcagaacagaacagcaataccaccccaagaattgaaaaccagacaaacaaaacaatagatgcttctgtcagtaagaaagcagctgatagcacatcacagtgtggaaaagccactggcagtgattcaagtggtgtcattgatctcacaatggatgatgaagagagtggagcttcacaagaccccaaaaaactaaatcacactcctgtatcaaccatgagttcttctcagcctgtgtcacgaccattgcaacccatacaaccagcaccgcctcttcaaccatctggggtgccaacaagtggaccatctcagaccaccatacacttactacctacagctccaactaccgtgaatgtaacacatcgtccagtaactcaggtgaccacaagactccctgtaccaagagctcctgcaaaccaccaggtggtttatacaactcttcctgcaccaccagctcaggctcccttgcgaggaactgttatgcaggctcctgctgttcggcaggtcaatccccaaaatagagagttaaacagagaaaattgttgatgtatactagttgatttgtgctctgagtgttgtctttaatttaactttatttatggcctgtattagtatagtacacaatttgatattggtatattctctactctattaagaaacaccttacctagttagagtgggaatggtcaattgtgatttaccccagatgatggaaatcatggtaaaggatagccttcaatgagagtcttaaagatatggaaagtggctgagaaaagaagggaaaatgttaaagaaagcttgtagtttcttgtatatatcatatattagttacatacatatgttacatgcatgttacatatgtagatgacattttaaaattatatattaaccacatgtatataagcagtagtagaatatatcacataaacacaagcttatataaaaggtatatttaaactttaaagtaaagaaaaataataaaatgaactacgtatgaactcttaaaa

SEQ ID NO: 440580 - DNA, 3363 bp, Homo sapiens
tgcccagtctcacacagtaggtttcctgggagagttggaattcaaatctgtgaatctgtctacagtctacagagttcatgttcttaattgggttattaaaagtgatgaatttttttaaaggaatgcttacttttaatattcagaatggacagtttagaagaacctcagaaaaaagtctttaaggctcgaaaaacgatgagagtgagtgatcgtcagcaacttgaagcagtgtacaaggtcaaagaagaactgttgaaaactgatgtcaagctgttaaatggcaaccatgaaaatggagatttggacccaacctcacctttggaaaacatggattacattaaagacaaggaagaggtgaatggcattgaagagatttgttttgatcctgaaggaagtaaagcagaatggaaggaaacaccctgtatcctaagtgttaatgtaaaaaacaagcaggatgatgatttaaattgtgaacctttgtctccccataatataactccagaaccagtctctaaactgcctgctgaaccagtttctggtgatccagcccctggtgatctggatgccggagatccagcctccggagtactggcctctggtgattccacctctggtgatcccacctctagcgagccctcctctagtgatgctgcctctggtgatgcaacctctggtgatgccccttctggtgatgtgtcccctggtgatgccacctctggtgatgccactgctgatgatctctcctctggtgatcccacctctagtgatcccatcccaggtgaaccggtccctgttgaacccatttctggtgattgtgccgctgatgatatagcctctagtgaaataacttctgttgatctggcttctggagcaccagcttccactgatccagcctctgatgatctggcctctggtgatctatcctctagtgaactggcctctgatgatctggccactggtgaactggcctctgatgagctgacttctgaatcaacctttgatcgtacctttgaaccaaagtctgtaccagtttgtgaaccagttcctgaaattgacaatatagaaccaagtagcaataaagatgatgattttcttgaaaaaaatggagctgatgaaaaattagagcaaattcagagtaaagactcattggatgagaaaaataaagctgataataatattgatgctaatgaagaaactctagaaacagatgatacaactatttgttcagatcgacctcctgaaaatgaaaagaaggtagaggaagatattatcacagagcttgctcttggagaagatgctatatctagcagtatggaaattgaccaaggtgaaaagaatgaagatgaaacttctgcagatcttgtagaaacgattaatgaaaatgttattgaagataacaaaagtgagaatatcttagaaaatacagactctatggagacagatgaaatcattcctattttggaaaagcttgcaccttctgaggatgaacttacttgcttttctaaaacatctctccttccaatcgatgagacaaatccagatttggaagagaaaatggaaagttcttttggttcaccatctaaacaagaaagtagtgagagtttgccaaaagaagcctttctggtcctctctgatgaagaggatatttcgggtgaaaaagatgagtctgaagttatatcgcaaaatgaaacgtgctctccagcagaagtagaaagtaatgaaaaggacaacagacctgaggaagaagagcaagtaatacatgaagatgatgaaagaccttctgagaaaaatgaattttctagacgaaaacgttctaaatcagaagacatggacaatgtacagtctaaacgtcgtcgatatatggaagaagaatatgaggcagaatttcaagtaaagattacagccaaaggagacattaaccagaaacttcaaaaggttatacagtggttgctggaagaaaaattgtgtgcgctgcagtgtgctgtatttgataagactttggcagaattgaaaacacgagtggaaaagattgaatgtaacaagaggcataaaacagttctcactgaactacaggccaagatagccaggttaaccaaacgctttgaagcagccaaagaagatcttaagaaaagacatgaacatccacccaacccaccagtatcaccaggaaaaactgtaaatgatgtcaacagcaataataacatgtcttacagaaatgcaggcacagtgagacagatgctggagtccaaaagaaatgtaagcgagagtgcaccaccatcctttcaaactcctgtgaatacagtatcttcaaccaatcttgtcactcctccagcagttgtcagtagtcaacctaaattgcagactccagtgacttcgggttccctcacagcaacgtcagttcttcctgcacccaatacagctactgtagttgctactactcaggtgcctagtggaaatccccagcctacaatctctttacagcctttgccagtgattttgcatgtacctgttgcagtatcctcccagcctcagcttctacagagccatccagggactttggtgactaatcaaccatctggcaatgttgaattcatttctgtgcaaagcccacctacagtgagtggtcttaccaaaaatccagtatccttgccatccttgccaaatcccactaaaccaaacaacgttccttctgtgcccagtcctagtattcaaaggaaccctactgccagtgctgcaccattgggaacaacacttgctgtgcaggctgttccaacagcacactctattgtacaagccacaaggacttctttacccacagtgggcccatcaggactctatagtccatcaactaatcgaggtcctatacagatgaaaattccaatttctgcatttagtacttcgtctgctgcagaacagaacagcaataccaccccaagaattgaaaaccagacaaacaaaacaatagatgcttctgtcagtaagaaagcagctgatagcacatcacagtgtggaaaagccactggcagtgattcaagtggtgtcattgatctcacaatggatgatgaagagagtggagcttcacaagaccccaaaaaactaaatcacactcctgtatcaaccatgagttcttctcagcctgtgtcacgaccattgcaacccatacaaccagcaccgcctcttcaaccatctggggtgccaacaagtggaccatctcagaccaccatacacttactacctacagctccaactaccgtgaatgtaacacatcgtccagtattgctcagcggcgctgagctaatacaggaccatagaaacaccaaacccagtatctcaataactgccagtcctaatgatattccaata

SEQ ID NO: 440581 - DNA, 879 bp, Homo sapiens
  misc_feature (814)..(814): n is a, c, g, or t
ggaggtggtcgccctccgtcgtggtctggcgtgtattccgagccttggtgtctggcggtttccgagcgttggtgtctggcggtttccgagcgttggtgtcttggcggtttccgaccgttggtgtctggcggtttccgaccgttggtgtctggcacgcgccaccctctcttgctttggttgcgccatgccgatgtaccagacaagaagacaagaaaatgatttgaggacagcttcaatcgcggtgtgaagaagaaagcagcaaaacgaccactgaaaacaacgccggtggcaaaatatccaaagaaagggtcccaagcggtacatcgtcatagccggaaacagtcagagccaccagccaatgatcttttcaatgctgcgaaagctgccaaaagtgacatgcagggatgtccttcctgagatccgtgctatctgcattgaggaaattgggtgttggatgcgaagctacagcacgtctttcctcaccgacagctatttaaaatatattggttggactctgcatgataagcaccgagaagtccgcgtgaagtgcgtgaaggctctgaaagggctgtacggtaaccgggacctgaccgcacgcctggagctcttcactggctgcttcaaggactggatggtttccatgatcatggacagagagtacagtgtggcagtggaggccgtcagattactgatacttatccttaagaaacatggaaggggtgctgatggacgtggactgtgaagagcgtctaccccattgtgtaggcctctaattgaggcctggctctgctggggtgaatttctgtactggaanttctacctggtggaatagaacatggggaaaacgcaagccaggcaaagatccaccgggccttgtgg

SEQ ID NO: 440582 - DNA, 1187 bp, Homo sapiens
  misc_feature (1122)..(1122): n is a, c, g, or t
ggaggtggtcgccctccgtcgtggtctggcgtgtattccgagccttggtgtctggcggtttccgagcgttggtgtctggcggtttccgagcgttggtgtcttggcggtttccgaccgttggtgtctggcggtttccgaccgttggtgtctggcacgcgccaccctctcttgctttggttgcgccatgccgatgtaccagacaagaagacaagaaaatgatttgaggacagcttcaatcgcggtgtgaagaagaaagcagcaaaacgaccactgaaaacaacgccggtggcaaaatatccaaagaaagggtcccaagcggtacatcgtcatagccggaaacagtcagagccaccagccaatgatcttttcaatgctgcgaaagctgccaaaagtgacatgcagggatgtccttcctgagatccgtgctatctgcattgaggaaattgggtgttggatgcgaagctacagcacgtctttcctcaccgacagctatttaaaatatattggttggactctgcatgataagcaccgagaagtccgcgtgaagtgcgtgaaggctctgaaagggctgtacggtaaccgggacctgaccgcacgcctggagctcttcactggctgcttcaaggactggatggtttccatgatcatggacagagagtacagtgtggcagtggaggccgtcagattactgatacttatccttaagtgagtcctgggaagaggggaggccagtgtctcagacctttgcccttccagggtcatctccctccacctgtcacagctgactcttccatctgtgcaggttgactgaggtcattcctgagttgcagtatgttgagagggtaatatttctgtcttctctaactccccatactcccttgtcttccactctccatttaggagttttttgtgagttatgtccttgttgcttttgcctctttttctttctagccttgattgtgccagaagacaatgtccctattcacacactctttctgcttttctgtgggcaggaaacatggaaggggtgctgatggacgtggactgtgaagagcgtctaccccattgtgtaggcctctaattgaggcctggctctgctggggtgaatttctgtactggaanttctacctggtggaatagaacatggggaaaacgcaagccaggcaaagatccaccgggccttgtgg

SEQ ID NO: 440583 - DNA, 1304 bp, Homo sapiens
  misc_feature (1239)..(1239): n is a, c, g, or t
ggaggtggtcgccctccgtcgtggtctggcgtgtattccgagccttggtgtctggcggtttccgagcgttggtgtctggcggtttccgagcgttggtgtcttggcggtttccgaccgttggtgtctggcggtttccgaccgttggtgtctggcacgcgccaccctctcttgctttggttgcgccatgccgatgtaccaggtaaagccctatcaccgggtctgcgcccctctccgtgtggagcccacctgcatgtactggctccccaacatgcacggcaggagcggcggcccagcacttggcactggccacttgcagacaagaagacaagaaaatgatttgaggacagcttcaatcgcggtgtgaagaagaaagcagcaaaacgaccactgaaaacaacgccggtggcaaaatatccaaagaaagggtcccaagcggtacatcgtcatagccggaaacagtcagagccaccagccaatgatcttttcaatgctgcgaaagctgccaaaagtgacatgcagggatgtccttcctgagatccgtgctatctgcattgaggaaattgggtgttggatgcgaagctacagcacgtctttcctcaccgacagctatttaaaatatattggttggactctgcatgataagcaccgagaagtccgcgtgaagtgcgtgaaggctctgaaagggctgtacggtaaccgggacctgaccgcacgcctggagctcttcactggctgcttcaaggactggatggtttccatgatcatggacagagagtacagtgtggcagtggaggccgtcagattactgatacttatccttaagtgagtcctgggaagaggggaggccagtgtctcagacctttgcccttccagggtcatctccctccacctgtcacagctgactcttccatctgtgcaggttgactgaggtcattcctgagttgcagtatgttgagagggtaatatttctgtcttctctaactccccatactcccttgtcttccactctccatttaggagttttttgtgagttatgtccttgttgcttttgcctctttttctttctagccttgattgtgccagaagacaatgtccctattcacacactctttctgcttttctgtgggcaggaaacatggaaggggtgctgatggacgtggactgtgaagagcgtctaccccattgtgtaggcctctaattgaggcctggctctgctggggtgaatttctgtactggaanttctacctggtggaatagaacatggggaaaacgcaagccaggcaaagatccaccgggccttgtgg

SEQ ID NO: 440584 - DNA, 316 bp, Homo sapiens
cgtaatgagatattgagtgactttctcctttctgcaggactggatggtttccatgatcatggacagagagtacagtgtggcagtggaggccgtcagattactgatacttatccttaagtgagtcctgggaagaggggaggccagtgtctcagacctttgcccttccagggtcatctccctccacctgtcacagctgactcttccatctgtgcaggttgactgaggtcattcctgagttgcagtatgttgagagggtaatatttctgtcttctctaactccccatactcccttgtcttccactctccatttaggagt

SEQ ID NO: 440585 - DNA, 795 bp, Homo sapiens
ggaggtggtcgccctccgtcgtggtctggcgtgtattccgagccttggtgtctggcggtttccgagcgttggtgtctggcggtttccgagcgttggtgtcttggcggtttccgaccgttggtgtctggcggtttccgaccgttggtgtctggcacgcgccaccctctcttgctttggttgcgccatgccgatgtaccagacaagaagacaagaaaatgatttgaggacagcttcaatcgcggtgtgaagaagaaagcagcaaaacgaccactgaaaacaacgccggtggcaaaatatccaaagaaagggtcccaagcggtacatcgtcatagccggaaacagtcagagccaccagccaatgatcttttcaatgctgcgaaagctgccaaaagtgacatgcagcaccgagaagtccgcgtgaagtgcgtgaaggctctgaaagggctgtacggtaaccgggacctgaccgcacgcctggagctcttcactggctgcttcaaggactggatggtttccatgatcatggacagagagtacagtgtggcagtggaggccgtcagattactgatacttatccttaagaaacatggaaggggtgctgatggacgtggactgtgaagagcgtctaccccattgtgtaggcctctaattgaggcctggctctgctggggtgaatttctgtactggaaacttttctaccctgagtgcgagataagaacgatgggtggaagagagcaacgccagagcccaggtgcccagaggactttcttccagcttctgctgtccttctttgtg

SEQ ID NO: 440586 - DNA, 416 bp, Homo sapiens
cttcctctgctgcaagtctctgcttagaagtctcctcactaacccctgccgtgatcttctggtttaaactctgtttaaaactgggactggttcccacctctgcatttcctagtcccacctttccccgcaagcacctgtcgtcttccaataccagatttaaataacatttcaccattacgtttatcgcctgtctccccctgctggaatgtgagctccatgtgggcagggatttttgtcttgttcactgttgaatccctggttcctagaacagtgcctggattgtggcaggtgcttaataatattcattgtatgagtgaatgaatatatgagaaatcaggaatttaatggctagttattttataatatacatcaatttaactctgcaaatattaaaatgaagagtgactttgtaacac

SEQ ID NO: 440587 - DNA, 1913 bp, Homo sapiens
  misc_feature (1)..(1): n is a, c, g, or t
  misc_feature (7)..(7): n is a, c, g, or t
  misc_feature (14)..(14): n is a, c, g, or t
  misc_feature (17)..(17): n is a, c, g, or t
ngcacgnggcgctnccnggccgcgcttcctgcgtccccaacccggtccctgagagggcactgcgccctctccaccactgcgttccctcggctaagaatcccccgaaccccagccccgcgatcgcggcgcccaccgaggaggccgcccgggtggggcgcgggggtcgcgaagcccgcagccccggaccgcccagccgagacggagccggacccgccgcctcccgggcccttccaccgcagctatccgcacgggaggcctcgcgattgctcggaaccatcccgcaggagttcagctgatattttctagtgtggggcgagagattttgtggagcgcatttaaggggtttttgttgtgactgctgccttgtatatatttattttctttcttggaactgggcctcgccctcctcccactgacatgatggcccagtccaaggccaatggctcgcactatgcgctgaccgccatcggcctggggatgctggtccttggggtgatcatggccatgtggaacctggtacccggcttcagcgcggccgagaagccaacagctcagggcagcaacaagaccgaggtgggtggcggcatcctcaagagcaagaccttctctgtggcctacgtgctggtcggggccggggtgatgctgctgctgctttctatctgcctgagtatcagggataagaggaagcagcggcagggcgaggacctggcccatgtccagcacccgacaggcgctgggcctcacgcccaggaggaagacagccaggaggaagaagaggaggatgaggaggctgcctcaaggtactatgttcccagctacgaggaagtgatgaacacaaactactcagaagcaaggggagaggagcagaacccgaggttgagcatctctctcccgtcctatgagtcactgacggggctcgacgagaccacccccacatccaccagggctgacgtggaggccagccctgggaacccccctgacaggcagaactctaagttggccaaacgactgaaaccgctgaaagttcgaaggattaaatctgaaaagcttcacctcaaagactttaggatcaacctcccagacaaaaacgtccctcctccctcgatagagcctttgactcctccaccgcagtatgatgaagtccaggagaaggcccccgacacccggccgcccgactgaatggccccacttgagccacgctccctcctgtctctcacacctttcacccccaagactctaacaaagccacatgagccacagttgagaagcggaggggccagctgtgcatggagccatttggatggcggcgggcggggggggattctctgtatcaggagtgactttgttgccccacacagcctcctgctgcaggtgctttggaaagagatgctgccttggagctggtgaatctgtggaccacattcaagggtgtggcacaggcatcttcccatccttttcactccgaatcgctggcgacacattctcctttccagctaggaaagggttcctcgcggctggtttagattgtggttgtttgttttgcttctactaagactgttttgtttcaaaaaggaaacaagttttgtgtttgctgtctacgctggagtcctgaactgtgggtagaaaacacgacctggctttgtagaaaggacacagggctgttttatgaactaagcggtgaggctcaggtggcggctctcgcagagcccctgatgctgttgttctttgagggcttaaggcctgatgaacgtaggcacgtgatgcgtaatagtcttcaatggtacacttaactagtctcttctgtgtaacagcaaaaaaaaaaaaaaaagaagaagaaagaaaactgtaggaaatgttctttttgaaatgccatgcaatggagctttttgtaataaaatattttatatgtagta

SEQ ID NO: 440588 - DNA, 409 bp, Homo sapiens
gctggacgctcacccaagaaggggaccccggcctgacctctctcggaattcaaaaaaatctaaggctcagagagggaatgggagctggctcttccctctgtgtttagcatccacgttttttggcggtctggctgaaaccagcccaccctagttcgggcgccagagcaacgcagttccgagggcagatctccaagggaagaggcagagccgcgggttgttctttgagggcttaaggcctgatgaacgtaggcacgtgatgcgtaatagtcttcaatggtacacttaactagtctcttctgtgtaacagcaaaaaaaaaaaaaaaagaagaagaaagaaaactgtaggaaatgttctttttgaaatgccatgcaatggagctttttgtaataaaatattttatatgtagta

SEQ ID NO: 440589 - DNA, 1975 bp, Homo sapiens
gctggacgctcacccaagaaggggaccccggcctgacctctctcggaattcaaaaaaatctaaggctcagagagggaatgggagctggctcttccctctgtgtttagcatccacgttttttggcggtctggctgaaaccagcccaccctagttcgggcgccagagcaacgcagttccgagggcagatctccaagggaagaggcagagccgcgggtggatctttaactcaagactagcatgaagagttgccttctggcctgccctgagtctcctcaaataacaacaggcccttccaccgcagctatccgcacgggaggcctcgcgattgctcggaaccatcccgcaggagttcagctgatattttctagtgtggggcgagagattttgtggagcgcatttaaggggtttttgttgtgactgctgccttgtatatatttattttctttcttggaactgggcctcgccctcctcccactgacatgatggcccagtccaaggccaatggctcgcactatgcgctgaccgccatcggcctggggatgctggtccttggggtgatcatggccatgtggaacctggtacccggcttcagcgcggccgagaagccaacagctcagggcagcaacaagaccgaggtgggtggcggcatcctcaagagcaagaccttctctgtggcctacgtgctggtcggggccggggtgatgctgctgctgctttctatctgcctgagtatcagggataagaggaagcagcggcagggcgaggacctggcccatgtccagcacccgacaggcgctgggcctcacgcccaggaggaagacagccaggaggaagaagaggaggatgaggaggctgcctcaaggtactatgttcccagctacgaggaagtgatgaacacaaactactcagaagcaaggggagaggagcagaacccgaggttgagcatctctctcccgtcctatgagtcactgacggggctcgacgagaccacccccacatccaccagggctgacgtggaggccagccctgggaacccccctgacaggcagaactctaagttggccaaacgactgaaaccgctgaaagttcgaaggattaaatctgaaaagcttcacctcaaagactttaggatcaacctcccagacaaaaacgtccctcctccctcgatagagcctttgactcctccaccgcagtatgatgaagtccaggagaaggcccccgacacccggccgcccgactgaatggccccacttgagccacgctccctcctgtctctcacacctttcacccccaagactctaacaaagccacatgagccacagttgagaagcggaggggccagctgtgcatggagccatttggatggcggcgggcggggggggattctctgtatcaggagtgactttgttgccccacacagcctcctgctgcaggtgctttggaaagagatgctgccttggagctggtgaatctgtggaccacattcaagggtgtggcacaggcatcttcccatccttttcactccgaatcgctggcgacacattctcctttccagctaggaaagggttcctcgcggctggtttagattgtggttgtttgttttgcttctactaagactgttttgtttcaaaaaggaaacaagttttgtgtttgctgtctacgctggagtcctgaactgtgggtagaaaacacgacctggctttgtagaaaggacacagggctgttttatgaactaagcggtgaggctcaggtggcggctctcgcagagcccctgatgctgttgttctttgagggcttaaggcctgatgaacgtaggcacgtgatgcgtaatagtcttcaatggtacacttaactagtctcttctgtgtaacagcaaaaaaaaaaaaaaaagaagaagaaagaaaactgtaggaaatgttctttttgaaatgccatgcaatggagctttttgtaataaaatattttatatgtagta

SEQ ID NO: 440590 - DNA, 1938 bp, Homo sapiens
  misc_feature (1)..(1): n is a, c, g, or t
  misc_feature (7)..(7): n is a, c, g, or t
  misc_feature (14)..(14): n is a, c, g, or t
  misc_feature (17)..(17): n is a, c, g, or t
ngcacgnggcgctnccnggccgcgcttcctgcgtccccaacccggtccctgagagggcactgcgccctctccaccactgcgttccctcggctaagaatcccccgaaccccagccccgcgatcgcggcgcccaccgaggaggccgcccgggtggggcgcgggggtcgcgaagcccgcagccccggaccgcccagccgagacggagccggacccgccgcctcccgggtggatctttaactcaagactagcatgaagagttgccttctggcctgccctgagtctcctcaaataacaacaggcccttccaccgcagctatccgcacgggaggcctcgcgattgctcggaaccatcccgcaggagttcagctgatattttctagtgtggggcgagagattttgtggagcgcatttaaggggtttttgttgtgactgctgccttgtatatatttattttctttcttggaactgggcctcgccctcctcccactgacatgatggcccagtccaaggccaatggctcgcactatgcgctgaccgccatcggcctggggatgctggtccttggggtgatcatggccatgtggaacctggtacccggcttcagcgcggccgagaagccaacagctcagggcagcaacaagaccgaggtgggtggcggcatcctcaagagcaagaccttctctgtggcctacgtgctggtcggggccggggtgatgctgctgctgctttctatctgcctgagtatcagggataagaggaagcagcggcagggcgaggacctggcccatgtccagcacccgacaggcgctgggcctcacgcccaggaggaagacagccaggaggaagaagaggaggatgaggaggctgcctcaaggtactatgttcccagctacgaggaagtgatgaacacaaactactcagaagcaaggggagaggagcagaacccgaggttgagcatctctctcccgtcctatgagtcactgacggggctcgacgagaccacccccacatccaccagggctgacgtggaggccagccctgggaacccccctgacaggcagaactctaagttggccaaacgactgaaaccgctgaaagttcgaaggattaaatctgaaaagcttcacctcaaagactttaggatcaacctcccagacaaaaacgtccctcctccctcgatagagcctttgactcctccaccgcagtatgatgaagtccaggagaaggcccccgacacccggccgcccgactgaatggccccacttgagccacgctccctcctgtctctcacacctttcacccccaagactctaacaaaccatttggatggcggcgggcggggggggattctctgtatcaggagtgactttgttgccccacacagcctcctgctgcaggtgctttggaaagagatgctgccttggagctggtgaatctgtggaccacattcaagggtgtggcacaggcatcttcccatccttttcactccgaatcgctggcgacacattctcctttccagctaggaaagggttcctcgcggctggtttagattgtggttgtttgttttgcttctactaagactgttttgtttcaaaaaggaaacaagttttgtgtttgctgtctacgctggagtcctgaactgtgggtagaaaacacgacctggctttgtagaaaggacacagggctgttttatgaactaagcggtgaggctcaggtggcggctctcgcagagcccctgatgctgttgttctttgagggcttaaggcctgatgaacgtaggcacgtgatgcgtaatagtcttcaatggtacacttaactagtctcttctgtgtaacagcaaaaaaaaaaaaaaaagaagaagaaagaaaactgtaggaaatgttctttttgaaatgccatgcaatggagctttttgtaataaaatattttatatgtagta

SEQ ID NO: 440591 - DNA, 1992 bp, Homo sapiens
  misc_feature (1)..(1): n is a, c, g, or t
  misc_feature (7)..(7): n is a, c, g, or t
  misc_feature (14)..(14): n is a, c, g, or t
  misc_feature (17)..(17): n is a, c, g, or t
ngcacgnggcgctnccnggccgcgcttcctgcgtccccaacccggtccctgagagggcactgcgccctctccaccactgcgttccctcggctaagaatcccccgaaccccagccccgcgatcgcggcgcccaccgaggaggccgcccgggtggggcgcgggggtcgcgaagcccgcagccccggaccgcccagccgagacggagccggacccgccgcctcccgggtggatctttaactcaagactagcatgaagagttgccttctggcctgccctgagtctcctcaaataacaacaggcccttccaccgcagctatccgcacgggaggcctcgcgattgctcggaaccatcccgcaggagttcagctgatattttctagtgtggggcgagagattttgtggagcgcatttaaggggtttttgttgtgactgctgccttgtatatatttattttctttcttggaactgggcctcgccctcctcccactgacatgatggcccagtccaaggccaatggctcgcactatgcgctgaccgccatcggcctggggatgctggtccttggggtgatcatggccatgtggaacctggtacccggcttcagcgcggccgagaagccaacagctcagggcagcaacaagaccgaggtgggtggcggcatcctcaagagcaagaccttctctgtggcctacgtgctggtcggggccggggtgatgctgctgctgctttctatctgcctgagtatcagggataagaggaagcagcggcagggcgaggacctggcccatgtccagcacccgacaggcgctgggcctcacgcccaggaggaagacagccaggaggaagaaaaggaggaatgacgagagctgacctcaacgacaacaatgaacacccagactacgcaggcaagtgaatgcagcacacccagcctactcacgaagcacaggggagacgatggacgccggaacacccgagggttagaccatcctcgactccccgaacctaatgcagtcgctggcaccggggcctacgatgctcactacaccactcccgacacaatatcacaccccacgcttcactagacctattagtaacctacccaatacaccttacatcatacacgtctctccctactacacacggatcagcaaccatactatacacatttatttcccaactaccactacattgccaacaccccacctatgcgacagtcatttctgaatatacaactatacacagctcccgcgatagcaggcgcgtgcgacgcgacgatagatagcagccatacttcacggagccgacgacaccacgcgcagagcacaacacaccgacatcggttagccggagacgcaaccgccgtgcgcgaacgtgacaagtccagcaaggcacgagctccgccatccgcaagaaccagcacgaggaagcaggcagggcgacagcgcacaccacggggaggacgaggcgagagcaccggatccagcacccggaggactgcatgcgccggtctcgcgggaacgagcactcacgccctcgcggcatggaggtgaccgcgccgtgcgatagtatcgacactcacacaagcctgtgcacggcccgcaaaagcaacacgacagaggataaggccagcacgacagagcgacgccgagcgcacacagcgagccgctggcacgacagcatcaccacgaccccacctaactcccccctcacccctctaccgcgcagcaccgccactcgcaactaccacacataccatacccgccacctaaacacttacctcaacacatcccacacaacaccactcacctcgccgacaccctcctcactcaccaccctcctacacaaccacacccccaactacacatcgacaccatccatccaacacaccacactacacaagcctgcacccacatacgataccctacactctcccccacaaccacatccactcaatcacaactcaaaatctactcaaatactacatcacccccca

SEQ ID NO: 440592 - DNA, 490 bp, Homo sapiens
tgcactcttctatatctacattgcactcttctatatctacattgcactcttctatatctacattgcactcttctatatctacattgcactcttctatatctacattgcactcttctatatctacattaagactgttttgtttcaaaaaggaaacaagttttgtgtttgctgtctacgctggagtcctgaactgtgggtagaaaacacgacctggctttgtagaaaggacacagggctgttttatgaactaagcggtgaggctcaggtggcggctctcgcagagcccctgatgctgttgttctttgagggcttaaggcctgatgaacgtaggcacgtgatgcgtaatagtcttcaatggtacacttaactagtctcttctgtgtaacagcaaaaaaaaaaaaaaaagaagaagaaagaaaactgtaggaaatgttctttttgaaatgccatgcaatggagctttttgtaataaaatattttatatgtagta

SEQ ID NO: 440593 - DNA, 1986 bp, Homo sapiens
  misc_feature (1)..(1): n is a, c, g, or t
  misc_feature (7)..(7): n is a, c, g, or t
  misc_feature (14)..(14): n is a, c, g, or t
  misc_feature (17)..(17): n is a, c, g, or t
ngcacgnggcgctnccnggccgcgcttcctgcgtccccaacccggtccctgagagggcactgcgccctctccaccactgcgttccctcggctaagaatcccccgaaccccagccccgcgatcgcggcgcccaccgaggaggccgcccgggtggggcgcgggggtcgcgaagcccgcagccccggaccgcccagccgagacggagccggacccgccgcctcccgggtggatctttaactcaagactagcatgaagagttgccttctggcctgccctgagtctcctcaaataacaacaggcccttccaccgcagctatccgcacgggaggcctcgcgattgctcggaaccatcccgcaggagttcagctgatattttctagtgtggggcgagagattttgtggagcgcatttaaggggtttttgttgtgactgctgccttgtatatatttattttctttcttggaactgggcctcgccctcctcccactgacatgatggcccagtccaaggccaatggctcgcactatgcgctgaccgccatcggcctggggatgctggtccttggggtgatcatggccatgtggaacctggtacccggcttcagcgcggccgagaagccaacagctcagggcagcaacaagaccgaggtgggtggcggcatcctcaagagcaagaccttctctgtggcctacgtgctggtcggggccggggtgatgctgctgctgctttctatctgcctgagtatcagggataagaggaagcagcggcagggcgaggacctggcccatgtccagcacccgacaggcgctgggcctcacgcccaggaggaagacagccaggaggaagaagaggaggatgaggaggctgcctcaaggtactatgttcccagctacgaggaagtgatgaacacaaactactcagaagcaaggggagaggagcagaacccgaggttgagcatctctctcccgtcctatgagtcactgacggggctcgacgagaccacccccacatccaccagggctgacgtggaggccagccctgggaacccccctgacaggcagaactctaagttggccaaacgactgaaaccgctgaaagttcgaaggattaaatctgaaaagcttcacctcaaagactttaggatcaacctcccagacaaaaacgtccctcctccctcgatagagcctttgactcctccaccgcagtatgatgaagtccaggagaaggcccccgacacccggccgcccgactgaatggccccacttgagccacgctccctcctgtctctcacacctttcacccccaagactctaacaaagccacatgagccacagttgagaagcggaggggccagctgtgcatggagccatttggatggcggcgggcggggggggattctctgtatcaggagtgactttgttgccccacacagcctcctgctgcaggtgctttggaaagagatgctgccttggagctggtgaatctgtggaccacattcaagggtgtggcacaggcatcttcccatccttttcactccgaatcgctggcgacacattctcctttccagctaggaaagggttcctcgcggctggtttagattgtggttgtttgttttgcttctactaagactgttttgtttcaaaaaggaaacaagttttgtgtttgctgtctacgctggagtcctgaactgtgggtagaaaacacgacctggctttgtagaaaggacacagggctgttttatgaactaagcggtgaggctcaggtggcggctctcgcagagcccctgatgctgttgttctttgagggcttaaggcctgatgaacgtaggcacgtgatgcgtaatagtcttcaatggtacacttaactagtctcttctgtgtaacagcaaaaaaaaaaaaaaaagaagaagaaagaaaactgtaggaaatgttctttttgaaatgccatgcaatggagctttttgtaataaaatattttatatgtagta

SEQ ID NO: 440594 - DNA, 1902 bp, Homo sapiens
gctggacgctcacccaagaaggggaccccggcctgacctctctcggaattcaaaaaaatctaaggctcagagagggaatgggagctggctcttccctctgtgtttagcatccacgttttttggcggtctggctgaaaccagcccaccctagttcgggcgccagagcaacgcagttccgagggcagatctccaagggaagaggcagagccgcgggcccttccaccgcagctatccgcacgggaggcctcgcgattgctcggaaccatcccgcaggagttcagctgatattttctagtgtggggcgagagattttgtggagcgcatttaaggggtttttgttgtgactgctgccttgtatatatttattttctttcttggaactgggcctcgccctcctcccactgacatgatggcccagtccaaggccaatggctcgcactatgcgctgaccgccatcggcctggggatgctggtccttggggtgatcatggccatgtggaacctggtacccggcttcagcgcggccgagaagccaacagctcagggcagcaacaagaccgaggtgggtggcggcatcctcaagagcaagaccttctctgtggcctacgtgctggtcggggccggggtgatgctgctgctgctttctatctgcctgagtatcagggataagaggaagcagcggcagggcgaggacctggcccatgtccagcacccgacaggcgctgggcctcacgcccaggaggaagacagccaggaggaagaagaggaggatgaggaggctgcctcaaggtactatgttcccagctacgaggaagtgatgaacacaaactactcagaagcaaggggagaggagcagaacccgaggttgagcatctctctcccgtcctatgagtcactgacggggctcgacgagaccacccccacatccaccagggctgacgtggaggccagccctgggaacccccctgacaggcagaactctaagttggccaaacgactgaaaccgctgaaagttcgaaggattaaatctgaaaagcttcacctcaaagactttaggatcaacctcccagacaaaaacgtccctcctccctcgatagagcctttgactcctccaccgcagtatgatgaagtccaggagaaggcccccgacacccggccgcccgactgaatggccccacttgagccacgctccctcctgtctctcacacctttcacccccaagactctaacaaagccacatgagccacagttgagaagcggaggggccagctgtgcatggagccatttggatggcggcgggcggggggggattctctgtatcaggagtgactttgttgccccacacagcctcctgctgcaggtgctttggaaagagatgctgccttggagctggtgaatctgtggaccacattcaagggtgtggcacaggcatcttcccatccttttcactccgaatcgctggcgacacattctcctttccagctaggaaagggttcctcgcggctggtttagattgtggttgtttgttttgcttctactaagactgttttgtttcaaaaaggaaacaagttttgtgtttgctgtctacgctggagtcctgaactgtgggtagaaaacacgacctggctttgtagaaaggacacagggctgttttatgaactaagcggtgaggctcaggtggcggctctcgcagagcccctgatgctgttgttctttgagggcttaaggcctgatgaacgtaggcacgtgatgcgtaatagtcttcaatggtacacttaactagtctcttctgtgtaacagcaaaaaaaaaaaaaaaagaagaagaaagaaaactgtaggaaatgttctttttgaaatgccatgcaatggagctttttgtaataaaatattttatatgtagta

SEQ ID NO: 440595 - DNA, 1038 bp, Homo sapiens
  misc_feature (1)..(1): n is a, c, g, or t
  misc_feature (36)..(36): n is a, c, g, or t
  misc_feature (38)..(38): n is a, c, g, or t
  misc_feature (40)..(40): n is a, c, g, or t
  misc_feature (54)..(54): n is a, c, g, or t
ngagagagagagagagagagagagagagagagaganananagagagagagaganccccacatccaccagggctgacgtggaggccagccctgggaacccccctgacaggcagaactctaagttggccaaacgactgaaaccgctgaaagttcgaaggattaaatctgaaaagcttcacctcaaagactttaggatcaacctcccagacaaaaacgtccctcctccctcgatagagcctttgactcctccaccgcagtatgatgaagtccaggagaaggcccccgacacccggccgcccgactgaatggccccacttgagccacgctccctcctgtctctcacacctttcacccccaagactctaacaaagccacatgagccacagttgagaagcggaggggccagctgtgcatggagccatttggatggcggcgggcggggggggattctctgtatcaggagtgactttgttgccccacacagcctcctgctgcaggtgctttggaaagagatgctgccttggagctggtgaatctgtggaccacattcaagggtgtggcacaggcatcttcccatccttttcactccgaatcgctggcgacacattctcctttccagctaggaaagggttcctcgcggctggtttagattgtggttgtttgttttgcttctactaagactgttttgtttcaaaaaggaaacaagttttgtgtttgctgtctacgctggagtcctgaactgtgggtagaaaacacgacctggctttgtagaaaggacacagggctgttttatgaactaagcggtgaggctcaggtggcggctctcgcagagcccctgatgctgttgttctttgagggcttaaggcctgatgaacgtaggcacgtgatgcgtaatagtcttcaatggtacacttaactagtctcttctgtgtaacagcaaaaaaaaaaaaaaaagaagaagaaagaaaactgtaggaaatgttctttttgaaatgccatgcaatggagctttttgtaataaaatattttatatgtagta

SEQ ID NO: 440596 - DNA, 3395 bp, Homo sapiens
  misc_feature (176)..(176): n is a, c, g, or t
  misc_feature (222)..(222): n is a, c, g, or t
ctcgctgctgccttgcagtttgatctcagactgctgtgctagcaatcagcgagactccatgggcgtaggaccctccgagccaggtgcgggatataatcttgtggcgcgccgttttttaagcctgttggaagagcgcagtattcgggtgggagtgacccgattttccaggtgcgtcngtcacccctttctttgactcagaaagggaactccctgaccccttgngcttcccaagtgaggcaatgcctcaccctgctttggcttgcgcacggtgcgcgcacccactgacctgcgcccattgtctggcactccctagtgagatgaacccggtacctcagatggaaatgcagaaatcacccgtcttctgcgtcgctcacgctgggagctgtgcaccggagctgttcctatttggccatcttggctcctctccccttgttcctgattttaatgggactaccttggttatttcacagcacacttacggtgctttgtgaagtgcctgctatgttactatcatcatcttcctgacaagatggtgctgtagaaatctttgcatattgctatgggcttccaagaaaaactacctcgaaggaaaacaaagacaagatgacgatcattctaatgagaagaattataatatgacatgcacactctttacaaagggtagaagtaagacatatcaagatttaaaacataaatagcttggaacaccctgaagagcaacatgggagaaactgagaaaagaattgaaacccatagaataagatgtctttccaagttgaagatgtttctgttggcaataacatgtgcatttgtatccaaaacactgtctggatcttatatgaattccatgctcacacaaatagagagacaattcaacatcccaacatctctagttggattcattaatggaagctttgagattggaaatcttttgttgattatatttgtgagttattttggaaccaaactgcatagacctataatgattggcattggatgtgtggttatgggcttaggctgtttcttaaaatcactacctcatttcctcatgaaccaatatgaatatgaatctacagtttcagtttcaggcaacttgtcctcaaacagtttcttgtgtatggaaaatggaacccagattttaagaccaacgcaggatccatcagagtgtacaaaggaagttaaatcattaatgtgggtgtacgtcctagtaggcaatattgtacgtggaatgggtgaaactcccatcctgcctttgggtatttcctatatagaagattttgccaaatttgaaaattctcctttatatattgggcttgtagaaacaggagctattattggtcctttgattggacttttgttggcatcattctgtgcaaatgtttatgttgacactggatttgtgaacacagatgatctgatcataactcccactgacactcgttgggtcggtgcatggtggtttggctttctgatttgtgcaggagttaacgtgctcactgccattccttttttctttttgcccaacacacttccaaaggaaggactagagactaatgctgacatcattaaaaatgaaaatgaagacaaacaaaaagaagaggtcaagaaggaaaaatatggaatcactaaagattttctacctttcatgaaaagtctttcctgcaatccaatttatatgcttttcatacttgtaagtgtgatacagttcaatgcattcgttaacatgatctccttcatgcctaaatacctagaacagcaatatggaatatcatcttcagatgcaatctttctaatgggtatttataacttacctccaatatgtattggatatataattggtggtttaattatgaagaagttcaagattactgtcaaacaagctgcccacataggatgttggttatccttacttgagtatcttctctattttttatcttttctcatgacttgtgaaaattcttcagttgttggaataaatacctcttatgaaggaattccacaagatttatatgtggaaaatgacatctttgctgattgcaatgtggattgcaactgtccatctaaaatatgggatcctgtgtgtggaaacaatggcttgtcatatctgtcagcttgtcttgctggttgtgagacatccattggaacgggaataaacatggtgttccaaaattgcagctgtattcaaacatcaggaaattcatctgcagttcttgggctgtgcgacaaaggacctgactgttccttgatgctccagtacttcctaatcttgtcagcgatgagcagtttcatttattctttggctgccatacctggatatatggttctcttgaggtgtatgaaatctgaagagaagtcccttggtgtgggattacatacattttgcacaagagtatttgctggcattcctgcacctatatattttggcgctttaatggattccacatgtttacactggggaactttgaaatgtggtgagtcaggggcatgcaggatatatgattccaccaccttcagatacatctacctcggattgccggcagcactaagaggatcaagctttgttccagccttaatcatcttaattcttttgaggaagtgtcatctacctggtgaaaatgcctcttcaggaacagagcttatagagacaaaagtcaaagggaaggaaaatgagtgcaaagatatataccaaaagtccacggttttgaaagatgatgaattgaaaactaaattgtaattgtcctattatattacttttttcagaattagagaacatgctgtacaacttaattgttttaaaaatcagtagagatataatagataactttttcttgtctttaagaacctaaaaaacctcttaactcaaaataataaaatgttcactaatgatatttctaaggtatcagtgacacttgagttttcctaggagggacatcaataacagccccctaaagaagattcttagagccagctttatttttatgttgaaacagcaatttcccttaattcatcgaagtaagggtgtacttcctacatctccttctactaatacttctaaaaattttctgttatgaaaacctatttaattccactaaatttgttctttgatattggaattattcagatgcctaaattctcattctgttatgtgaagatttaaatattttattcaagtttatcgcttccatgtgagagaagcctacatcttcttattctatttaggaatcgttctttaactcttcttattcattctaggcatgactcctatataatagattactcataaatataccctcctactttcaattttttcttttctttattactcatacatttgctcaatttgtacagaatactgacaaacttaagcaggttattaaacatcatgaggcaaagat

SEQ ID NO: 440597 - DNA, 2964 bp, Homo sapiens
ctgctttatgcaaccatcagagccaaagaaacttaaccaaaggtttaaaacttacataaacaaagattcttttatttacaactctgcttctctgatgaacaagaagctgcagcttacacgtttgaggtgccttattcatactggctactcaatatgtaattttttaaaaaatctgttggtcttacagtatggaagcaaaaatgaatggtgatgttggtgaatgctaagggtagaagtaagacatatcaagatttaaaacataaatagcttggaacaccctgaagagcaacatgggagaaactgagaaaagaattgaaacccatagaataagatgtctttccaagttgaagatgtttctgttggcaataacatgtgcatttgtatccaaaacactgtctggatcttatatgaattccatgctcacacaaatagagagacaattcaacatcccaacatctctagttggattcattaatggaagctttgagattggaaatcttttgttgattatatttgtgagttattttggaaccaaactgcatagacctataatgattggcattggatgtgtggttatgggcttaggctgtttcttaaaatcactacctcatttcctcatgaaccaatatgaatatgaatctacagtttcagtttcaggcaacttgtcctcaaacagtttcttgtgtatggaaaatggaacccagattttaagaccaacgcaggatccatcagagtgtacaaaggaagttaaatcattaatgtgggtgtacgtcctagtaggcaatattgtacgtggaatgggtgaaactcccatcctgcctttgggtatttcctatatagaagattttgccaaatttgaaaattctcctttatatattgggcttgtagaaacaggagctattattggtcctttgattggacttttgttggcatcattctgtgcaaatgtttatgttgacactggatttgtgaacacagatgatctgatcataactcccactgacactcgttgggtcggtgcatggtggtttggctttctgatttgtgcaggagttaacgtgctcactgccattccttttttctttttgcccaacacacttccaaaggaaggactagagactaatgctgacatcattaaaaatgaaaatgaagacaaacaaaaagaagaggtcaagaaggaaaaatatggaatcactaaagattttctacctttcatgaaaagtctttcctgcaatccaatttatatgcttttcatacttgtaagtgtgatacagttcaatgcattcgttaacatgatctccttcatgcctaaatacctagaacagcaatatggaatatcatcttcagatgcaatctttctaatgggtatttataacttacctccaatatgtattggatatataattggtggtttaattatgaagaagttcaagattactgtcaaacaagctgcccacataggatgttggttatccttacttgagtatcttctctattttttatcttttctcatgacttgtgaaaattcttcagttgttggaataaatacctcttatgaaggaattccacaagatttatatgtggaaaatgacatctttgctgattgcaatgtggattgcaactgtccatctaaaatatgggatcctgtgtgtggaaacaatggcttgtcatatctgtcagcttgtcttgctggttgtgagacatccattggaacgggaataaacatggtgttccaaaattgcagctgtattcaaacatcaggaaattcatctgcagttcttgggctgtgcgacaaaggacctgactgttccttgatgctccagtacttcctaatcttgtcagcgatgagcagtttcatttattctttggctgccatacctggatatatggttctcttgaggtgtatgaaatctgaagagaagtcccttggtgtgggattacatacattttgcacaagagtatttgctggcattcctgcacctatatattttggcgctttaatggattccacatgtttacactggggaactttgaaatgtggtgagtcaggggcatgcaggatatatgattccaccaccttcagatacatctacctcggattgccggcagcactaagaggatcaagctttgttccagccttaatcatcttaattcttttgaggaagtgtcatctacctggtgaaaatgcctcttcaggaacagagcttatagagacaaaagtcaaagggaaggaaaatgagtgcaaagatatataccaaaagtccacggttttgaaagatgatgaattgaaaactaaattgtaattgtcctattatattacttttttcagaattagagaacatgctgtacaacttaattgttttaaaaatcagtagagatataatagataactttttcttgtctttaagaacctaaaaaacctcttaactcaaaataataaaatgttcactaatgatatttctaaggtatcagtgacacttgagttttcctaggagggacatcaataacagccccctaaagaagattcttagagccagctttatttttatgttgaaacagcaatttcccttaattcatcgaagtaagggtgtacttcctacatctccttctactaatacttctaaaaattttctgttatgaaaacctatttaattccactaaatttgttctttgatattggaattattcagatgcctaaattctcattctgttatgtgaagatttaaatattttattcaagtttatcgcttccatgtgagagaagcctacatcttcttattctatttaggaatcgttctttaactcttcttattcattctaggcatgactcctatataatagattactcataaatataccctcctactttcaattttttcttttctttattactcatacatttgctcaatttgtacagaatactgacaaacttaagcaggttattaaacatcatgaggcaaagat

SEQ ID NO: 440598 - DNA, 1820 bp, Homo sapiens
acagtgcctggtaaacagctctcatataacaagaactgcttagcatgtgaatggcaattcaaggtgaacaaaggacatgttgtttggaaggctgatgctctggttaaagagtcaagagaatctttttcttttaaattatttattctttagagcaattgggtgaagtatgtttttatgagcaaatttacctttctctccaagttctcccaaatttggaaaccatgtttctgttggcaataacatgtgcatttgtatccaaaacactgtctggatcttatatgaattccatgctcacacaaatagagagacaattcaacatcccaacatctctagttggattcattaatggaagctttgagattggaaatcttttgttgattatatttgtgagttattttggaaccaaactgcatagacctataatgattggcattggatgtgtggttatgggcttaggctgtttcttaaaatcactacctcatttcctcatgaaccaatatgaatatgaatctacagtttcagtttcaggcaacttgtcctcaaacagtttcttgtgtatggaaaatggaacccagattttaagaccaacgcaggatccatcagagtgtacaaaggaagttaaatcattaatgtgggtgtacgtcctagtaggcaatattgtacgtggaatgggtgaaactcccatcctgcctttgggtatttcctatatagaagattttgccaaatttgaaaattctcctttatatattgggcttgtagaaacaggagctattattggtcctttgattggacttttgttggcatcattctgtgcaaatgtttatgttgacactggatttgtgaacacagatgatctgatcataactcccactgacactcgttgggtcggtgcatggtggtttggctttctgatttgtgcaggagttaacgtgctcactgccattccttttttctttttgcccaacacacttccaaaggaaggactagagactaatgctgacatcattaaaaatgaaaatgaagacaaacaaaaagaagaggtcaagaaggaaaaatatggaatcactaaagaatgaattgtgagcagtttattaagcaaaccaagattgtgcataagaaagtcaagacagagaacatgtggacaggaaaagtgaaaggaaattaaaaattttctacctttcatgaaaagtctttcctgcaatccaatttatatgcttttcatacttgtaagtgtgatacagttcaatgcattcgttaacatgatctccttcatgcctaaatacctagaacagcaatatggaatatcatcttcagatgcaatctttctaatgggtatttataacttacctccaatatgtattggatatataattggtggtttaattatgaagaagttcaagattactgtcaaacaagctgcccacataggatgttggttatccttacttgagtatcttctctattttttatcttttctcatgacttgtgaaaattcttcagttgttggaataaatacctcttatgaagggtatgttgttttctaatgaatgtgagaatctttcaacaaatggttaatatgatattttttacaatggcaatgcacgatcagatcattttcttattggagttaatgatagtaatccatgcttttcctgtatctttcctccatctgtcaatcaagccaatctatccaagctctaggcttattaatgaggttgggaacatatcacagggtgagtgaatttatgattgtatgtgcatgtgggtgtgtgtgcatgattgtctttgtgatatccgagtagacattatcctatgaaaga

SEQ ID NO: 440599 - DNA, 1503 bp, Homo sapiens
acagtgcctggtaaacagctctcatataacaagaactgcttagcatgtgaatggcaattcaaggtgaacaaaggacatgttgtttggaaggctgatgctctggttaaagagtcaagagaatctttttcttttaaattatttattctttagagcaattgggtgaagtatgtttttatgagcaaatttacctttctctccaagttctcccaaatttggaaaccatgtttctgttggcaataacatgtgcatttgtatccaaaacactgtctggatcttatatgaattccatgctcacacaaatagagagacaattcaacatcccaacatctctagttggattcattaatggaagctttgagattggaaatcttttgttgattatatttgtgagttattttggaaccaaactgcatagacctataatgattggcattggatgtgtggttatgggcttaggctgtttcttaaaatcactacctcatttcctcatgaaccaatatgaatatgaatctacagtttcagtttcaggcaacttgtcctcaaacagtttcttgtgtatggaaaatggaacccagattttaagaccaacgcaggatccatcagagtgtacaaaggaagttaaatcattaatgtgggtgtacgtcctagtaggcaatattgtacgtggaatgggtgaaactcccatcctgcctttgggtatttcctatatagaagattttgccaaatttgaaaattctcctttatatattgggcttgtagaaacaggagctattattggtcctttgattggacttttgttggcatcattctgtgcaaatgtttatgttgacactggatttgtgaacacagatgatctgatcataactcccactgacactcgttgggtcggtgcatggtggtttggctttctgatttgtgcaggagttaacgtgctcactgccattccttttttctttttgcccaacacacttccaaaggaaggactagagactaatgctgacatcattaaaaatgaaaatgaagacaaacaaaaagaagaggtcaagaaggaaaaatatggaatcactaaagaatgaattgtgagcagtttattaagcaaaccaagattgtgcataagaaagtcaagacagagaacatgtggacaggaaaagtgaaaggaaattaaaagtgagaacttgagcctgaatggtagcagtgtgaccaagaacatttactagaagcaggccacacattactagaggcaggccacacattactagaagcaggccaaacattactagaggcaggccacacatttggctctgtgctttttctaacaggaatcatttttgattaaatcatttacatagtccttagaatgtaccaaatgaatcagcatctctgaggatgggacctggatgttggtattttaaaaaatatctccaggtagatcttgctgagaaccaatggcagaaccactgaaactgttgttctgaagaagcaaaaaaaaattccggatacttg

SEQ ID NO: 440600 - DNA, 412 bp, Homo sapiens
ataaactttgccgtacaaataaagaaaattgaaatatttccaaataaatcaagtatcttaattcttgttgatagatttttctttccctgtcaattgtagctggcattcctgcacctatatattttggcgctttaatggattccacatgtttacactggggaactttgaaatgtggtgagtcaggggcatgcaggatatatgattccaccaccttcaggtaaagataataatttgtttaaaattgttttataagcatagactgtgcataacgcagcaccattcacacgtaactttttctttgtcaagtgaaaagaatacttttgtggttatttccagcagagatactgatgttatatctccattccttatttgcatactagaattgtattttcccattatttctcaagtgctt

SEQ ID NO: 440601 - DNA, 541 bp, Homo sapiens
agacaatattttggtcactttgtagttttgcttactgatctttaagactcaacagtgacttattgagggcaaaactgttgtgttctgatccctacccagtcagctacatcactgacttccagaagccaccaaaacattgctatgacttcagctttcaaggggaaaaaagaattagcaaacaatacatattacaaaatagtaaaaaacataatttgttgaggaggtggatgtttcaggaaaagccagtcacaaaatgcaaagccaagttcgtttgacacagttgtcattctttcatttcagattttctacctttcatgaaaagtctttcctgcaatccaatttatatgcttttcatacttgtaagtgtgatacagttcaatgcattcgttaacatgatctccttcatgcctaaatacctagaacagcaatatggaatatcatcttcagatgcaatctttctaatgggtatgtttgtttttctctgccttactagcacactttcccccccacgaacagtgtgatggcgggtgtagcaaactcc

SEQ ID NO: 440602 - DNA, 2487 bp, Homo sapiens
acagtgcctggtaaacagctctcatataacaagaactgcttagcatgtgaatggcaattcaaggtgaacaaaggacatgttgtttggaaggctgatgctctggttaaagagtcaagagaatctttttcttttaaattatttattctttagagcaattgggtgaagtatgtttttatgagcaaatttacctttctctccaagttctcccaaatttggaaaccctgagaaaccctgaaaatactctgtcctgggcttatatgccttagacacaactgggattgctgagctcaagggttgcagagcatcctactatgggaagaatgaggacataactcagattgttctggatatttccctcattgctgagaatgcagaatgtttctgaccaagaattgcaagcaagaacaggaaagagtggagtcggccaagatgtttctgttggcaataacatgtgcatttgtatccaaaacactgtctggatcttatatgaattccatgctcacacaaatagagagacaattcaacatcccaacatctctagttggattcattaatggaagctttgagattggaaatcttttgttgattatatttgtgagttattttggaaccaaactgcatagacctataatgattggcattggatgtgtggttatgggcttaggctgtttcttaaaatcactacctcatttcctcatgaaccaatatgaatatgaatctacagtttcagtttcaggcaacttgtcctcaaacagtttcttgtgtatggaaaatggaacccagattttaagaccaacgcaggatccatcagagtgtacaaaggaagttaaatcattaatgtgggtgtacgtcctagtaggcaatattgtacgtggaatgggtgaaactcccatcctgcctttgggtatttcctatatagaagattttgccaaatttgaaaattctcctttatatattgggcttgtagaaacaggagctattattggtcctttgattggacttttgttggcatcattctgtgcaaatgtttatgttgacactggatttgtgaacacagatgatctgatcataactcccactgacactcgttgggtcggtgcatggtggtttggctttctgatttgtgcaggagttaacgtgctcactgccattccttttttctttttgcccaacacacttccaaaggaaggactagagactaatgctgacatcattaaaaatgaaaatgaagacaaacaaaaagaagaggtcaagaaggaaaaatatggaatcactaaagattttctacctttcatgaaaagtctttcctgcaatccaatttatatgcttttcatacttgtaagtgtgatacagttcaatgcattcgttaacatgatctccttcatgcctaaatacctagaacagcaatatggaatatcatcttcagatgcaatctttctaatgggtatttataacttacctccaatatgtattggatatataattggtggtttaattatgaagaagttcaagattactgtcaaacaagctgcccacataggatgttggttatccttacttgagtatcttctctattttttatcttttctcatgacttgtgaaaattcttcagttgttggaataaatacctcttatgaaggaattccacaagatttatatgtggaaaatgacatctttgctgattgcaatgtggattgcaactgtccatctaaaatatgggatcctgtgtgtggaaacaatggcttgtcatatctgtcagcttgtcttgctggttgtgagacatccattggaacgggaataaacatggtgttccaaaattgcagctgtattcaaacatcaggaaattcatctgcagttcttgggctgtgcgacaaaggacctgactgttccttgatgctccagtacttcctaatcttgtcagcgatgagcagtttcatttattctttggctgccatacctggatatatggttctcttgaggtgtatgaaatctgaagagaagtcccttggtgtgggattacatacattttgcacaagagtatttggtaaaaatagttattttttcccacatcctatcagaacaatattattattattattttttattacactttaagttttagggtacatgtgcacaacgtgcaggtttgttacatatgtatacatgtgccatgttggtgtgctgcacccattaactcatcatttaacattaggtgaatctcctaatgctatccctccccccttcccccaccccacaacaggccctggtgtgtgatgttccccttcctgtgtccatgtgcagaacaatattaaatactagataaacaaggtaatattatttcagaaaagcagtctagcaaatgtcccttctgtatgtaaaaagcacgttataaatatgagaatgcagcacacaaagagatagagaatctcttttacttgaaaaggccctgtctgaccttaattacactattctttgtttgaagatttg

SEQ ID NO: 440603 - DNA, 2835 bp, Homo sapiens
acagtgcctggtaaacagctctcatataacaagaactgcttagcatgtgaatggcaattcaaggtgaacaaaggacatgttgtttggaaggctgatgctctggttaaagagtcaagagaatctttttcttttaaattatttattctttagagcaattgggtgaagtatgtttttatgagcaaatttacctttctctccaagttctcccaaatttggaaaccatgtttctgttggcaataacatgtgcatttgtatccaaaacactgtctggatcttatatgaattccatgctcacacaaatagagagacaattcaacatcccaacatctctagttggattcattaatggaagctttgagattggaaatcttttgttgattatatttgtgagttattttggaaccaaactgcatagacctataatgattggcattggatgtgtggttatgggcttaggctgtttcttaaaatcactacctcatttcctcatgaaccaatatgaatatgaatctacagtttcagtttcaggcaacttgtcctcaaacagtttcttgtgtatggaaaatggaacccagattttaagaccaacgcaggatccatcagagtgtacaaaggaagttaaatcattaatgtgggtgtacgtcctagtaggcaatattgtacgtggaatgggtgaaactcccatcctgcctttgggtatttcctatatagaagattttgccaaatttgaaaattctcctttatatattgggcttgtagaaacaggagctattattggtcctttgattggacttttgttggcatcattctgtgcaaatgtttatgttgacactggatttgtgaacacagatgatctgatcataactcccactgacactcgttgggtcggtgcatggtggtttggctttctgatttgtgcaggagttaacgtgctcactgccattccttttttctttttgcccaacacacttccaaaggaaggactagagactaatgctgacatcattaaaaatgaaaatgaagacaaacaaaaagaagaggtcaagaaggaaaaatatggaatcactaaagattttctacctttcatgaaaagtctttcctgcaatccaatttatatgcttttcatacttgtaagtgtgatacagttcaatgcattcgttaacatgatctccttcatgcctaaatacctagaacagcaatatggaatatcatcttcagatgcaatctttctaatgggtatttataacttacctccaatatgtattggatatataattggtggtttaattatgaagaagttcaagattactgtcaaacaagctgcccacataggatgttggttatccttacttgagtatcttctctattttttatcttttctcatgacttgtgaaaattcttcagttgttggaataaatacctcttatgaaggaattccacaagatttatatgtggaaaatgacatctttgctgattgcaatgtggattgcaactgtccatctaaaatatgggatcctgtgtgtggaaacaatggcttgtcatatctgtcagcttgtcttgctggttgtgagacatccattggaacgggaataaacatggtgttccaaaattgcagctgtattcaaacatcaggaaattcatctgcagttcttgggctgtgcgacaaaggacctgactgttccttgatgctccagtacttcctaatcttgtcagcgatgagcagtttcatttattctttggctgccatacctggatatatggttctcttgaggtgtatgaaatctgaagagaagtcccttggtgtgggattacatacattttgcacaagagtatttgctggcattcctgcacctatatattttggcgctttaatggattccacatgtttacactggggaactttgaaatgtggtgagtcaggggcatgcaggatatatgattccaccaccttcagatacatctacctcggattgccggcagcactaagaggatcaagctttgttccagccttaatcatcttaattcttttgaggaagtgtcatctacctggtgaaaatgcctcttcaggaacagagcttatagagacaaaagtcaaagggaaggaaaatgagtgcaaagatatataccaaaagtccacggttttgaaagatgatgaattgaaaactaaattgtaattgtcctattatattacttttttcagaattagagaacatgctgtacaacttaattgttttaaaaatcagtagagatataatagataactttttcttgtctttaagaacctaaaaaacctcttaactcaaaataataaaatgttcactaatgatatttctaaggtatcagtgacacttgagttttcctaggagggacatcaataacagccccctaaagaagattcttagagccagctttatttttatgttgaaacagcaatttcccttaattcatcgaagtaagggtgtacttcctacatctccttctactaatacttctaaaaattttctgttatgaaaacctatttaattccactaaatttgttctttgatattggaattattcagatgcctaaattctcattctgttatgtgaagatttaaatattttattcaagtttatcgcttccatgtgagagaagcctacatcttcttattctatttaggaatcgttctttaactcttcttattcattctaggcatgactcctatataatagattactcataaatataccctcctactttcaattttttcttttctttattactcatacatttgctcaatttgtacagaatactgacaaacttaagcaggttattaaacatcatgaggcaaagat

SEQ ID NO: 440604 - DNA, 1255 bp, Homo sapiens
acagtgcctggtaaacagctctcatataacaagaactgcttagcatgtgaatggcaattcaaggtgaacaaaggacatgttgtttggaaggctgatgctctggttaaagagtcaagagaatctttttcttttaaattatttattctttagagcaattgggtgaagtatgtttttatgagcaaatttacctttctctccaagttctcccaaatttggaaaccatgtttctgttggcaataacatgtgcatttgtatccaaaacactgtctggatcttatatgaattccatgctcacacaaatagagagacaattcaacatcccaacatctctagttggattcattaatggaagctttgagattggaaatcttttgttgattatatttgtgagttattttggaaccaaactgcatagacctataatgattggcattggatgtgtggttatgggcttaggctgtttcttaaaatcactacctcatttcctcatgaaccaatatgaatatgaatctacagtttcagtttcaggcaacttgtcctcaaacagtttcttgtgtatggaaaatggaacccagattttaagaccaacgcaggatccatcagagtgtacaaaggaagttaaatcattaatgtgggtgtacgtcctagtaggcaatattgtacgtggaatgggtgaaactcccatcctgcctttgggtatttcctatatagaagattttgccaaatttgaaaattctcctttatatattgggcttgtagaaacaggagctattattggtcctttgattggacttttgttggcatcattctgtgcaaatgtttatgttgacactggatttgtgaacacagatgatctgatcataactcccactgacactcgttgggtcggtgcatggtggtttggctttctgatttgtgcaggagttaacgtgctcactgccattccttttttctttttgcccaacacacttccaaaggaaggactagagactaatgctgacatcattaaaaatgaaaatgaagacaaacaaaaagaagaggtcaagaaggaaaaatatggaatcactaaaggcaaatatacatattctaaatactatgaaattgaccttttatttcatatagatatgtctgtattttagtctaacactatgatatgctatgctgtgttgagacaatttgtcatcaacagtcaccagtcaagaatacctaactagtccgattcttcctatggtactacttgaaaataaatattata

SEQ ID NO: 440605 - DNA, 516 bp, Homo sapiens
cccaaagtgctgggattacaggcatgagccactgcacccagcctactttgttattattatagatgtaagatacaatgaatttctctgagtttctctttaaagatttagcctgctaacttccttgacctttgttttcaaacctcaacttttctgttcctccttgcccctagttattgtaaaatagcctacccccttcccatcagttctaatcaatacctcacatctgttgccttggttacctgcacccattgttcccctcaaactgcatgtctcacacacttcaccactgtacctcacgtccccttcccctccatatttagaaaaatatttccaagtagccagtcaggtcagctcagattgcgcagtctgaccccagctcatgcgggagggacacagaggtagggattgcattaaggatataaaaactgcctggtctcctttgttctttgtgctcttgcaatcttgattgactcaagtggcacccttctgcagaagtaaattgccttgctgagaaaa

SEQ ID NO: 440606 - DNA, 1400 bp, Homo sapiens
gtggcttgtggaaaaagaacttatggtcagtgttcttgggcccttgtcaattgacccaaatatgctaaacacacaaaggcagcaggtgcagattttgctgcaagaattcgccactcggaaacctcaatatgaacagctgacagcagctggtcagggcattctgagcaggcctggagaagacccttctttacgtgggattgtgaaagagcaactggcagctgtgacccaaaaatgggatagcctaacagggcaattgagtgacagatgtgactggattgaccaagccattgttaaaagcacacagtatcaaagcctgctgagaagcctttctgataaactgagtgacttggataataaactcagcagcagtctggctgtgagcacgcaccctgatgctatgaaccaacagttggaaacagcccaaaaaatgaagcaggagatacagcaggaaaagaagcagataaaagtggcccaggcactctgtgaggatttgtcagcactggttaaagaagagtacttgaaagcagaacttagtaggcaactagaaggcatcttaaaatcatttaaggatgttgaacagaaagcagagaatcatgtccagcaccttcagtcggcctgtgcaagctctcatcaatttcagcaaatgtctagagattttcaggcttggctggatacaaagaaagaagagcaaaacaaatctcatccaatatctgccaaactcgatgtcttggagtcattaattaaagatcataaagactttagtaaaactttgaccgctcagtctcatatgtatgaaaaaaccattgcagaaggtgaaaatctgttattaaaaacacaagggtctgagaaggcagccttacagttacagcttaatacaattaaaaccaattgggatacatttaataagcaggtgaaagaaagagaaaacaagttaaaagagtcattggaaaaagcccttaagtataaagagcaagtagagactctctggccatggatagacaaatgccaaaacaacctggaggaaataaaattttgcttggatcctgctgaaggagagaattctattgccaagttaaagtctctgcagaaggaaatggaccaacactttggtatggtagaattactgaacaacacagccaatagcttgctcagtgtctgtgagatagataaagaagttgttacagatgagaataagtcactgatccagaaggtggacatggtcactgaacaacttcacagtaagaaattctgtctggagaacatgactcagaagtttaaagaatttcaagaagtttccaaagaatctaaaaggcagcttcagtgtgcaaaggagcagctagatatccatgattcgctgggatcccaggcttacagtaacaaatacctgaccatgttgcaaa

SEQ ID NO: 440607 - DNA, 1138 bp, Homo sapiens
gtggcttgtggaaaaagaacttatggtcagtgttcttgggcccttgtcaattgacccaaatatgctaaacacacaaaggcagcaggtgcagattttgctgcaagaattcgccactcggaaacctcaatatgaacagctgacagcagctggtcagggcattctgagcaggcctggagaagacccttctttacgtgggattgtgaaagagcaactggcagctgtgacccaaaaatgggatagcctaacagggcaattgagtgacagatgtgactggattgaccaagccattgttaaaagcacacagtatcaaagcctgctgagaagcctttctgataaactgagtgacttggataataaactcagcagcagtctggctgtgagcacgcaccctgatgctatgaaccaacagttggaaacagcccaaaaaatgaagcaggagatacagcaggaaaagaagcagataaaagtggcccaggcactctgtgaggatttgtcagcactggttaaagaagagtacttgaaagcagaacttagtaggcaactagaaggcatcttaaaatcatttaaggatgttgaacagaaagcagagaatcatgtccagcaccttcagtcggcctgtgcaagctctcatcaatttcagcaaatgtctagagattttcaggcttggctggatacaaagaaagaagagcaaaacaaatctcatccaatatctgccaaactcgatgtcttggagtcattaattaaagatcataaagactttagtaaaactttgaccgctcagtctcatatgtatgaaaaaaccattgcagaaggtgaaaatctgttattaaaaacacaagggtctgagaaggcagccttacagttacagcttaatacaattaaaaccaattgggatacatttaataagcaggtgaaagaaagagaaaacaagttaaaagagtcattggaaaaagccctagggtttgcctatggaagtgaggtggaaaggttgcaacttgccagctactgtgaagtggcaggagctggttatctggaatcctaggggaaagtcgtagcaccagttgaggatgcgtgctcatgacacacatcaccatgtggacaacgtgcatgtagcagatcaatggctatctgctgtcct

SEQ ID NO: 440608 - DNA, 2112 bp, Homo sapiens
cattccctaggaagtgctttgaagaaaaacttgaggtatatgaaatggttaaaaatcagaaactaaaccttttaacatggacatcaaagctttgccataagcaattcagcatattcctagaaatgtttctaatccataacctgagagaatgttgatctccatagtgtgaaaatgacttgggccagtttaacttgctcttttttttattttttcactaattcccttttgtttttctctgataattcttctctttcctgagcctctttagagcagcacttacaggattgcctctgtaaagccttattcctgtcccagaaaaggtaacccaaaaagtctctagtatccactaaaaggtaacccaaaaatctctagtatccactggctttctccagtgtggaagctttcccctccacctcccatagatcactggaaaggacccgaggcctcggttctaatccctggcttatcactaactgctgtgtggctttggcttgtcccttagtctctgtgagactgctgcaccctcatctgtcaaagatggaactgaacttagttgagctctgaggtccctgtggacttggcccctccacaccctcattatggcaactggacataaacttaacagaggacttcccagcaaaatgtcctcttcttcctacaaacaggctgtttctatatgtgcatgtttcatgctaagcacttctttcttgggtggagatggcaaaggcctctttctgctgagacaaagtgatttggagagtcacctggcccctgaagggggagtggtaggatccagccacccagtgtgcagtgaattggagcagggatctcagcacacagggaggtggggaggctccccctaacctcgggcacctgttgctcctccagactgcagcgcatgctcttagctcatcctcttaactggctctcaccgtgctcctggctttggtcaccacgtagctctcactccagcttcaggtagccatcagtaggacctggcaatatacactgatttggtttgttttatgtttgtctgcaggtgaaatccctaagggctctgccgtgtactccagccttgtgacccttgccttccaggaaccatgcaagaagcgcagccaccagaagtccttaaaacagcaggaaaggtgagcctgtcccccttttgtgcagctacctatctgctgaggagcatctgggcctcattcctccaagtccactggagggtccagaagagggagtcagagatgtatcctggtggagctgggagaaaggcagaaagcctttgtgacagctatggaataccgttagccaaggtccacttggcccagcactaagcaaaagatgcgtagtttgcacagaaggttttgtgatactgcctctcaacagccccagcagcttgggaactagcaagagcacatttcttgcctcatcagctgtcctgagatggaaaactcagtggatataggaccctgattccgatgaaaggggcacgtggtcccaatgctggagctcctctggcaggttctaaaagcacactacggagcagcggtgccctgccggacactgctggcgggggctcagtgagcactactcacagatccacacctgaccctgttgggtcgagtcaggctgggctttggtctgcactgtagcacctgtgttctttgagttcacatcatgaatgtggtgatttcccagataccatctcaggcttaacctagcacatcctatttcttttcttctatgatatccaaattggactgacctcacttcaaagttgctgtcccattttgtcaccctatcttatctcggggaaattgcagactgatggccagaccaactctgttgaaattcttgcatagagcaaacctgtgctcatttttaagtggcatgggagaggccccaagcctagtaaagcctagtctgtgtcttcacagtgctggtagaatgtgtttgtgtgtataaatatatgatatagatttatatatgttgctaacgccacatattgaaggccaacataactggtggacagggtgggtgacagaaaatgaaagtctttttggtgattgtttaagcaagatgtgtataaagaaataaatagtttttctttca

SEQ ID NO: 440609 - DNA, 2058 bp, Homo sapiens
cattccctaggaagtgctttgaagaaaaacttgaggtatatgaaatggttaaaaatcagaaactaaaccttttaacatggacatcaaagctttgccataagcaattcagcatattcctagaaatgtttctaatccataacctgagagaatgttgatctccatagtgtgaaaatgacttgggccagtttaacttgctcttttttttattttttcactaattcccttttgtttttctctgataattcttctctttcctgagcctctttagagcagcacttacaggattgcctctgtaaagccttattcctgtcccagaaaaggtaacccaaaaagtctctagtatccactaaaaggtaacccaaaaatctctagtatccactggctttctccagtgtggaagctttcccctccacctcccatagatcactggaaaggacccgaggcctcggttctaatccctggcttatcactaactgctgtgtggctttggcttgtcccttagtctctgtgagactgctgcaccctcatctgtcaaagatggaactgaacttagttgagctctgaggtccctgtggacttggcccctccacaccctcattatggcaactggacataaacttaacagaggacttcccagcaaaatgtcctcttcttcctacaaacaggctgtttctatatgtgcatgtttcatgctaagcacttctttcttgggtggagatggcaaaggcctctttctgctgagacaaagtgatttggagagtcacctggcccctgaagggggagtggtaggatccagccacccagtgtgcagtgaattggagcagggatctcagcacacagggaggtggggaggctccccctaacctcgggcacctgttgctcctccagactgcagcgcatgctcttagctcatcctcttaactggctctcaccgtgctcctggctttggtcaccacgtagctctcactccagcttcaggtagccatcagtaggacctggcaatatacactgatttggtttgttttatgtttgtctgcaggtgaaatccctaagggctctgccgtgtactccagccttgtgacccttgccttccaggaaccatgcaagaagcgcagccaccagaagtccttaaaacagcaggaaaggtgagcctgtcccccttttgtgcagctacctatctgctgaggagcatctgggcctcattcctccaagtccactggagggtccagaagagggagtcagagatgtatcctggtggagctgggagaaaggcagaaagcctttgtgacagctatggaataccgttagccaaggtccacttggcccagcactaagcaaaagatgcgtagtttgcacagaaggttttgtgatactgcctctcaacagccccagcagcttgggaactagcaagagcacatttcttgcctcatcagctgtcctgagatggaaaactcagtggatataggaccctgattccgatgaaaggggcacgtggtcccaatgctggagctcctctggcaggttctatgagcactactcacagatccacacctgaccctgttgggtcgagtcaggctgggctttggtctgcactgtagcacctgtgttctttgagttcacatcatgaatgtggtgatttcccagataccatctcaggcttaacctagcacatcctatttcttttcttctatgatatccaaattggactgacctcacttcaaagttgctgtcccattttgtcaccctatcttatctcggggaaattgcagactgatggccagaccaactctgttgaaattcttgcatagagcaaacctgtgctcatttttaagtggcatgggagaggccccaagcctagtaaagcctagtctgtgtcttcacagtgctggtagaatgtgtttgtgtgtataaatatatgatatagatttatatatgttgctaacgccacatattgaaggccaacataactggtggacagggtgggtgacagaaaatgaaagtctttttggtgattgtttaagcaagatgtgtataaagaaataaatagtttttctttca

SEQ ID NO: 440610 - DNA, 1393 bp, Homo sapiens
cattccctaggaagtgctttgaagaaaaacttgaggtatatgaaatggttaaaaatcagaaactaaaccttttaacatggacatcaaagctttgccataagcaattcagcatattcctagaaatgtttctaatccataacctgagagaatgttgatctccatagtgtgaaaatgacttgggccagtttaacttgctcttttttttattttttcactaattcccttttgtttttctctgataattcttctctttcctgagcctctttagagcagcacttacaggattgcctctgtaaagccttattcctgtcccagaaaaggtgaaatccctaagggctctgccgtgtactccagccttgtgacccttgccttccaggaaccatgcaagaagcgcagccaccagaagtccttaaaacagcaggaaaggtgagcctgtcccccttttgtgcagctacctatctgctgaggagcatctgggcctcattcctccaagtccactggagggtccagaagagggagtcagagatgtatcctggtggagctgggagaaaggcagaaagcctttgtgacagctatggaataccgttagccaaggtccacttggcccagcactaagcaaaagatgcgtagtttgcacagaaggttttgtgatactgcctctcaacagccccagcagcttgggaactagcaagagcacatttcttgcctcatcagctgtcctgagatggaaaactcagtggatataggaccctgattccgatgaaaggggcacgtggtcccaatgctggagctcctctggcaggttctaaaagcacactacggagcagcggtgccctgccggacactgctggcgggggctcagtgagcactactcacagatccacacctgaccctgttgggtcgagtcaggctgggctttggtctgcactgtagcacctgtgttctttgagttcacatcatgaatgtggtgatttcccagataccatctcaggcttaacctagcacatcctatttcttttcttctatgatatccaaattggactgacctcacttcaaagttgctgtcccattttgtcaccctatcttatctcggggaaattgcagactgatggccagaccaactctgttgaaattcttgcatagagcaaacctgtgctcatttttaagtggcatgggagaggccccaagcctagtaaagcctagtctgtgtcttcacagtgctggtagaatgtgtttgtgtgtataaatatatgatatagatttatatatgttgctaacgccacatattgaaggccaacataactggtggacagggtgggtgacagaaaatgaaagtctttttggtgattgtttaagcaagatgtgtataaagaaataaatagtttttctttca

SEQ ID NO: 440611 - DNA, 1794 bp, Homo sapiens
cattccctaggaagtgctttgaagaaaaacttgaggtatatgaaatggttaaaaatcagaaactaaaccttttaacatggacatcaaagctttgccataagcaattcagcatattcctagaaatgtttctaatccataacctgagagaatgttgatctccatagtgtgaaaatgacttgggccagtttaacttgctcttttttttattttttcactaattcccttttgtttttctctgataattcttctctttcctgagcctctttagagcagcacttacaggattgcctctgtaaagccttattcctgtcccagaaaaggtaacccaaaaagtctctagtatccactaaaaggtaacccaaaaatctctagtatccactggctttctccagtgtggaagctttcccctccacctcccatagatcactggaaaggacccgaggcctcggttctaatccctggcttatcactaactgctgtgtggctttggcttgtcccttagtctctgtgagactgctgcaccctcatctgtcaaagatggaactgaacttagttgagctctgaggtccctgtggacttggcccctccacaccctcattatggcaactggacataaacttaacagaggacttcccagcaaaatgtcctcttcttcctacaaacaggctgtttctatatgtgcatgtttcatgctaagcacttctttcttgggtggagatggcaaaggcctctttctgctgagacaaagtgatttggagagtcacctggcccctgaagggggagtggtaggatccagccacccagtgtgcagtgaattggagcagggatctcagcacacagggaggtggggaggctccccctaacctcgggcacctgttgctcctccagactgcagcgcatgctcttagctcatcctcttaactggctctcaccgtgctcctggctttggtcaccacgtagctctcactccagcttcaggtagccatcagtaggacctggcaatatacactgatttggtttgttttatgtttgtctgcaggtgaaatccctaagggctctgccgtgtactccagccttgtgacccttgccttccaggaaccatgcaagaagcgcagccaccagaagtccttaaaacagcaggaaagaactacaagtttataggacatggatttcagtgccctcatctggccaagcatcttcagctgccaatgcccaagtgtcttcctggtagtacacatgaagatgtcccgctctcccctgctcaaggagagagtgcctgacctgagctgggcccatcagatccagtacttacctggaataggaaaacgatggggagggtgaccaaagattgcaaaaatctttgaagcttatctacttgagagagagtccctgaagatactggcctctcattcctgctatgtatatccaatgtgactgaactctgaataaaatatacaagttataacaatgtagcaattgacccagcaaatgaggacacaaacgtgttggagggtgtctacagagaaatagacaagcgatgcacgacagatacatgtgtcagtctggtccctgcagttgtatttgtaataatacacattggagcaatttcatggccatcagttagagaatgtttgaggaatgatccattcatatcaagaaggacatttcaaagatcaaagcctgatggaaatgctggagaccatggcgctgataggagctcatgcgtgttgaccaattactacatgacaggcattggctccaggcttttcctgcactgctcatttaaacactgga

SEQ ID NO: 440612 - DNA, 1114 bp, Homo sapiens
ggagaatcaacagaaagggaacttctggaactgagaaccaaagtatccaaacaggagcagctccttcagagcacaactgagcatctgaagaacgccaaccagcagaaggagagcatggaacagttcattgtcagccagctaaccagaacacatgatgttttaaagaaggcaaggactaacttagaggtgaaatccctaagggctctgccgtgtactccagccttgtgacccttgccttccaggaaccatgcaagaagcgcagccaccagaagtccttaaaacagcaggaaagtggcggagcgagggctactgcacagctagcagagtcgtggcgaggaggacagcacctgcatcgagctctccgcctcccccacccgccagcccaggcggccccagcagcagcgaccagaggagcccctgcagcaacgcaacggccaggtggacacctccatctacagcctcgtggcggacgggacctgttaggacactgccattgtgggcaacaaggacccgccttccatctgggccgccgtcccagggaaaaccttcctcaacgtcacgccagctgaggttggtgtcctggttggcaaagactggtcaagctttgtcatgaatgggctgacactggggggccagaaatatactgtggtcctggactcactgctgcaggatggggaattgaccacggatcttcgtatgaagagcatcggtggagcccccaccttcaacgtcattgtcaccatgactgccaagacgctaggcctgctgatgggcaaagaaggtatccatggcaatttcatcgacaagtaatgttatgaaatggcctcccaccttcagcgttcccagtactgacctcctttgttccttccactccaccgctccccacagctttgcccgcctttccttcacatacacacaccattttaatttcaggagtcattactccacacaccttattgctgccaaaaccacatgggctgggggccagggatagatggacagacaccttcccccacccatacccctcctgtgtgtggctggaaaacttttttgttttgatggattttttatgaataaaaaagtttctactaaaaaaaatcaataactgtacata

SEQ ID NO: 440613 - DNA, 1259 bp, Homo sapiens
ggagaatcaacagaaagggaacttctggaactgagaaccaaagtatccaaacaggagcagctccttcagagcacaactgagcatctgaagaacgccaaccagcagaaggagagcatggaacagttcattgtcagccagctaaccagaacacatgatgttttaaagaaggcaaggactaacttagaggtgaaatccctaagggctctgccgtgtactccagccttgtgacccttgccttccaggaaccatgcaagaagcgcagccaccagaagtccttaaaacagcaggaaaggtgagcctgtcccccttttgtgcagctacctatctgctgaggagcatctgggcctcattcctccaagtccactggagggtccagaagagggagtcagagatgtatcctggtggagctgggagaaaggcagaaagcctttgtgacagctatggaataccgttagccaaggtccacttggcccagcactaagcaaaagatgcgtagtttgcacagaaggttttgtgatactgcctctcaacagccccagcagcttgggaactagcaagagcacatttcttgcctcatcagctgtcctgagatggaaaactcagtggatataggaccctgattccgatgaaaggggcacgtggtcccaatgctggagctcctctggcaggttctaaaagcacactacggagcagcggtgccctgccggacactgctggcgggggctcagtgagcactactcacagatccacacctgaccctgttgggtcgagtcaggctgggctttggtctgcactgtagcacctgtgttctttgagttcacatcatgaatgtggtgatttcccagataccatctcaggcttaacctagcacatcctatttcttttcttctatgatatccaaattggactgacctcacttcaaagttgctgtcccattttgtcaccctatcttatctcggggaaattgcagactgatggccagaccaactctgttgaaattcttgcatagagcaaacctgtgctcatttttaagtggcatgggagaggccccaagcctagtaaagcctagtctgtgtcttcacagtgctggtagaatgtgtttgtgtgtataaatatatgatatagatttatatatgttgctaacgccacatattgaaggccaacataactggtggacagggtgggtgacagaaaatgaaagtctttttggtgattgtttaagcaagatgtgtataaagaaataaatagtttttctttca

SEQ ID NO: 440614 - DNA, 521 bp, Homo sapiens
ggagaatcaacagaaagggaacttctggaactgagaaccaaagtatccaaacaggagcagctccttcagagcacaactgagcatctgaagaacgccaaccagcagaaggagagcatggaacagttcattgtcagccagctaaccagaacacatgatgttttaaagaaggcaaggactaacttagaggtgaaatccctaagggctctgccgtgtactccagccttgtgacccttgccttccaggaaccatgcaagaagcgcagccaccagaagtccttaaaacagcaggaaagaactacaagtttataggacatggatttcagtgccctcatctggccaagcatcttcagctgccaatgcccaaggtaacctctctccctactaagacctgactcaggacctttccttaaggagatgtcctgttctttctttcccaccagaaccgccctggcccagaccccatttctgtctggtgaccaggacagtcccctcaccagtctcccaggttggggagggcagatc

SEQ ID NO: 440615 - DNA, 4198 bp, Homo sapiens
tttaaactgtgctttctaagcacagtcaggtagcaaaagtaataaaaaggatggttgaacaagttttcttgtatgttccaggatatgtttgggacttttctttgtttattatatgagttgttccctttgaaattaaagctattttgtaggttttgtgggacataatttgataagtagagttaattaaatttcttctggaagagatctaaattcttattcttagtgagagactgtagttaaaaggaaggcttttagaacttgggttcaaggaagatggagatgcgtcggaagctctttggcgggggtgaggaagttcagaaagtgtgcattttccttctggcatttaggtcttgtccgtgtgatttggtggtgcttgggtcataagcctgattaaaattcagggacatgtaccacggcggccaaagcggaattaatttttttatatggggactggagcgctgaaaagttgttcctgaccaggctctaatgagaaattcctctctccccaggttatgaagacagtatggagtttccagaccatagtagacatttgctacagtgtctgagcgagcagagacaccagggttttctttgtgactgcactgttctggtgggagatgcccagttccgagcgcaccgagctgtactggcttcatgcagcatgtatttccacctcttttacaaggaccagctggacaaaagagacattgttcatctgaacagcgacattgttacagcccccgctttcgctctcctgcttgaattcatgtatgaagggaaactccagttcaaagacttgcccattgaagacgtgctagcagctgccagttatctccacatgtatgacattgtcaaagtctgcaaaaagaagctgaaagagaaagccaccacggaggcagacagcaccaaaaaggaagaagatgcttcaagttgttcggacaaagtcgagagtctctccgatggcagcagccacatagcaggcgatttgcccagtgatgaagatgaaggagaagatgaaaaattgaacatcctgcccagcaaaagggacttggcggccgagcctgggaacatgtggatgcgattgccctcagactcagcaggcatcccccaggctggcggagaggcagagccacacgccacagcagctggaaaaacagtagccagcccctgcagctcaacagagtctttgtcccagaggtctgtcacctccgtgagggattcggcagatgttgactgtgtgctggacctgtctgtcaagtccagcctttcaggagttgaaaatctgaacagctcttatttctcttcacaggacgtgctgagaagcaacctggtgcaggtgaaggtggagaaagaggcttcctgtgatgagagtgatgttggcactaatgactatgacatggaacatagcactgtgaaagaaagtgtgagcactaataacagggtacagtatgagccggcccatctggctcccctgagggaggactcggtcttgagggagctggaccgggaggacaaagccagtgatgatgagatgatgaccccagagagcgagcgtgtccaggtggagggaggcatggagagcagtctgctcccctacgtctccaacatcctgagccccgcgggccagatcttcatgtgccccctgtgcaacaaggtcttccccagcccccacatcctgcagatccacctgagcacgcacttccgcgagcaggacggcatccgcagcaagcccgccgccgatgtcaacgtgcccacgtgctcgctgtgtgggaagactttctcttgcatgtacaccctcaagcgccacgagaggactcactcgggggagaagccctacacatgcacccagtgcggcaagagcttccagtactcgcacaacctgagccgccatgccgtggtgcacacccgcgagaagccgcacgcctgcaagtggtgcgagcgcaggttcacgcagtccggggacctgtacagacacattcgcaagttccactgtgagttggtgaactccttgtcggtcaaaagcgaagcactgagcttgcctactgtcagagactggaccttagaagatagctctcaagaactttggaaataattttatatatatataaataatatatatatatatacatatatataaatagatctctatatagttgtggtacggtctaaaagcagtcttgtttcctggaaataaaaagttgggatattaacttgtttttgcactttagaatagcatgagaatctcactaatttagcattctgataaaagaaactttagagcaagtcagaatagagaggtgtttttcctttgaggggataggggaagtaagccaataagaaccttttaaacaaatcgtcctgtcacaaaatgctttcatatggcttaattttgtcaacactgcattgtcttttgagctcttttttcccccccaacaaagtttttttgttttttgtttttttttttaagtagaaattccctccagttttattagcctctttatatgtctcaaattgcatgaattttttctggctgttggaaacctgaatgcttttagacccaaatggaaaatttctgaaatgctggattatctatttttaaacaagcagttgacttaaaactttctgtggcaacttctggttttctgacagttcccagtgagagaaatgctgaaagtacactgggatcactgggacactgtcttatgaaggtttgcttgggatgaaaaaggatattgcagcttcagcagtgttgaactgtgtgtttaaaaatgtgaattactgttattgtatactgtaattgattacatgggctgggggggtgtcaaagaacttgacaggttgtgttgatgctcttagttgagtcttgaaaagtaaatattaacgctacagaaatgcatgagtttcaatatattttttgtctttgtttgcattgtataactttaacgagtgagtttaaaattatttaatttccttagaaaaatagcaccatttggaaaaaaaaactggtgttatgaagaacgtaaatgcactgtttttatttttattttatataatttaaattgactttcccactgtctttaagttgaaactgttaagctgaataaaaacttaagctgcaaattgataacttcgctacataacaaggaaaatataaatgtttacaaacagcttaaagatttgcatgtgcagtgtgcatttataacaaacttctaattgcacaaaacccatgccagctcagagtttaggtgtacacatttacccagttgagcgttcttagaataactactgcacaagttgacaataggtcgttctctctttttttttgtttgctccctttttctttttctccccttcctccttaccctccctcccttactctccccccccaccaccaccctccacccccaactcatgaaaagattctatggactgaaaaagccccaggctgaaaggactggactgccttgattgacatggggaagggggttagtagactatgtggattgcggcagcagaggctgcagcctaacgtgtggttttaatgaccagcacgcaaggcaaaagcattttgcacagtgtttgttttcctgtcttgcacttacaaataaggtctatgggagtagcatggaaaacgtttgctgtttttcccttttttttttaattgcttttgtttaaaatttgatcgccttaactactgtaaacatagcctatttttgtgcttaagatactgaatggaaaactccattgtgtgttgctggactgttttggaaatatttggttaaatgtgtgttaatttggctgtaatggcatttaaagcaaacaaacaaacaaaaaaagctgtgaaaatggccttggagcattatctttagttacttgaagagtttctagtttttttaaaatacagtttatgttaaaataatttttattaatttagagaagacaatcaatgtctgtgagaaaacggactttcttttggattttctttttgtggtcattgtgagtgattgctttttccttttcttagtttcacattcttcctttgttctaaaacttagactgacatctagctttgacaatcatagtatgttttattttcctgagggggaataacttataatgctgtttagttttgtactattggtgtgttggtgaatttttaaactgtgtgctaactgcaataaattatatgaactgagaa

SEQ ID NO: 440616 - DNA, 260 bp, Homo sapiens
ggatccaacggatccaacgttggatccggttggatccggttgatccgatgtggtcattgtgagtgattgctttttccttttcttagtttcacattcttcctttgttctaaaacttagactgacatctagctttgacaatcatagtatgttttattttcctgagggggaataacttataatgctgtttagttttgtactattggtgtgttggtgaatttttaaactgtgtgctaactgcaataaattatatgaactgagaa

SEQ ID NO: 440617 - DNA, 3632 bp, Homo sapiens
gaggaggcggaggacgcggcggcggcggggacgcggtgacttagggccgctccgtgttatgaagacagtatggagtttccagaccatagtagacatttgctacagtgtctgagcgagcagagacaccagggttttctttgtgactgcactgttctggtgggagatgcccagttccgagcgcaccgagctgtactggcttcatgcagcatgtatttccacctcttttacaaggaccagctggacaaaagagacattgttcatctgaacagcgacattgttacagcccccgctttcgctctcctgcttgaattcatgtatgaagggaaactccagttcaaagacttgcccattgaagacgtgctagcagctgccagttatctccacatgtatgacattgtcaaagtctgcaaaaagaagctgaaagagaaagccaccacggaggcagacagcaccaaaaaggaagaagatgcttcaagttgttcggacaaagtcgagagtctctccgatggcagcagccacatagcaggcgatttgcccagtgatgaagatgaaggagaagatgaaaaattgaacatcctgcccagcaaaagggacttggcggccgagcctgggaacatgtggatgcgattgccctcagactcagcaggcatcccccaggctggcggagaggcagagccacacgccacagcagctggaaaaacagtagccagcccctgcagctcaacagagtctttgtcccagaggacgtgctgagaagcaacctggtgcaggtgaaggtggagaaagaggcttcctgtgatgagagtgatgttggcactaatgactatgacatggaacatagcactgtgaaagaaagtgtgagcactaataacagggtacagtatgagccggcccatctggctcccctgagggaggactcggtcttgagggagctggaccgggaggacaaagccagtgatgatgagatgatgaccccagagagcgagcgtgtccaggtggagggaggcatggagagcagtctgctcccctacgtctccaacatcctgagccccgcgggccagatcttcatgtgccccctgtgcaacaaggtcttccccagcccccacatcctgcagatccacctgagcacgcacttccgcgagcaggacggcatccgcagcaagcccgccgccgatgtcaacgtgcccacgtgctcgctgtgtgggaagactttctcttgcatgtacaccctcaagcgccacgagaggactcactcgggggagaagccctacacatgcacccagtgcggcaagagcttccagtactcgcacaacctgagccgccatgccgtggtgcacacccgcgagaagccgcacgcctgcaagtggtgcgagcgcaggttcacgcagtccggggacctgtacagacacattcgcaagttccactgtgagttggtgaactccttgtcggtcaaaagcgaagcactgagcttgcctactgtcagagactggaccttagaagatagctctcaagaactttggaaataattttatatatatataaataatatatatatatatacatatatataaatagatctctatatagttgtggtacggtctaaaagcagtcttgtttcctggaaataaaaagttgggatattaacttgtttttgcactttagaatagcatgagaatctcactaatttagcattctgataaaagaaactttagagcaagtcagaatagagaggtgtttttcctttgaggggataggggaagtaagccaataagaaccttttaaacaaatcgtcctgtcacaaaatgctttcatatggcttaattttgtcaacactgcattgtcttttgagctcttttttcccccccaacaaagtttttttgttttttgtttttttttttaagtagaaattccctccagttttattagcctctttatatgtctcaaattgcatgaattttttctggctgttggaaacctgaatgcttttagacccaaatggaaaatttctgaaatgctggattatctatttttaaacaagcagttgacttaaaactttctgtggcaacttctggttttctgacagttcccagtgagagaaatgctgaaagtacactgggatcactgggacactgtcttatgaaggtttgcttgggatgaaaaaggatattgcagcttcagcagtgttgaactgtgtgtttaaaaatgtgaattactgttattgtatactgtaattgattacatgggctgggggggtgtcaaagaacttgacaggttgtgttgatgctcttagttgagtcttgaaaagtaaatattaacgctacagaaatgcatgagtttcaatatattttttgtctttgtttgcattgtataactttaacgagtgagtttaaaattatttaatttccttagaaaaatagcaccatttggaaaaaaaaactggtgttatgaagaacgtaaatgcactgtttttatttttattttatataatttaaattgactttcccactgtctttaagttgaaactgttaagctgaataaaaacttaagctgcaaattgataacttcgctacataacaaggaaaatataaatgtttacaaacagcttaaagatttgcatgtgcagtgtgcatttataacaaacttctaattgcacaaaacccatgccagctcagagtttaggtgtacacatttacccagttgagcgttcttagaataactactgcacaagttgacaataggtcgttctctctttttttttgtttgctccctttttctttttctccccttcctccttaccctccctcccttactctccccccccaccaccaccctccacccccaactcatgaaaagattctatggactgaaaaagccccaggctgaaaggactggactgccttgattgacatggggaagggggttagtagactatgtggattgcggcagcagaggctgcagcctaacgtgtggttttaatgaccagcacgcaaggcaaaagcattttgcacagtgtttgttttcctgtcttgcacttacaaataaggtctatgggagtagcatggaaaacgtttgctgtttttcccttttttttttaattgcttttgtttaaaatttgatcgccttaactactgtaaacatagcctatttttgtgcttaagatactgaatggaaaactccattgtgtgttgctggactgttttggaaatatttggttaaatgtgtgttaatttggctgtaatggcatttaaagcaaacaaacaaacaaaaaaagctgtgaaaatggccttggagcattatctttagttacttgaagagtttctagtttttttaaaatacagtttatgttaaaataatttttattaatttagagaagacaatcaatgtctgtgagaaaacggactttcttttggattttctttttgtggtcattgtgagtgattgctttttccttttcttagtttcacattcttcctttgttctaaaacttagactgacatctagctttgacaatcatagtatgttttattttcctgagggggaataacttataatgctgtttagttttgtactattggtgtgttggtgaatttttaaactgtgtgctaactgcaataaattatatgaactgagaa

SEQ ID NO: 440618 - DNA, 2384 bp, Homo sapiens
tttaaactgtgctttctaagcacagtcaggtagcaaaagtaataaaaaggatggttgaacaagttttcttgtatgttccaggatatgtttgggacttttctttgtttattatatgagttgttccctttgaaattaaagctattttgtaggttttgtgggacataatttgataagtagagttaattaaatttcttctggaagagatctaaattcttattcttagtgagagactgtagttaaaaggaaggcttttagaacttgggttcaaggaagatggagatgcgtcggaagctctttggcgggggtgaggaagttcagaaagtgtgcattttccttctggcatttaggtcttgtccgtgtgatttggtggtgcttgggtcataagcctgattaaaattcagggacatgtaccacggcggccaaagcggaattaatttttttatatggggactggagcgctgaaaagttgttcctgaccaggctctaatgagaaattcctctctccccaggttatgaagacagtatggagtttccagaccatagtagacatttgctacagtgtctgagcgagcagagacaccagggttttctttgtgactgcactgttctggtgggagatgcccagttccgagcgcaccgagctgtactggcttcatgcagcatgtatttccacctcttttacaaggaccagctggacaaaagagacattgttcatctgaacagcgacattgttacagcccccgctttcgctctcctgcttgaattcatgtatgaagggaaactccagttcaaagacttgcccattgaagacgtgctagcagctgccagttatctccacatgtatgacattgtcaaagtctgcaaaaagaagctgaaagagaaagccaccacggaggcagacagcaccaaaaaggaagaagatgcttcaagttgttcggacaaagtcgagagtctctccgatggcagcagccacatagcaggcgatttgcccagtgatgaagatgaaggagaagatgaaaaattgaacatcctgcccagcaaaagggacttggcggccgagcctgggaacatgtggatgcgattgccctcagactcagcaggcatcccccaggctggcggagaggcagagccacacgccacagcagctggaaaaacagtagccagcccctgcagctcaacagagtctttgtcccagaggtctgtcacctccgtgagggattcggcagatgttgactgtgtgctggacctgtctgtcaagtccagcctttcaggagttgaaaatctgaacagctcttatttctcttcacaggacgtgctgagaagcaacctggtgcaggtgaaggtggagaaagaggcttcctgtgatgagagtgatgttggcactaatgactatgacatggaacatagcactgtgaaagaaagtgtgagcactaataacagggtacagtatgagccggcccatctggctcccctgagggaggactcggtcttgagggagctggaccgggaggacaaagccagtgatgatgagatgatgaccccagagagcgagcgtgtccaggtggagggaggcatggagagcagtctgctcccctacgtctccaacatcctgagccccgcgggccagatcttcatgtgccccctgtgcaacaaggtcttccccagcccccacatcctgcagatccacctgagcacgcacttccgcgagcaggacggcatccgcagcaagcccgccgccgatgtcaacgtgcccacgtgctcgctgtgtgggaagactttctcttgcatgtacaccctcaagcgccacgagaggactcactcgggggagaagccctacacatgcacccagtgcggcaagagcttccagtactcgcacaacctgagccgccatgccgtggtgcacacccgcgagaagccgcacgcctgcaagtggtgcgagcgcaggttcacgcagtccggggacctgtacagacacattcgcaagttccactgtgagttggtgaactccttgtcggtcaaaagcgaagcactgagcttgcctactgtcagagactggaccttagaagatagctctcaagaactttggaaataattttatatatatataaataatatatatatatatacatatatataaatagatctctatatagttgtggtacggtctaaaagcagtcttgtttcctggaaataaaaagttgggatattaacttgtttttgcactttagaatagcatgagaatctcactaatttagcattctgataaaagaaactttagagcaagtcagaatagagaggtgtttttcttctttttctttttttttttttttttacaataggccagtagaaatcttagtgagaacagcttttaaagcacttcaagg

SEQ ID NO: 440619 - DNA, 3743 bp, Homo sapiens
agttagtgtgtgcggatctgtggtggagaaggtatctcattcctctctaacatcatctccactttgcatctgtctctcttagtctgctttttttccaccgatgtaacagacctggagccagcaggactcagaggaaaggacttaatcaggtttatgtgtcctaaaggttatgaagacagtatggagtttccagaccatagtagacatttgctacagtgtctgagcgagcagagacaccagggttttctttgtgactgcactgttctggtgggagatgcccagttccgagcgcaccgagctgtactggcttcatgcagcatgtatttccacctcttttacaaggaccagctggacaaaagagacattgttcatctgaacagcgacattgttacagcccccgctttcgctctcctgcttgaattcatgtatgaagggaaactccagttcaaagacttgcccattgaagacgtgctagcagctgccagttatctccacatgtatgacattgtcaaagtctgcaaaaagaagctgaaagagaaagccaccacggaggcagacagcaccaaaaaggaagaagatgcttcaagttgttcggacaaagtcgagagtctctccgatggcagcagccacatagcaggcgatttgcccagtgatgaagatgaaggagaagatgaaaaattgaacatcctgcccagcaaaagggacttggcggccgagcctgggaacatgtggatgcgattgccctcagactcagcaggcatcccccaggctggcggagaggcagagccacacgccacagcagctggaaaaacagtagccagcccctgcagctcaacagagtctttgtcccagaggacgtgctgagaagcaacctggtgcaggtgaaggtggagaaagaggcttcctgtgatgagagtgatgttggcactaatgactatgacatggaacatagcactgtgaaagaaagtgtgagcactaataacagggtacagtatgagccggcccatctggctcccctgagggaggactcggtcttgagggagctggaccgggaggacaaagccagtgatgatgagatgatgaccccagagagcgagcgtgtccaggtggagggaggcatggagagcagtctgctcccctacgtctccaacatcctgagccccgcgggccagatcttcatgtgccccctgtgcaacaaggtcttccccagcccccacatcctgcagatccacctgagcacgcacttccgcgagcaggacggcatccgcagcaagcccgccgccgatgtcaacgtgcccacgtgctcgctgtgtgggaagactttctcttgcatgtacaccctcaagcgccacgagaggactcactcgggggagaagccctacacatgcacccagtgcggcaagagcttccagtactcgcacaacctgagccgccatgccgtggtgcacacccgcgagaagccgcacgcctgcaagtggtgcgagcgcaggttcacgcagtccggggacctgtacagacacattcgcaagttccactgtgagttggtgaactccttgtcggtcaaaagcgaagcactgagcttgcctactgtcagagactggaccttagaagatagctctcaagaactttggaaataattttatatatatataaataatatatatatatatacatatatataaatagatctctatatagttgtggtacggtctaaaagcagtcttgtttcctggaaataaaaagttgggatattaacttgtttttgcactttagaatagcatgagaatctcactaatttagcattctgataaaagaaactttagagcaagtcagaatagagaggtgtttttcctttgaggggataggggaagtaagccaataagaaccttttaaacaaatcgtcctgtcacaaaatgctttcatatggcttaattttgtcaacactgcattgtcttttgagctcttttttcccccccaacaaagtttttttgttttttgtttttttttttaagtagaaattccctccagttttattagcctctttatatgtctcaaattgcatgaattttttctggctgttggaaacctgaatgcttttagacccaaatggaaaatttctgaaatgctggattatctatttttaaacaagcagttgacttaaaactttctgtggcaacttctggttttctgacagttcccagtgagagaaatgctgaaagtacactgggatcactgggacactgtcttatgaaggtttgcttgggatgaaaaaggatattgcagcttcagcagtgttgaactgtgtgtttaaaaatgtgaattactgttattgtatactgtaattgattacatgggctgggggggtgtcaaagaacttgacaggttgtgttgatgctcttagttgagtcttgaaaagtaaatattaacgctacagaaatgcatgagtttcaatatattttttgtctttgtttgcattgtataactttaacgagtgagtttaaaattatttaatttccttagaaaaatagcaccatttggaaaaaaaaactggtgttatgaagaacgtaaatgcactgtttttatttttattttatataatttaaattgactttcccactgtctttaagttgaaactgttaagctgaataaaaacttaagctgcaaattgataacttcgctacataacaaggaaaatataaatgtttacaaacagcttaaagatttgcatgtgcagtgtgcatttataacaaacttctaattgcacaaaacccatgccagctcagagtttaggtgtacacatttacccagttgagcgttcttagaataactactgcacaagttgacaataggtcgttctctctttttttttgtttgctccctttttctttttctccccttcctccttaccctccctcccttactctccccccccaccaccaccctccacccccaactcatgaaaagattctatggactgaaaaagccccaggctgaaaggactggactgccttgattgacatggggaagggggttagtagactatgtggattgcggcagcagaggctgcagcctaacgtgtggttttaatgaccagcacgcaaggcaaaagcattttgcacagtgtttgttttcctgtcttgcacttacaaataaggtctatgggagtagcatggaaaacgtttgctgtttttcccttttttttttaattgcttttgtttaaaatttgatcgccttaactactgtaaacatagcctatttttgtgcttaagatactgaatggaaaactccattgtgtgttgctggactgttttggaaatatttggttaaatgtgtgttaatttggctgtaatggcatttaaagcaaacaaacaaacaaaaaaagctgtgaaaatggccttggagcattatctttagttacttgaagagtttctagtttttttaaaatacagtttatgttaaaataatttttattaatttagagaagacaatcaatgtctgtgagaaaacggactttcttttggattttctttttgtggtcattgtgagtgattgctttttccttttcttagtttcacattcttcctttgttctaaaacttagactgacatctagctttgacaatcatagtatgttttattttcctgagggggaataacttataatgctgtttagttttgtactattggtgtgttggtgaatttttaaactgtgtgctaactgcaataaattatatgaactgagaa

SEQ ID NO: 440620 - DNA, 3897 bp, Homo sapiens
agttagtgtgtgcggatctgtggtggagaaggtatctcattcctctctaacatcatctccactttgcatctgtctctcttagtctgctttttttccaccgatgtaacagacctggagccagcaggactcagaggaaaggacttaatcaggtttatgtgtcctaaaggttatgaagacagtatggagtttccagaccatagtagacatttgctacagtgtctgagcgagcagagacaccagggttttctttgtgactgcactgttctggtgggagatgcccagttccgagcgcaccgagctgtactggcttcatgcagcatgtatttccacctcttttacaaggaccagctggacaaaagagacattgttcatctgaacagcgacattgttacagcccccgctttcgctctcctgcttgaattcatgtatgaagggaaactccagttcaaagacttgcccattgaagacgtgctagcagctgccagttatctccacatgtatgacattgtcaaagtctgcaaaaagaagctgaaagagaaagccaccacggaggcagacagcaccaaaaaggaagaagatgcttcaagttgttcggacaaagtcgagagtctctccgatggcagcagccacatagcaggcgatttgcccagtgatgaagatgaaggagaagatgaaaaattgaacatcctgcccagcaaaagggacttggcggccgagcctgggaacatgtggatgcgattgccctcagactcagcaggcatcccccaggctggcggagaggcagagccacacgccacagcagctggaaaaacagtagccagcccctgcagctcaacagagtctttgtcccagaggacgtgctgagaagcaacctggtgcaggtgaaggtggagaaagaggcttcctgtgatgagagtgatgttggcactaatgactatgacatggaacatagcactgtgaaagaaagtgtgagcactaataacagggtacagtatgagccggcccatctggctcccctgagggaggactcggtcttgagggagctggaccgggaggacaaagccagtgatgatgagatgatgaccccagagagcgagcgtgtccaggtggagggaggcatggagagcagtctgctcccctacgtctccaacatcctgagccccgcgggccagatcttcatgtgccccctgtgcaacaaggtcttccccagcccccacatcctgcagatccacctgagcacgcacttccgcgagcaggacggcatccgcagcaagcccgccgccgatgtcaacgtgcccacgtgctcgctgtgtgggaagactttctcttgcatgtacaccctcaagcgccacgagaggactcactcgggggagaagccctacacatgcacccagtgcggcaagagcttccagtactcgcacaacctgagccgccatgccgtggtgcacacccgcgagaagccgcacgcctgcaagtggtgcgagcgcaggttcacgcagtccggggacctgtacagacacattcgcaagttccactgtgagttggtgaactccttgtcggtcaaaagcgaagcactgagcttgcctactgtcagagactggaccttagaagatagctctcaagaactttggaaataattttatatatatataaataatatatatatatatacatatatataaatagatctctatatagttgtggtacggtctaaaagcagtcttgtttcctggaaataaaaagttgggatattaacttgtttttgcactttagaatagcatgagaatctcactaatttagcattctgataaaagaaactttagagcaagtcagaatagagaggtgtttttcctttgaggggataggggaagtaagccaataagaaccttttaaacaaatcgtcctgtcacaaaatgctttcatatggcttaattttgtcaacactgcattgtcttttgagctcttttttcccccccaacaaagtttttttgttttttgtttttttttttaagtagaaattccctccagttttattagcctctttatatgtctcaaattgcatgaattttttctggctgttggaaacctgaatgcttttagacccaaatggaaaatttctgaaatgctggattatctatttttaaacaagcagttgacttaaaactttctgtggcaacttctggttttctgacagttcccagtgagagaaatgctgaaagtacactgggatcactgggacactgtcttatgaaggtttgcttgggatgaaaaaggatattgcagcttcagcagtgttgaactgtgtgtttaaaaatgtgaattactgttattgtatactgtaattgattacatgggctgggggggtgtcaaagaacttgacaggttgtgttgatgctcttagttgagtcttgaaaagtaaatattaacgctacagaaatgcatgagtttcaatatattttttgtctttgtttgcattgtataactttaacgagtgagtttaaaattatttaatttccttagaaaaatagcaccatttggaaaaaaaaactggtgttatgaagaacgtaaatgcactgtttttatttttattttatataatttaaattgactttcccactgtctttaagttgaaactgttaagctgaataaaaacttaagctgcaaattgataacttcgctacataacaaggaaaatataaatgtttacaaacagcttaaagatttgcatgtgcagtgtgcatttataacaaacttctaattgcacaaaacccatgccagctcagagtttaggtgtacacatttacccagttgagcgttcttagaataactactgcacaagttgacaataggtcgttctctctttttttttgtttgctccctttttctttttctccccttcctccttaccctccctcccttactctccccccccaccaccaccctccacccccaactcatgaaaagattctatggactgaaaaagccccaggctgaaaggactggactgccttgattgacatggggaagggggttagtagactatgtggattgcggcagcagaggctgcagcctaacgtgtggttttaatgaccagcacgcaaggcaaaagcattttgcacagtgtttgttttcctgtcttgcacttacaaataaggtctatgggagtagcatggaaaacgtttgctgtttttcccttttttttttaattgcttttgtttaaaatttgatcgccttaactactgtaaacatagcctatttttgtgcttaagatactgaatggaaaactccattgtgtgttgctggactgttttggaaatatttggttaaatgtgtgttaatttggctgtaatggcatttaaagcaaacaaacaaacaaaaaaagctgtgaaaatggccttggagcattatctttagttacttgaagagtttctagtttttttaaaatacagtttatgttaaaataatttttattaatttagagaagacaatcaatgtctgtgagaaaacggactttcttttggattttctttttgtggtcattgtgagtgattgctttttccttttcttagtttcacattcttcctttgttctaaaacttagactgacatctagctttgacaatcatagtatgttttattttcctgagggggaataacttataatgctgtttagttttgtactattggtgtgttggtgaatttttaaactgtgtgctaactgcaataaattatatgaactgagaaaaaaaaaagaaaaaaaaaaaatgttgtggcggtgggacctggaaaagttttagaccaattggttggggggggggcaattggtatggaaatgggcccagcgggtcccaggaactcgggcagagaggggtgggtttcccaataaaaagcgggggga

SEQ ID NO: 440621 - DNA, 1640 bp, Homo sapiens
atatctgcagaattcggcttactcactatagggccgagcggccgcccgggcggtcgtggctgtactggcggcggcagggctggcggcttaggccgcagaggtctgtgggcctgagcccacgctggactctgtccgttctgcgatgactgctgctctggccgtcgtcacgacgtcgggtttggaagatggggtgcctaggtcccgtggcgaagggaccggggaagtggtcttggagcgggggcccggcgcggcctaccacatgttcgtggtgatggaggacttggtggagaagctgaagctgctccgctacgaggaggagttcctccggaagagcaacctgaaggccccgtccagacactattttgcactgcctaccaaccctggcgaacagttctacatgttttgtactcttgctgcttggttgattaataaagcgggacgtccctttgagcagcctcaagaatatgatgaccctaatgcaacaatatctaacatactatccgagcttcggtcatttggaagaactgcagattttcctccttcaaaattaaagtcaggttatggagaacatgtatgctatgttcttgattgcttcgctgaagaagcattgaaatatattggtttcacctggaaaaggccaatatacccagtagaagaattagaagaagaaagcgttgcagaagatgatgcagaattaacattaaataaagtggatgaagaatttgtggaagaagagacagataatgaagaaaactttattgatctcaacgttttaaaggcccagacatatcacttggatatgaacgagactgccaaacaagaagatattttggaatccacaacagatgctgcagaatggagcctagaagtggaacgtgtactaccgcaactgaaagtcacgattaggactgacaataaggattggagaatccatgttgaccaaatgcaccagcacagaagtggaattgaatctgctctaaaggagaccaagggatttttggacaaactccataatgaaattactaggactttggaaaagatcagcagccgagaaaagtacatcaacaatcagcttgagaatttggttcaagaatatcgtgcagctcaagcccagctgagtgaggcaaaggagcgataccagcagggaaatggaggagtgacggaaagaaccagactcctctctgaggttatggaagaattagaaaaggtaaaacaagaaatggaagaaaagggcagcagcatgactgatggtgctcctttggtgaagattaaacagagcttaacaaaactgaagcaagaaactgtagagatggacattagaattggcattgtggaacacacactactccaatcaaagctgaaggagaagtccaacatgactaggaacatgcatgccacagttattccagaaccagcaacaggcttttattaaaacatactggttttcatgtttctgattagttgggttttttatatcaaactatatttcatgttgcatagatttcaaaacataattttatgttcaatgggtatttttttacatatacatactcacatattatatcatggtgattatgatggttaaagcctttacactgaatgtaatgtttaataaagaaattacaaattctcactttcta

SEQ ID NO: 440622 - DNA, 647 bp, Homo sapiens
acacctgtttagcagctctttcccctagaaaaggaagaaagtttagtctcaatacatcaaacactacatcatttttccatcctaaaaaatctcaggtgcttaaaatgccacagcaaaactgtgtgaatgtcagtaagtttttggctatatttttaaccctattttgggcttaagacaaagtgaggaaaatgtcatacaattctgtaatacactgatactccaaatgaacatttttatttcatgttattttcattctgcagctcctttggtgaagattaaacagagcttaacaaaactgaagcaagaaactgtagagatggacattagaattggcattgtggaacacacactactccaatcaaagctgaaggagaagtccaacatgactaggaacatgcatgccacagttattccagaaccagcaacaggcttttattaaaacatactggttttcatgtttctgattagttgggttttttatatcaaactatatttcatgttgcatagatttcaaaacataattttatgttcaatgggtatttttttacatatacatactcacatattatatcatggtgattatgatggttaaagcctttacactgaatgtaatgtttaataaagaaattacaaattctcactttcta

SEQ ID NO: 440623 - DNA, 1112 bp, Homo sapiens
acattttttagtgtcctatagaggaaaaagtgacataatgtcttatagaactataatattaagaaagatacccagaaaagctttagaaatctaaaatctcttcaggatgtttatactattttaattaataaccagttattagagaatttcaaagtatatgcgatgagataattgcgaggtttgagtgtctagtgactaaaacaactttgattgtgtttagtatattgcaacatgagaaaacagatgtgacagccatttggtgaagtttaacattaggagcattctgaaaaactgaaaagctttgtatatctgcatactttatattatttgaattatgtccaaaatattcctaatatctttatttttctatatgtgtggctaatatctaaattacattttcttaacacataattcaaaaattgtgaaagtttattaaaatgtaatgctcatgaaaacttgttttcatgaaaggttatggaagaattagaaaaggtaaaacaagaaatggaagaaaagggcagcagcatgactgatggtggtaagtacatgctcattttaggggaaaaactgagcaagagaaaaatagctcttcaagaaacctacttaacaaaatagtattaatatataaaacaaattatttgttgcttgtttgaagagagattcattgtacaaaaatgtctgataatcagcgtactgtttttcttataaatcagctgagaagggtaggctttttaactataatttagaggtttttaacattcaaactattgattcaaagagtgggaaatatttaaatatgtactttgttatgccagtttaaaaaataatattgtgttctgttttcatcaaatgagcttcactttttctattttatatacaaaagggcactaagtatatgcccaaatgacactaaggcagtgatgtgataacccgtagtttattttccctcctccccagtagaactgactgggcaggggtcaaatagagaagaattaatcatcctctggtaatcatcctccattgtgagcaggttactttgatatgggccagtagtgattgccgaaggcttttctatgccctagaaaaattttctagagttctattgatatata

SEQ ID NO: 440624 - DNA, 451 bp, Homo sapiens
acacctgtttagcagctctttcccctagaaaaggaagaaagtttagtctcaatacatcaaacactacatcatttttccatcctaaaaaatctcaggtgcttaaaatgccacagcaaaactgtgtgaatgtcagtaagtttttggctatatttttaaccctattttgggcttaagacaaagtgaggaaaatgtcatacaattctgtaatacactgatactccaaatgaacatttttatttcatgttattttcattctgcagctcctttggtgaagattaaacagagcttaacaaaactgaagcaagaaactgtagagatggacattagaattggcattgtggaacacacactactccaatcaaagctgaaggagaagtcaatatagtttgatataaaaaacccaactaatcagaaacatgagaaccagtatgtcttaataaaagcctgttgc

SEQ ID NO: 440625 - DNA, 1470 bp, Homo sapiens
caagaagagggccacaggtgacgtcattcaggaaagccgccctgattggagggaaggaggcggagtctagtttccctggtgacggattgtccggtggtcgcctggtaaccggtcgtggctgtactggcggcggcagggctggcggcttaggccgcagaggtctgtgggcctgagcccacgctggactctgtccgttctgcgatgactgctgctctggccgtcgtcacgacgtcgggtttggaagatggggtgcctaggtcccgtggcgaagggaccggggaagtggtcttggagcgggggcccggcgcggcctaccacatgttcgtggtgatggaggacttggtggagaagctgaagctgctccgctacgaggaggagttcctccggaagagcaacctgaaggccccgtccagacactattttgcactgcctaccaaccctggcgaacagttctacatgttttgtactcttgctgcttggttgattaataaagcgggacgtccctttgagcagcctcaagaatatgatgaccctaatgcaacaatatctaacatactatccgagcttcggtcatttggaagaactgcagattttcctccttcaaaattaaagtcaggttatggagaacatgtatgctatgttcttgattgcttcgctgaagaagcattgaaatatattggtttcacctggaaaaggccaatatacccagtagaagaattagaagaagaaagcgttgcagaagatgatgcagaattaacattaaataaagtggatgaagaatttgtggaagaagagacagataatgaagaaaactttattgatctcaacgttttaaaggcccagacatatcacttggatatgaacgagactgccaaacaagaagatattttggaatccacaacagatgctgcagaatggagcctagaagtggaacgtgtactaccgcaactgaaagtcacgattaggactgacaataaggattggagaatccatgttgaccaaatgcaccagcacagaagtggaattgaatctgctctaaaggagaccaagggatttttggacaaactccataatgaaattactaggactttggaaaagatcagcagccgagaaaagtacatcaacaatcagcttgagaatttggttcaagaatatcgtgcagctcaagcccagctgagtgaggcaaaggagcgataccagcagggaaatggaggagtgacggaaagaaccagactcctctctgaggttatggaagaattagaaaaggtaaaacaagaaatggaagaaaagggcagcagcatgactgatggtgctcctttggtgaagattaaacagagcttaacaaaactgaagcaagaaactgtagagatggacattagaattggcattgtggaacacacactactccaatcaaagctgaaggagaagtctatgtagtcacgtgtagtatgtagtccggaagtatgtagt

SEQ ID NO: 440626 - DNA, 1751 bp, Homo sapiens
atatctgcagaattcggcttactcactatagggccgagcggccgcccgggcggtcgtggctgtactggcggcggcagggctggcggcttaggccgcagaggtctgtgggcctgagcccacgctggactctgtccgttctgcgatgactgctgctctggccgtcgtcacgacgtcgggtttggaagatggggtgcctaggtcccgtggcgaagggaccggggaagtggtcttggagcgggggcccggcgcggcctaccacatgttcgtggtgatggaggacttggtggagaagctgaagctgctccgctacgaggaggagttcctccggaagagcaacctgaaggccccgtccagacactattttgcactgcctaccaaccctggcgaacagttctacatgttttgtactcttgctgcttggttgattaataaagcgggacgtccctttgagcagcctcaagaatatgatgaccctaatgcaacaatatctaacatactatccgagcttcggtcatttggaagaactgcagattttcctccttcaaaattaaagtcaggttatggagaacatgtatgctatgttcttgattgcttcgctgaagaagcattgaaatatattggtttcacctggaaaagggtttcaccatgttgcccaggctggtctcaaactcctggtctcagacagtccacctgccttggcctcccaaagtgctgggattatagatgtgagccatcacacccagccaggccaatatacccagtagaagaattagaagaagaaagcgttgcagaagatgatgcagaattaacattaaataaagtggatgaagaatttgtggaagaagagacagataatgaagaaaactttattgatctcaacgttttaaaggcccagacatatcacttggatatgaacgagactgccaaacaagaagatattttggaatccacaacagatgctgcagaatggagcctagaagtggaacgtgtactaccgcaactgaaagtcacgattaggactgacaataaggattggagaatccatgttgaccaaatgcaccagcacagaagtggaattgaatctgctctaaaggagaccaagggatttttggacaaactccataatgaaattactaggactttggaaaagatcagcagccgagaaaagtacatcaacaatcagcttgagaatttggttcaagaatatcgtgcagctcaagcccagctgagtgaggcaaaggagcgataccagcagggaaatggaggagtgacggaaagaaccagactcctctctgaggttatggaagaattagaaaaggtaaaacaagaaatggaagaaaagggcagcagcatgactgatggtgctcctttggtgaagattaaacagagcttaacaaaactgaagcaagaaactgtagagatggacattagaattggcattgtggaacacacactactccaatcaaagctgaaggagaagtccaacatgactaggaacatgcatgccacagttattccagaaccagcaacaggcttttattaaaacatactggttttcatgtttctgattagttgggttttttatatcaaactatatttcatgttgcatagatttcaaaacataattttatgttcaatgggtatttttttacatatacatactcacatattatatcatggtgattatgatggttaaagcctttacactgaatgtaatgtttaataaagaaattacaaattctcactttcta

SEQ ID NO: 440627 - DNA, 1013 bp, Homo sapiens
caagaagagggccacaggtgacgtcattcaggaaagccgccctgattggagggaaggaggcggagtctagtttccctggtgacggattgtccggtggtcgcctggtaaccggtcgtggctgtactggcggcggcagggctggcggcttaggccgcagaggtctgtgggcctgagcccacgctggactctgtccgttctgcgatgactgctgctctggccgtcgtcacgacgtcgggtttggaagatggggtgcctaggtcccgtggcgaagggaccggggaagtggtcttggagcgggggcccggcgcggcctaccacatgttcgtggtgatggaggacttggtggagaagctgaagctgctccgctacgaggaggagttcctccggaagagcaacctgaaggccccgtccagacactattttgcactgcctaccaaccctggcgaacagttctacatgttttgtactcttgctgcttggttgattaataaagcgggacgtccctttgagcagcctcaagaatatgatgaccctaatgcaacaatatctaacatactatccgagcttcggtcatttggaagaactgcagattttcctccttcaaaattaaagtcaggttatggagaacatgtatgctatgttcttgattgcttcgctgaagaagcattgaaatatattggtttcacctggaaaaggccaatatacccagtagaagaattagaagaagaaagcgttgcagaagatgatgcagaattaacattaaataaagtggatgaagaatttgtggaagaagagacagataatgaagaaaactttattgatctcaacgttttaaaggcccagacatatcacttggatatgaacgagactgccaaacaagaagatattttggaatccacaacagatgctgcagaatggagcctagaagtggaacgtgtactaccgcaactgaaagtcacgattaggactgacaataaggtatcaaagtgggaacacattttcttaaaaaaaaa

SEQ ID NO: 440628 - DNA, 840 bp, Homo sapiens
taaaactcttctaagtgtggttaaaatatttctcatcacagatattttgtgctattgaaaatttcaagctgtcttcttttgcacatgtagttgattatttgtagaatggattgagatgtaacccatttttaatatttttgaaaaaatatgtttgtgagttcttctatctgcaaattccatggaatttctagggatttttggacaaactccataatgaaattactaggactttggaaaagatcagcagccgagaaaagtacatcaacaatcagcttgagaatttggttcaagaatatcgtgcagctcaagcccagctgagtgaggcaaaggagcgataccagcagggaaatggaggagtgacggaaagaaccagactcctctctgaggttatggaagaattagaaaaggtaaaacaagaaatggaagaaaagggcagcagcatgactgatggtgctcctttggtgaagattaaacagagcttaacaaaactgaagcaagaaactgtagagatggacattagaattggcattgtggaacacacactactccaatcaaagctgaaggagaagtccaacatgactaggaacatgcatgccacagttattccagaaccagcaacaggcttttattaaaacatactggttttcatgtttctgattagttgggttttttatatcaaactatatttcatgttgcatagatttcaaaacataattttatgttcaatgggtatttttttacatatacatactcacatattatatcatggtgattatgatggttaaagcctttacactgaatgtaatgtttaataaagaaattacaaattctcactttcta

SEQ ID NO: 440629 - DNA, 2391 bp, Homo sapiens
acattttttagtgtcctatagaggaaaaagtgacataatgtcttatagaactataatattaagaaagatacccagaaaagctttagaaatctaaaatctcttcaggatgtttatactattttaattaataaccagttattagagaatttcaaagtatatgcgatgagataattgcgaggtttgagtgtctagtgactaaaacaactttgattgtgtttagtatattgcaacatgagaaaacagatgtgacagccatttggtgaagtttaacattaggagcattctgaaaaactgaaaagctttgtatatctgcatactttatattatttgaattatgtccaaaatattcctaatatctttatttttctatatgtgtggctaatatctaaattacattttcttaacacataattcaaaaattgtgaaagtttattaaaatgtaatgctcatgaaaacttgttttcatgaaaggttatggaagaattagaaaaggtaaaacaagaaatggaagaaaagggcagcagcatgactgatggtgctcctttggtgaagattaaacagagcttaacaaaactgaagcaagaaactgtagagatggacattagaattggcattgtggaacacacactactccaatcaaagctgaaggagaagtccaacatgactaggaacatgcatgccacagttattccagaaccagcaacaggcttttattaaaacatactggttttcatgtttctgattagttgggttttttatatcaaactatatttcatgttgcatagatttcaaaacataattttatgttcaatgggtatttttttacatatacatactcacatattatatcatggtgattatgatggttaaagcctttacactgaatgtaatgtttaataaagaaattacaaattctcactttctaagaagctttcactaatcattacctatgttaaagctcccacctggtggctcatttttcatagcattccttgtgtaagccaaggtatatgacctgcgttttctgcagatgctgctgctgtcacaacatgaactgctgacacagtcctttaccttgctccacctctgcagtgatcataagtgctttgtgcccagaggccactgaagatggtaggcaggattctttccaagaacccaaactgcctttgcctcagctttatggttacctaaaattgccactttttttaggttaaaaaaaacttcagtatcctcattaacatttgaagttggtttcttatgaatatttcgtggctaaaatgattttatagggaatctatcttctaggatctaagccactaaataaaaggataaatgaatgatgataagtcagtcactcatgtttgactctgttcttagaatgaagagaaggtgcatatgcatgtctcaatttctacctttttctgtggtatcggctatactagggaaccattttgtagaagaaggaacgatgacaggtcgcatgaagatcagcctctagtactgatgatctttacttatgcatcttcctgagcaactttctaggctaggatttctaaattggtgaaaaaagcagcattagagtgccagaattagcactggggaaaactggccaggggaacacaaagcaggagacagcctgcgttaatttttttttttaataattttcaaaagcagtggtagaaaatttgataagaatgctttatgtttaggacaacaaaaataattttaaaaagttattttttaccctaatacttttctccactgaatattattatttttttcttagctttttctttctagatgtattccccaacatgctcacatacacagatctttccctttccttactagacctctctttagtttaagataagtttagacaggagaaagtgtatgtaaactacctgaaaggatgacaatcaatacaatgacaaatatgccagtttatttaatttgtttaaaaaaaaaaaggcagaaaacccaccatgggaaaataagcattttttaaaatctgaagttgctcttttcctgtgtggtctttgggaggagtctagtacaaaaactgaaaacctttggtcctgggaatttattttcatggctgttgtcatggctgagtagttttttgatgaattcaatcaatgcagagaacgcttttagataaatcagaactctccttaaaatgcatttcaatcagaagcaaagtacacccattatttatgcagacatgtaaaaaatctaaaaattcttgcaatgagtagtataagccacctatttttacttccttctctgaaatattccagttaactcagcttgggttctgtgctcctcctctcttcctatagaacactgtgcataccttgaataaagagcttattatactatattgttatt

SEQ ID NO: 440630 - DNA, 2113 bp, Homo sapiens
acacctgtttagcagctctttcccctagaaaaggaagaaagtttagtctcaatacatcaaacactacatcatttttccatcctaaaaaatctcaggtgcttaaaatgccacagcaaaactgtgtgaatgtcagtaagtttttggctatatttttaaccctattttgggcttaagacaaagtgaggaaaatgtcatacaattctgtaatacactgatactccaaatgaacatttttatttcatgttattttcattctgcagctcctttggtgaagattaaacagagcttaacaaaactgaagcaagaaactgtagagatggacattagaattggcattgtggaacacacactactccaatcaaagctgaaggagaagtccaacatgactaggaacatgcatgccacagttattccagaaccagcaacaggcttttattaaaacatactggttttcatgtttctgattagttgggttttttatatcaaactatatttcatgttgcatagatttcaaaacataattttatgttcaatgggtatttttttacatatacatactcacatattatatcatggtgattatgatggttaaagcctttacactgaatgtaatgtttaataaagaaattacaaattctcactttctaagaagctttcactaatcattacctatgttaaagctcccacctggtggctcatttttcatagcattccttgtgtaagccaaggtatatgacctgcgttttctgcagatgctgctgctgtcacaacatgaactgctgacacagtcctttaccttgctccacctctgcagtgatcataagtgctttgtgcccagaggccactgaagatggtaggcaggattctttccaagaacccaaactgcctttgcctcagctttatggttacctaaaattgccactttttttaggttaaaaaaaacttcagtatcctcattaacatttgaagttggtttcttatgaatatttcgtggctaaaatgattttatagggaatctatcttctaggatctaagccactaaataaaaggataaatgaatgatgataagtcagtcactcatgtttgactctgttcttagaatgaagagaaggtgcatatgcatgtctcaatttctacctttttctgtggtatcggctatactagggaaccattttgtagaagaaggaacgatgacaggtcgcatgaagatcagcctctagtactgatgatctttacttatgcatcttcctgagcaactttctaggctaggatttctaaattggtgaaaaaagcagcattagagtgccagaattagcactggggaaaactggccaggggaacacaaagcaggagacagcctgcgttaatttttttttttaataattttcaaaagcagtggtagaaaatttgataagaatgctttatgtttaggacaacaaaaataattttaaaaagttattttttaccctaatacttttctccactgaatattattatttttttcttagctttttctttctagatgtattccccaacatgctcacatacacagatctttccctttccttactagacctctctttagtttaagataagtttagacaggagaaagtgtatgtaaactacctgaaaggatgacaatcaatacaatgacaaatatgccagtttatttaatttgtttaaaaaaaaaaaggcagaaaacccaccatgggaaaataagcattttttaaaatctgaagttgctcttttcctgtgtggtctttgggaggagtctagtacaaaaactgaaaacctttggtcctgggaatttattttcatggctgttgtcatggctgagtagttttttgatgaattcaatcaatgcagagaacgcttttagataaatcagaactctccttaaaatgcatttcaatcagaagcaaagtacacccattatttatgcagacatgtaaaaaatctaaaaattcttgcaatgagtagtataagccacctatttttacttccttctctgaaatattccagttaactcagcttgggttctgtgctcctcctctcttcctatagaacactgtgcataccttgaataaagagcttattatactatattgttatt

SEQ ID NO: 440631 - DNA, 791 bp, Homo sapiens
atatctgcagaattcggcttactcactatagggccgagcggccgcccgggcggtcgtggctgtactggcggcggcagggctggcggcttaggccgcagaggtctgtgggcctgagcccacgctggactctgtccgttctgcgatgactgctgctctggccgtcgtcacgacgtcgggtttggaagatggggtgcctaggtcccgtggcgaagggaccggggaagtggtcttggagcgggggcccggcgcggcctaccacatgttcgtggtgatggaggacttggtggagaagctgaagctgctccgctacgaggaggagttcctccggaagagcaacctgaaggccccgtccagggaagaactgcagattttcctccttcaaaattaaagtcaggttatggagaacatgtatgctatgttcttgattgcttcgctgaagaagcattgaaatatattggtttcacctggaaaaggccaatatacccagtagaagaattagaagaagaaagcgttgcagaagatgatgcagaattaacattaaataaagtggatgaagaatttgtggaagaagagacagataatgaagaaaactttattgatctcaacgttttaaaggcccagacatatcacttggatatgaacgagactgccaaacaagaagatattttggaatccacaacagatgctgcagaatggagcctagaagtggaacgtgtactaccgcaactgaaagtcacgattaggactgacaataaggtatcaaagtgggaacacattttcttaaaaaaaaa

SEQ ID NO: 440632 - DNA, 321 bp, Homo sapiens
ggtctcactctgtcgcccaggctggagtgaacctctgcctgccgggctcaagcgatcctcccacctcagcctcccgcatagctgggactacaggtgcacaccaccactcccagctaattttttattttttttgtcaagacagggtttcaccatgttgcccaggctggtctcaaactcctggtctcagacagtccacctgccttggcctcccaaagtgctgggattatagatgtgagccatcacacccagccaggtacaagtttttaatacaagttttctctctagctttgttactggattaaaaaaaggaaaaaaaatatg

SEQ ID NO: 440633 - DNA, 3165 bp, Homo sapiens
caagaagagggccacaggtgacgtcattcaggaaagccgccctgattggagggaaggaggcggagtctagtttccctggtgacggattgtccggtggtcgcctggtaaccggtcgtggctgtactggcggcggcagggctggcggcttaggccgcagaggtctgtgggcctgagcccacgctggactctgtccgttctgcgatgactgctgctctggccgtcgtcacgacgtcgggtttggaagatggggtgcctaggtcccgtggcgaagggaccggggaagtggtcttggagcgggggcccggcgcggcctaccacatgttcgtggtgatggaggacttggtggagaagctgaagctgctccgctacgaggaggagttcctccggaagagcaacctgaaggccccgtccagacactattttgcactgcctaccaaccctggcgaacagttctacatgttttgtactcttgctgcttggttgattaataaagcgggacgtccctttgagcagcctcaagaatatgatgaccctaatgcaacaatatctaacatactatccgagcttcggtcatttggaagaactgcagattttcctccttcaaaattaaagtcaggttatggagaacatgtatgctatgttcttgattgcttcgctgaagaagcattgaaatatattggtttcacctggaaaaggccaatatacccagtagaagaattagaagaagaaagcgttgcagaagatgatgcagaattaacattaaataaagtggatgaagaatttgtggaagaagagacagataatgaagaaaactttattgatctcaacgttttaaaggcccagacatatcacttggatatgaacgagactgccaaacaagaagatattttggaatccacaacagatgctgcagaatggagcctagaagtggaacgtgtactaccgcaactgaaagtcacgattaggactgacaataaggattggagaatccatgttgaccaaatgcaccagcacagaagtggaattgaatctgctctaaaggagaccaagggatttttggacaaactccataatgaaattactaggactttggaaaagatcagcagccgagaaaagtacatcaacaatcagcttgagaatttggttcaagaatatcgtgcagctcaagcccagctgagtgaggcaaaggagcgataccagcagggaaatggaggagtgacggaaagaaccagactcctctctgaggttatggaagaattagaaaaggtaaaacaagaaatggaagaaaagggcagcagcatgactgatggtgctcctttggtgaagattaaacagagcttaacaaaactgaagcaagaaactgtagagatggacattagaattggcattgtggaacacacactactccaatcaaagctgaaggagaagtccaacatgactaggaacatgcatgccacagttattccagaaccagcaacaggcttttattaaaacatactggttttcatgtttctgattagttgggttttttatatcaaactatatttcatgttgcatagatttcaaaacataattttatgttcaatgggtatttttttacatatacatactcacatattatatcatggtgattatgatggttaaagcctttacactgaatgtaatgtttaataaagaaattacaaattctcactttctaagaagctttcactaatcattacctatgttaaagctcccacctggtggctcatttttcatagcattccttgtgtaagccaaggtatatgacctgcgttttctgcagatgctgctgctgtcacaacatgaactgctgacacagtcctttaccttgctccacctctgcagtgatcataagtgctttgtgcccagaggccactgaagatggtaggcaggattctttccaagaacccaaactgcctttgcctcagctttatggttacctaaaattgccactttttttaggttaaaaaaaacttcagtatcctcattaacatttgaagttggtttcttatgaatatttcgtggctaaaatgattttatagggaatctatcttctaggatctaagccactaaataaaaggataaatgaatgatgataagtcagtcactcatgtttgactctgttcttagaatgaagagaaggtgcatatgcatgtctcaatttctacctttttctgtggtatcggctatactagggaaccattttgtagaagaaggaacgatgacaggtcgcatgaagatcagcctctagtactgatgatctttacttatgcatcttcctgagcaactttctaggctaggatttctaaattggtgaaaaaagcagcattagagtgccagaattagcactggggaaaactggccaggggaacacaaagcaggagacagcctgcgttaatttttttttttaataattttcaaaagcagtggtagaaaatttgataagaatgctttatgtttaggacaacaaaaataattttaaaaagttattttttaccctaatacttttctccactgaatattattatttttttcttagctttttctttctagatgtattccccaacatgctcacatacacagatctttccctttccttactagacctctctttagtttaagataagtttagacaggagaaagtgtatgtaaactacctgaaaggatgacaatcaatacaatgacaaatatgccagtttatttaatttgtttaaaaaaaaaaaggcagaaaacccaccatgggaaaataagcattttttaaaatctgaagttgctcttttcctgtgtggtctttgggaggagtctagtacaaaaactgaaaacctttggtcctgggaatttattttcatggctgttgtcatggctgagtagttttttgatgaattcaatcaatgcagagaacgcttttagataaatcagaactctccttaaaatgcatttcaatcagaagcaaagtacacccattatttatgcagacatgtaaaaaatctaaaaattcttgcaatgagtagtataagccacctatttttacttccttctctgaaatattccagttaactcagcttgggttctgtgctcctcctctcttcctatagaacactgtgcataccttgaataaagagcttattatactatattgttatt

SEQ ID NO: 440634 - DNA, 1518 bp, Homo sapiens
caagaagagggccacaggtgacgtcattcaggaaagccgccctgattggagggaaggaggcggagtctagtttccctggtgacggattgtccggtggtcgcctggtaaccggtcgtggctgtactggcggcggcagggctggcggcttaggccgcagaggtctgtgggcctgagcccacgctggactctgtccgttctgcgatgactgctgctctggccgtcgtcacgacgtcgggtttggaagatggggtgcctaggtcccgtggcgaagggaccggggaagtggtcttggagcgggggcccggcgcggcctaccacatgttcgtggtgatggaggacttggtggagaagctgaagctgctccgctacgaggaggagttcctccggaagagcaacctgaaggccccgtccagacactattttgcactgcctaccaaccctggcgaacagttctacatgttttgtactcttgctgcttggttgattaataaagcgggacgtccctttgagcagcctcaagaatatgatgaccctaatgcaacaatatctaacatactatccgagcttcggtcatttggaagaactgcagattttcctccttcaaaattaaagtcaggttatggagaacatgtatgctatgttcttgattgcttcgctgaagaagcattgaaatatattggtttcacctggaaaaggccaatatacccagtagaagaattagaagaagaaagcgttgcagaagatgatgcagaattaacattaaataaagtggatgaagaatttgtggaagaagagacagataatgaagaaaactttattgatctcaacgttttaaaggcccagacatatcacttggatatgaacgagactgccaaacaagaagatattttggaatccacaacagatgctgcagaatggagcctagaagtggaacgtgtactaccgcaactgaaagtcacgattaggactgacaataaggattggagaatccatgttgaccaaatgcaccagcacagaagtggaattgaatctgctctaaaggagaccaagggatttttggacaaactccataatgaaattactaggactttggaaaagatcagcagccgagaaaagtacatcaacaatcagcttgagaatttggttcaagaatatcgtgcagctcaagcccagctgagtgaggcaaaggagcgataccagcagggaaatggaggagtgacggaaagaaccagactcctctctgaggttatggaagaattagaaaaggtaaaacaagaaatggaagaaaagggcagcagcatgactgatggtgctcctttggtgaagattaaacagagcttaacaaaaggagcaccagcagcatgactgatggtgctcctttggtgaagattaaacagagcttaacaaaactgaagcatgttcctagtcatgttggacttctccttcagctttgattggagtagtgtgtgttccacaatgccaattctaatgcccatctctacagtttcttgcttcccg

SEQ ID NO: 440635 - DNA, 785 bp, Homo sapiens
atatctgcagaattcggcttactcactatagggccgagcggccgcccgggcggtcgtggctgtactggcggcggcagggctggcggcttaggccgcagaggtctgtgggcctgagcccacgctggactctgtccgttctgcgatgactgctgctctggccgtcgtcacgacgtcgggtttggaagatggggtgcctaggtcccgtggcgaagggaccggggaagtggtcttggagcgggggcccggcgcggcctaccacatgttcgtggtgatggaggacttggtggagaagctgaagctgctccgctacgaggaggagttcctccggaagagcaacctgaaggccccgtccagacactattttgcactgcctaccaaccctggcgaacagttctacatgttttgtactcttgctgcttggttgattaataaagcgggacgtccctttgagcagcctcaagaatatgatgaccctaatgcaacaatatctaacatactatccgagcttcggtcatttggaagaactgcagattttcctccttcaaaattaaagtcaggttatggagaacatgtatgctatgttcttgattgcttcgctgaagaagcattgaaatatattggtttcacctggaaaaggtaaaaattacccaccctgatgatagtaattttatgggcatagcatttgcctctgagggtacagagctgttcaattgaacataaaagaattattctttttgactattctaaattgaaaatgccacagataattaagaaaagccagtata

SEQ ID NO: 440636 - DNA, 2293 bp, Homo sapiens
  misc_feature (1052)..(1052): n is a, c, g, or t
tagcttccctagggtggcccaggagagagcgttccttgcacagaaacccgagtttattttctgcttgtttgtattcctggagcacggtcacggatggatctgcctggctcgccctcgcgccaggcctgctcctctcagccagcccagatgctgtcagtggacacaggccacgctgaccgacaggccagtggccgcatggacgtgtcagcctctgtggagcaggaggccctgagcaacgccttccgctcggtgccgctggctgaggaggaggatttcgacagcaaagagtgggtcatcatcgacaaggagacggagctcaaggacttccctccaggggctgagcccagcacatcgggcaccacggatgaggagcccgaggagctgcggccactgcccgaggagggcgaagagcggcggcggctgggggcagagcccaccgtccggccccggggacgcagcatgcaggcgctggcggaggaggacctgcagcatttgccgccccagcccctgccaccccagctgagccagggcgatggccgttccgagacgtcacagccccccacgcctggcagcccttcccactcacccctgcactcgggaccccgccctcgacggagagagtcggaccccacaggcccacagagacagttggaggaggacagactctcggggcactccctcccgcggtacagccccctgcgacgactggcgtcctccgtgttctcctcctccacgctggagacggagcattaccctcaccccggcggcggcggctcctcgggctcctccggttccctcattcagcgcagccgctcggctgagagcagccctgtgcgggcgccccaccggcgccacgcgcccctcgctgctggcaaccacagactcatgccctcggtgctccgcatctcgcggtcccagctgcagcaggtgtgggcccggttcacccacaagacctaggctgggccccccccctcctggagggggcaggtgggggggggtggggagcaggcagaggaccatggttccttcccaggacgcaataatcacacacncacacacacgtgcacattcctcccttacatgctcatttgtgccttaaatgtgccttataggtaaatccaggatgactgaggaatccctcgtcactgggagattttgtatatattcttttattattagattgagttgggtgtggggaaaaatttttttctgaaggctcaaaagtggtttcctaaaagtgagccactatcagatttgcacatcaggagaaaagaaatagggttacgtccattaggaaaatcccagtttgcaggagtgcaatcacatcaaaaaaacaaccagccaggattaaaggtattataaatcctcatagcggaacatttctcagggcaaaggaacctggctcatttgaagattaatgttccatgcctttgtggtcaaacggtcagcacttaacacaggaaaaaactaggtgttgttttgttttgttattttggacaacataaaattcaggaatgttttatttagccttggtttctagaaggaagggaaataatatttcttgagcatttactagggtgttgcgtgctgtgctaagtaaattttaagtctttcagttttatagatacggaaaacaagggtgactctttaccacaggatgaataaagaactaagtaatatgggaatgcagcaatttctggactagctgagccgattccttcctgtgagcacactgtaagctttcaagttctctgggcaggaattacagcacctgtcccctgcaatggccctgctgtgtgatgctcatcgcttcccttcgtgctggagcagtcccccaggtgtccatctcctatctttttgttccaatcttctgtgagttccagctagcaggctttacatctggggaaaggaaaaccaggggttttagctctgttctctgctcccatccttcgctcaccagctgagtgagaacatgaactttttgcaccatgtacccatggcttacactacttagaaaatcaccttttcagataaaacagtttatgagttcatagagaacaccagcactctttgacaaaactgtgagtgaccctttttaaacaatgctgagcaggccctgagctataatcaacggtgagctttaatgtctatgctgacagttaggttttgctctcttttgtaacaggttacgtagaccagcagtgtttaaatctaaatacgttgtgagtctgttatctgtcctatcgcgttttttaaatgactttttattctttatcatagctaagtaaatacc

SEQ ID NO: 440637 - DNA, 6830 bp, Homo sapiens
atcttgaatatttgtgctaggaaaaaaatctccaacttaaagagatgaaaactgaggcccagaaaggttagttgaaaggttcaaggccacccagcaggcctgctgccttaggcagccacaccagttacaccaaatcacattgccttgctggggagtcccaaaaatgtggagctgtacagacgtggctgagtcaccacttgctgtgtaatctcagagatgcttcctaagctctttgacctttagtttcctcatctctaaaatggggatgatcacacccacccctcagatgagaggctgtgacctgatgcacacatgtgaatactgacgtttccttgcgggcgagtgaatgtggggctgaaagcccttcaccagctgcagagctgtttcttggtgccccttgaggtggcccagctggggttggggcccccagagctcacagctgctgtctcccccagtcaaactttgccatgggcaggctgccctccacctacaggaagtgctatatgctggacttcgggctggcccggcagtacaccaacaccacgggggatgtgcggccccctcggaatgtggccgggtttcgaggaacggttcgctatgcctcagtcaatgcccacaagaaccgggagatgggccgccacgacgacctgtggtccctcttctacatgctggtggagtttgcagtgggccagctgccctggaggaagatcaaggacaaggaacaggtagggatgatcaaggagaagtatgagcaccggatgctgctgaagcacatgccgtcagagttccacctcttcctggaccacattgccagcctcgactacttcaccaagcccgactaccagttgatcatgtcagtgtttgagaacagcatgaaggagaggggcattgccgagaatgaggcctttgactgggagaaggcaggcaccgatgccctcctgtccacgagcacctctaccccgccccagcagaacacccggcagacggcagccatgtttggggtggtcaatgtgacgccagtgcctggggacctgctccgggagaacaccgaggatgtgctacagggagagcacctgagtgaccaggagaatgcacccccaattctgcccgggaggccctctgaggggctgggccccagtccccaccttgtcccccaccccgggggtcctgaggctgaagtctgggaggagacagatgtcaaccggaacaaactccggatcaacatcggcaaaagcccctgtgtggaggaggaacagagccgaggcatgggggtccccagctccccagtgcgtgcccccccagactcccccacaaccccagtccgttctctgcgctaccggagggtgaacagccctgagtcagaaaggctgtccacggcggacgggcgagtggagctacctgagaggaggtcacggatggatctgcctggctcgccctcgcgccaggcctgctcctctcagccagcccagatgctgtcagtggacacaggccacgctgaccgacaggccagtggccgcatggacgtgtcagcctctgtggagcaggaggccctgagcaacgccttccgctcggtgccgctggctgaggaggaggatttcgacagcaaagagtgggtcatcatcgacaaggagacggagctcaaggacttccctccaggggctgagcccagcacatcgggcaccacggatgaggagcccgaggagctgcggccactgcccgaggagggcgaagagcggcggcggctgggggcagagcccaccgtccggccccggggacgcagcatgcaggcgctggcggaggaggacctgcagcatttgccgccccagcccctgccaccccagctgagccagggcgatggccgttccgagacgtcacagccccccacgcctggcagcccttcccactcacccctgcactcgggaccccgccctcgacggagagagtcggaccccacaggcccacagagacaggtgttctccgtggcgcccccatttgaggtgaatggcctcccacgagctgtgcctctgagtctgccctaccaggacttcaaaagagacctctccgattaccgagaacgggcgcggttgctcaacagggtccggagggtgggcttctcgcacatgctgctcaccaccccccaggtcccactggctcctgttcagcctcaggctaatgggaaggaggaagaggaggaggaggaggaagatgaggaagaggaagaagaggatgaggaagaagaagaggaggaagaggaagaggaggaggaagaagaggaggaggaggaagaggaggaggaggctgcagcggcagttgccttgggggaggtgctggggcctcgtagtggctccagcagtgaggggagtgagaggagcactgaccggagccaggagggtgccccgtccacgctgctggcagacgatcagaaggagtccaggggccgggcctccatggccgatggggacctggagcctgaggagggctccaaaacgctggtgcttgtctctcctggcgacatgaagaagtcgcccgtcactgccgaactggcccccgaccccgacctgggcaccctggctgccctcactcctcagcatgagcggccccagcccacgggcagccagctggacgtatctgagccaggcaccctgtcctctgtcctcaagtctgagcccaagcccccggggcctggggcagggctgggggccgggacagtgaccacaggggtcgggggcgtggcagtcacctcctcacccttcaccaaagttgagaggacctttgtgcacattgcggagaaaacccacctcaacgtcatgtcttccggtggacaagccttgcggtctgaggagttcagcgctgggggcgagctgggtctggagctggcctctgatgggggcgctgtggaggagggggcccgagcgcccctggagaacggcctcgccctgtcagggctgaatggggctgagatagagggctctgccctgtctggggccccccgggaaaccccctcagagatggccacaaactcactgcccaatggcccggcccttgcagacgggccagccccggtgtccccgctggagccaagccctgagaaagtggccaccatctcccccagacgccatgctatgccaggctctcgccccaggagccgtatccctgtcctgctctctgaggaggacacgggctcggagccctcaggctcactgtcggccaaagagcggtggagcaagcgggctcggccgcagcaggacctggcgcggctggtgatggagaagaggcagggccgcctgctgttgcggctggcctcaggggcctcgtcctcctccagtgaggagcagcgccgtgcctctgagaccctctcaggcacgggctctgaggaggacacgcccgcctctgagccggcagcggccttgcccaggaagagcgggagggcagccgccaccaggagccggattccccgccccattggcctccgcatgcccatgcctgttgcagcccagcagcccgccagcagatcccatggcgcggccccagcattggacacagccatcaccagcaggctccagctgcagacgcccccagggtcggccactgctgctgacctccgccccaaacaacctcctggccgcggcctgggcccagggcgagcccaagccggagccaggcccccagcgccgcgcagcccgcgcctccccgcgtccacatccgccgcgcgcaatgccagcgcgtccccccggagccagtccctgtcccgcagagagagcccctccccctcgcaccaggcccggcccggggtccccccgccccggggcgtcccgccggcccgggcccagcctgatggcaccccctcccccgggggctccaagaaaggacccagagggaaactccaggctcagcgcgcaacaaccaaaggccgggcaggaggcgcggagggccgggctggggccagataatgacgcccgctgctctccgcggtcccccaccctcaccccggccccccacccgcagccggccacactggagcagctcccagcacagccttacgcgcccgacgcgcgccacccgcggccccagctttccgcctgcacccgcgaggacgcgcgcgagcacacgcggcgccccgccaggccttagggcccgtgggggacgcggccccgcgccgcggggagggtctgcctccccttcctcgccctgtgtcctctcatcctcccgccgcccgtcaggccggccagcctcacatcagtctctccgccccggggaaggctcagccacttttcatcgaggactccacttctggggacgcctggttcgttcgcccaccaggcctaggctacgctccatgctcccccagcaatctctgcctacacctcctgcggcgccttgccctcctccgacccctttccagccaaagtccccccaccccttcagagaagcagcctcaaattccagaagtggaggctccagcctccccgcgagggtccagccccacagtcttctgggagccattgtggccagggacggcctctggactgccaggctgggttggggacccagggaacatcggtctactcaggtgtgagggggcaggtctgacctgccccaaagttggctccatcctggacaactcggtgagaggcagtgggcaagtgatcttggagatgggtgggcaggtgattctgtgggcaggggatgtgctcccctgcacctctggggtgcagaaacctcttgcctccagatttgggtggagcctctgtgggaaccataggaagtgtgtgggctgccttcctgggcaagtatttcccagtgggaagttggagggggctttaacaaagttttactccctcccctgttcccctgatctagtgctcaggacccttcaccatcaggaattccttcctgtcatctaacctcagtcctgcctactgcagttccagccaacctgctctttcctgagttcaaagcaggtggagactggctggttaccatctttgcactggcccttcggagattcggggactcagttctggtggggtcaccctccctgtcctcccgcctgtgggagggagggagggctggctcaggcatcgtctcccgcaatgggcagagagagcagagacaggtggaccaacagacagctggcccctggaggcagaaaggcccttctaacttccagattgtatgcttgagtgatgggtccccagcccaagcccactcttccctcagctcacccttcagcctgttccttcttgccctgaccccagcccgtgcagctgctctactccaggaatggatgtggggactcttcctgggttctggctcctgcatagctcaccccacctcatcatgagcctcaactgcctacatctggggcaagcagcacaccggctgcagatgggacagccagccctgcctatctggacaggcccctgcagcctctgtcccctggcctagcctctctgtccttccctgagtcacagagagcaagccaagacatccagggaaagaggaagaaaggccttagtgtgccccagcagtctggctgcgtccagccaccatcacccggaaggatgcccacaaggcagctgaccctgaaagcagcctccccctcatggagagtcagcagcttgggcagccacttccaggccagggtggtggcttctctgcagaccagctgaggggaggactcctgggtggacagcctttgacgtccaccccacgctgatgcagaagctcccagaacactcaggaaacttctccggacagagccctccttgtcaacttgaggccctcccaaggccctctactgccctctgggtccagcagagggagtggaggaagggccactgcctcccacctagagcttctccgaatgacaatcagctcgtgccaggtggggaccaggatatgactcctggtgcccaggccctgggcctgctccttgccaccaaccgaaccgtgaatgtagggcccccagcctcacctctgccccaggaccaacaacaccctggtttggagctgggaggaagaagggggcctgagagagccccaggtccattctacccccagcttcactcagcactggagctggcagagacgcaaaacccagtctgcccttgggattccaaacctccctagggctcccaactgacctcaggcctctgagtcactgaatgtcaccaggagaggtgggggagggaaagtgggccagtggggagggggtcacctaggggactgcctctgtgcctctccccaggaagcatccagggcagaggaagccacatctcccggtgcccccaaccccagctgcagcctcctccccctgagcattcattctctccaccaggcctccaggtcctgagcccttcctctgtaaaagtgtcacaccacctccctcagcacttccccatcacaacaacctatgtcactgactcagatgcagggtctgctcaccccaacacatgccttccctccccagccacaccgtgcacgaagggggcacaggagaggagaggggctgtgccccaggctccccatttcccagctcctcacagaggcctggtttgctcagtcttctgaactccagggaccagccctggtgggcatggggtggggagcagggagttgcccttcccctccctcgggaagccacctaagaatgtttacatgccaaacagaatgtaacacccctccccaagcccttcccagtcactgcatggcctctgcccatcctgcacctgtccaccccaccccaacaccctggaagccactgtcaatgattagatcgggtctcggaagggaagtagccatcacaccattaaaaagcctgtggacct

SEQ ID NO: 440638 - DNA, 6884 bp, Homo sapiens
atcttgaatatttgtgctaggaaaaaaatctccaacttaaagagatgaaaactgaggcccagaaaggttagttgaaaggttcaaggccacccagcaggcctgctgccttaggcagccacaccagttacaccaaatcacattgccttgctggggagtcccaaaaatgtggagctgtacagacgtggctgagtcaccacttgctgtgtaatctcagagatgcttcctaagctctttgacctttagtttcctcatctctaaaatggggatgatcacacccacccctcagatgagaggctgtgacctgatgcacacatgtgaatactgacgtttccttgcgggcgagtgaatgtggggctgaaagcccttcaccagctgcagagctgtttcttggtgccccttgaggtggcccagctggggttggggcccccagagctcacagctgctgtctcccccagtcaaactttgccatgggcaggctgccctccacctacaggaagtgctatatgctggacttcgggctggcccggcagtacaccaacaccacgggggatgtgcggccccctcggaatgtggccgggtttcgaggaacggttcgctatgcctcagtcaatgcccacaagaaccgggagatgggccgccacgacgacctgtggtccctcttctacatgctggtggagtttgcagtgggccagctgccctggaggaagatcaaggacaaggaacaggtagggatgatcaaggagaagtatgagcaccggatgctgctgaagcacatgccgtcagagttccacctcttcctggaccacattgccagcctcgactacttcaccaagcccgactaccagttgatcatgtcagtgtttgagaacagcatgaaggagaggggcattgccgagaatgaggcctttgactgggagaaggcaggcaccgatgccctcctgtccacgagcacctctaccccgccccagcagaacacccggcagacggcagccatgtttggggtggtcaatgtgacgccagtgcctggggacctgctccgggagaacaccgaggatgtgctacagggagagcacctgagtgaccaggagaatgcacccccaattctgcccgggaggccctctgaggggctgggccccagtccccaccttgtcccccaccccgggggtcctgaggctgaagtctgggaggagacagatgtcaaccggaacaaactccggatcaacatcggcaaaagcccctgtgtggaggaggaacagagccgaggcatgggggtccccagctccccagtgcgtgcccccccagactcccccacaaccccagtccgttctctgcgctaccggagggtgaacagccctgagtcagaaaggctgtccacggcggacgggcgagtggagctacctgagaggaggtcacggatggatctgcctggctcgccctcgcgccaggcctgctcctctcagccagcccagatgctgtcagtggacacaggccacgctgaccgacaggccagtggccgcatggacgtgtcagcctctgtggagcaggaggccctgagcaacgccttccgctcggtgccgctggctgaggaggaggatttcgacagcaaagagtgggtcatcatcgacaaggagacggagctcaaggacttccctccaggggctgagcccagcacatcgggcaccacggatgaggagcccgaggagctgcggccactgcccgaggagggcgaagagcggcggcggctgggggcagagcccaccgtccggccccggggacgcagcatgcaggcgctggcggaggaggacctgcagcatttgccgccccagcccctgccaccccagctgagccagggcgatggccgttccgagacgtcacagccccccacgcctggcagcccttcccactcacccctgcactcgggaccccgccctcgacggagagagtcggaccccacaggcccacagagacaggtgttctccgtggcgcccccatttgaggtgaatggcctcccacgagctgtgcctctgagtctgccctaccaggacttcaaaagagacctctccgattaccgagaacgggcgcggttgctcaacagggtccggagggtgggcttctcgcacatgctgctcaccaccccccaggtcccactggctcctgttcagcctcaggctaatgggaaggaggaagaggaggaggaggaggaagatgaggaagaggaagaagaggatgaggaagaagaagaggaggaagaggaagaggaggaggaagaagaggaggaggaggaagaggaggaggaggctgcagcggcagttgccttgggggaggtgctggggcctcgtagtggctccagcagtgaggggagtgagaggagcactgaccggagccaggagggtgccccgtccacgctgctggcagacgatcagaaggagtccaggggccgggcctccatggccgatggggacctggagcctgaggagggctccaaaacgctggtgcttgtctctcctggcgacatgaagaagtcgcccgtcactgccgaactggcccccgaccccgacctgggcaccctggctgccctcactcctcagcatgagcggccccagcccacgggcagccagctggacgtatctgagccaggcaccctgtcctctgtcctcaagtctgagcccaagcccccggggcctggggcagggctgggggccgggacagtgaccacaggggtcgggggcgtggcagtcacctcctcacccttcaccaaagttgagaggacctttgtgcacattgcggagaaaacccacctcaacgtcatgtcttccggtggacaagccttgcggtctgaggagttcagcgctgggggcgagctgggtctggagctggcctctgatgggggcgctgtggaggagggggcccgagcgcccctggagaacggcctcgccctgtcagggctgaatggggctgagatagagggctctgccctgtctggggccccccgggaaaccccctcagagatggccacaaactcactgcccaatggcccggcccttgcagacgggccagccccggtgtccccgctggagccaagccctgagaaagtggccaccatctcccccagacgccatgctatgccaggctctcgccccaggagccgtatccctgtcctgctctctgaggaggacacgggctcggagccctcaggctcactgtcggccaaagagcggtggagcaagcgggctcggccgcagcaggacctggcgcggctggtgatggagaagaggcagggccgcctgctgttgcggctggcctcaggggcctcgtcctcctccagtgaggagcagcgccgtgcctctgagaccctctcaggcacgggctctgaggaggacacgcccgcctctgagccggcagcggccttgcccaggaagagcgggagggcagccgccaccaggagccggattccccgccccattggcctccgcatgcccatgcctgttgcagcccagcagcccgccagcagatcccatggcgcggccccagcattggacacagccatcaccagcaggctccagctgcagacgcccccagggtcggccactgctgctgacctccgccccaaacaacctcctggccgcggcctgggcccagggcgagcccaagccggagccaggcccccagcgccgcgcagcccgcgcctccccgcgtccacatccgccgcgcgcaatgccagcgcgtccccccggagccagtccctgtcccgcagagagagcccctccccctcgcaccaggcccggcccggggtccccccgccccggggcgtcccgccggcccgggcccagcctgatggcaccccctcccccgggggctccaagaaaggacccagagggaaactccaggctcagcgcgcaacaaccaaaggccgggcaggaggcgcggagggccgggctggggccagataatgacgcccgctgctctccgcggtcccccaccctcaccccggccccccacccgcagccggccacactggagcagctcccagcacagccttacgcgcccgacgcgcgccacccgcggccccagctttccgcctgcacccgcgaggacgcgcgcgagcacacgcggcgccccgccaggccttagggcccgtgggggacgcggccccgcgccgcggggagggtctgcctccccttcctcgccctgtgtcctctcatcctcccgccgcccgtcaggccggccagcctcacatcagtctctccgccccggggaaggctcagccacttttcatcgaggactccacttctggggacgcctggttcgttcgcccaccaggcctaggctacgctccatgctcccccagcaatctctgcctacacctcctgcggcgccttgccctcctccgacccctttccagccaaagtccccccaccccttcagagaagcagcctcaaattccagaagtggaggctccagcctccccgcgagggtccagccccacagtcttctgggagccattgtggccagggacggcctctggactgccaggctgggttggggacccagggaacatcggtctactcaggtgtgagggggcaggtctgacctgccccaaagttggctccatcctggacaactcggtgagaggcagtgggcaagtgatcttggagatgggtgggcaggtgattctgtgggcaggggatgtgctcccctgcacctctggggtgcagaaacctcttgcctccagatttgggtggagcctctgtgggaaccataggaagtgtgtgggctgccttcctgggcaagtatttcccagtgggaagttggagggggctttaacaaagttttactccctcccctgttcccctgatctagtgctcaggacccttcaccatcaggaattccttcctgtcatctaacctcagtcctgcctactgcagttccagccaacctgctctttcctgagttcaaagcaggtggagactggctggttaccatctttgcactggcccttcggagattcggggactcagttctggtggggtcaccctccctgtcctcccgcctgtgggagggagggagggctggctcaggcatcgtctcccgcaatgggcagagagagcagagacaggtggaccaacagacagctggcccctggaggcagaaaggcccttctaacttccagattgtatgcttgagtgatgggtccccagcccaagcccactcttccctcagctcacccttcagcctgttccttcttgccctgaccccagcccgtgcagctgctctactccaggaatggatgtggggactcttcctgggttctggctcctgcatagctcaccccacctcatcatgagcctcaactgcctacatctggggcaagcagcacaccggctgcagatgggacagccagccctgcctatctggacaggcccctgcagcctctgtcccctggcctagcctctctgtccttccctgagtcacagagagcaagccaagacatccagggaaagaggaagaaaggccttagtgtgccccagcagtctggctgcgtccagccaccatcacccggaaggatgcccacaaggcagctgaccctgaaagcagcctccccctcatggagagtcagcagcttgggcagccacttccaggccagggtggtggcttctctgcagaccagctgaggggaggactcctgggtggacagcctttgacgtccaccccacgctgatgcagaagctcccagaacactcaggaaacttctccggacagagccctccttgtcaacttgaggccctcccaaggccctctactgccctctgggtccagcagagggagtggaggaagggccactgcctcccacctagagcttctccgaatgacaatcagctcgtgccaggtggggaccaggatatgactcctggtgcccaggccctgggcctgctccttgccaccaaccgaaccgtgaatgtagggcccccagcctcacctctgccccaggaccaacaacaccctggtttggagctgggaggaagaagggggcctgagagagccccaggtccattctacccccagcttcactcagcactggagctggcagagacgcaaaacccagtctgcccttgggattccaaacctccctagggctcccaactgacctcaggcctctgagtcactgaatgtcaccaggagaggtgggggagggaaagtgggccagtggggagggggtcacctaggggactgcctctgtgcctctccccaggaagcatccagggcagaggaagccacatctcccggtgcccccaaccccagctgcagcctcctccccctgagcattcattctctccaccaggcctccaggtcctgagcccttcctctgtaaaagtgtcacaccacctccctcagcacttccccatcacaacaacctatgtcactgactcagatgcagggtctgctcaccccaacacatgccttccctccccagccacaccgtgcacgaagggggcacaggagaggagaggggctgtgccccaggctccccatttcccagctcctcacagaggcctggtttgctcagtcttctgaactccagggaccagccctggtgggcatggggtggggagcagggagttgcccttcccctccctcgggaagccacctaagaatgtttacatgccaaacagaatgtaacacccctccccaagcccttcccagtcactgcatggcctctgcccatcctgcacctgtccaccccaccccaacaccctggaagccactgtcaatgattagatcgggtctcggaagggaagtagccatcacaccattaaaaagcctgtggacctactaaaacaaaaacaaaaaacaaaaacacaaaacaaaagaaaaacaaaagagag

SEQ ID NO: 440639 - DNA, 347 bp, Homo sapiens
  misc_feature (15)..(15): n is a, c, g, or t
  misc_feature (28)..(28): n is a, c, g, or t
  misc_feature (123)..(123): n is a, c, g, or t
  misc_feature (132)..(132): n is a, c, g, or t
  misc_feature (181)..(181): n is a, c, g, or t
  misc_feature (189)..(189): n is a, c, g, or t
gcctgtgagcaaganccagggttgtccnagtcccagcctctggggcagagcttgtagccctggatggcctctggggcaggaccactagctaagcaagcccaggagaagacccctgccctgagngccataagnaccacacctgtcctgaattgctgtgaatgacaccagctaacgacaatgncttgtctngcactcctagacccaataaaaagccacctggaagccactgtcaatgattagatcgggtctcggaagggaagtagccatcacaccattaaaaagcctgtggacctactaaaacaaaaacaaaaaacaaaaacacaaaacaaaagaaaaacaaaagagag

SEQ ID NO: 440640 - DNA, 284 bp, Homo sapiens
ccagcagcaggctcttccagcagcagcctggaagcgtgtggcccctcgaggtcctgccctggaggacagagagccaggcctcagtttacccatctgtgccatggtctcagtctcagctctgaggatgccggactccagtgctcagtgcccaggaggattctgaaatatttctccttgttttgtttctttgccctcttcttttctcctgccttctgctctcaagcaggctccagctgcagacgcccccagggtcggccactgctgctgacctccgccccaaacaa

SEQ ID NO: 440641 - DNA, 6803 bp, Homo sapiens
gtgggggaggggagcaggccgacatcctgccggccaactacgtggtcaaggatcgctggaaggtgctgaaaaagatcgggggcgggggctttggtgagatctacgaggccatggacctgctgaccagggagaatgtggccctcaaggtggagtcagcccagcagcccaagcaggtcctcaagatggaggtggccgtgctcaagaagttgcaagggaaggaccatgtgtgcaggttcattggctgtggcaggaacgagaagtttaactatgtagtgatgcagctccagggccggaacctggccgacctgcgccgtagccagccgcgaggcaccttcacgctgagcaccacattgcggctgggcaagcagatcttggagtccatcgaggccatccactctgtgggcttcctgcaccgtgacatcaagccttcaaactttgccatgggcaggctgccctccacctacaggaagtgctatatgctggacttcgggctggcccggcagtacaccaacaccacgggggatgtgcggccccctcggaatgtggccgggtttcgaggaacggttcgctatgcctcagtcaatgcccacaagaaccgggagatgggccgccacgacgacctgtggtccctcttctacatgctggtggagtttgcagtgggccagctgccctggaggaagatcaaggacaaggaacaggtagggatgatcaaggagaagtatgagcaccggatgctgctgaagcacatgccgtcagagttccacctcttcctggaccacattgccagcctcgactacttcaccaagcccgactaccagttgatcatgtcagtgtttgagaacagcatgaaggagaggggcattgccgagaatgaggcctttgactgggagaaggcaggcaccgatgccctcctgtccacgagcacctctaccccgccccagcagaacacccggcagacggcagccatgtttggggtggtcaatgtgacgccagtgcctggggacctgctccgggagaacaccgaggatgtgctacagggagagcacctgagtgaccaggagaatgcacccccaattctgcccgggaggccctctgaggggctgggccccagtccccaccttgtcccccaccccgggggtcctgaggctgaagtctgggaggagacagatgtcaaccggaacaaactccggatcaacatcggcaaaagcccctgtgtggaggaggaacagagccgaggcatgggggtccccagctccccagtgcgtgcccccccagactcccccacaaccccagtccgttctctgcgctaccggagggtgaacagccctgagtcagaaaggctgtccacggcggacgggcgagtggagctacctgagaggaggtcacggatggatctgcctggctcgccctcgcgccaggcctgctcctctcagccagcccagatgctgtcagtggacacaggccacgctgaccgacaggccagtggccgcatggacgtgtcagcctctgtggagcaggaggccctgagcaacgccttccgctcggtgccgctggctgaggaggaggatttcgacagcaaagagtgggtcatcatcgacaaggagacggagctcaaggacttccctccaggggctgagcccagcacatcgggcaccacggatgaggagcccgaggagctgcggccactgcccgaggagggcgaagagcggcggcggctgggggcagagcccaccgtccggccccggggacgcagcatgcaggcgctggcggaggaggacctgcagcatttgccgccccagcccctgccaccccagctgagccagggcgatggccgttccgagacgtcacagccccccacgcctggcagcccttcccactcacccctgcactcgggaccccgccctcgacggagagagtcggaccccacaggcccacagagacaggtgttctccgtggcgcccccatttgaggtgaatggcctcccacgagctgtgcctctgagtctgccctaccaggacttcaaaagagacctctccgattaccgagaacgggcgcggttgctcaacagggtccggagggtgggcttctcgcacatgctgctcaccaccccccaggtcccactggctcctgttcagcctcaggctaatgggaaggaggaagaggaggaggaggaggaagatgaggaagaggaagaagaggatgaggaagaagaagaggaggaagaggaagaggaggaggaagaagaggaggaggaggaagaggaggaggaggctgcagcggcagttgccttgggggaggtgctggggcctcgtagtggctccagcagtgaggggagtgagaggagcactgaccggagccaggagggtgccccgtccacgctgctggcagacgatcagaaggagtccaggggccgggcctccatggccgatggggacctggagcctgaggagggctccaaaacgctggtgcttgtctctcctggcgacatgaagaagtcgcccgtcactgccgaactggcccccgaccccgacctgggcaccctggctgccctcactcctcagcatgagcggccccagcccacgggcagccagctggacgtatctgagccaggcaccctgtcctctgtcctcaagtctgagcccaagcccccggggcctggggcagggctgggggccgggacagtgaccacaggggtcgggggcgtggcagtcacctcctcacccttcaccaaagttgagaggacctttgtgcacattgcggagaaaacccacctcaacgtcatgtcttccggtggacaagccttgcggtctgaggagttcagcgctgggggcgagctgggtctggagctggcctctgatgggggcgctgtggaggagggggcccgagcgcccctggagaacggcctcgccctgtcagggctgaatggggctgagatagagggctctgccctgtctggggccccccgggaaaccccctcagagatggccacaaactcactgcccaatggcccggcccttgcagacgggccagccccggtgtccccgctggagccaagccctgagaaagtggccaccatctcccccagacgccatgctatgccaggctctcgccccaggagccgtatccctgtcctgctctctgaggaggacacgggctcggagccctcaggctcactgtcggccaaagagcggtggagcaagcgggctcggccgcagcaggacctggcgcggctggtgatggagaagaggcagggccgcctgctgttgcggctggcctcaggggcctcgtcctcctccagtgaggagcagcgccgtgcctctgagaccctctcaggcacgggctctgaggaggacacgcccgcctctgagccggcagcggccttgcccaggaagagcgggagggcagccgccaccaggagccggattccccgccccattggcctccgcatgcccatgcctgttgcagcccagcagcccgccagcagatcccatggcgcggccccagcattggacacagccatcaccagcaggctccagctgcagacgcccccagggtcggccactgctgctgacctccgccccaaacaacctcctggccgcggcctgggcccagggcgagcccaagccggagccaggcccccagcgccgcgcagcccgcgcctccccgcgtccacatccgccgcgcgcaatgccagcgcgtccccccggagccagtccctgtcccgcagagagagcccctccccctcgcaccaggcccggcccggggtccccccgccccggggcgtcccgccggcccgggcccagcctgatggcaccccctcccccgggggctccaagaaaggacccagagggaaactccaggctcagcgcgcaacaaccaaaggccgggcaggaggcgcggagggccgggctggggccagataatgacgcccgctgctctccgcggtcccccaccctcaccccggccccccacccgcagccggccacactggagcagctcccagcacagccttacgcgcccgacgcgcgccacccgcggccccagctttccgcctgcacccgcgaggacgcgcgcgagcacacgcggcgccccgccaggccttagggcccgtgggggacgcggccccgcgccgcggggagggtctgcctccccttcctcgccctgtgtcctctcatcctcccgccgcccgtcaggccggccagcctcacatcagtctctccgccccggggaaggctcagccacttttcatcgaggactccacttctggggacgcctggttcgttcgcccaccaggcctaggctacgctccatgctcccccagcaatctctgcctacacctcctgcggcgccttgccctcctccgacccctttccagccaaagtccccccaccccttcagagaagcagcctcaaattccagaagtggaggctccagcctccccgcgagggtccagccccacagtcttctgggagccattgtggccagggacggcctctggactgccaggctgggttggggacccagggaacatcggtctactcaggtgtgagggggcaggtctgacctgccccaaagttggctccatcctggacaactcggtgagaggcagtgggcaagtgatcttggagatgggtgggcaggtgattctgtgggcaggggatgtgctcccctgcacctctggggtgcagaaacctcttgcctccagatttgggtggagcctctgtgggaaccataggaagtgtgtgggctgccttcctgggcaagtatttcccagtgggaagttggagggggctttaacaaagttttactccctcccctgttcccctgatctagtgctcaggacccttcaccatcaggaattccttcctgtcatctaacctcagtcctgcctactgcagttccagccaacctgctctttcctgagttcaaagcaggtggagactggctggttaccatctttgcactggcccttcggagattcggggactcagttctggtggggtcaccctccctgtcctcccgcctgtgggagggagggagggctggctcaggcatcgtctcccgcaatgggcagagagagcagagacaggtggaccaacagacagctggcccctggaggcagaaaggcccttctaacttccagattgtatgcttgagtgatgggtccccagcccaagcccactcttccctcagctcacccttcagcctgttccttcttgccctgaccccagcccgtgcagctgctctactccaggaatggatgtggggactcttcctgggttctggctcctgcatagctcaccccacctcatcatgagcctcaactgcctacatctggggcaagcagcacaccggctgcagatgggacagccagccctgcctatctggacaggcccctgcagcctctgtcccctggcctagcctctctgtccttccctgagtcacagagagcaagccaagacatccagggaaagaggaagaaaggccttagtgtgccccagcagtctggctgcgtccagccaccatcacccggaaggatgcccacaaggcagctgaccctgaaagcagcctccccctcatggagagtcagcagcttgggcagccacttccaggccagggtggtggcttctctgcagaccagctgaggggaggactcctgggtggacagcctttgacgtccaccccacgctgatgcagaagctcccagaacactcaggaaacttctccggacagagccctccttgtcaacttgaggccctcccaaggccctctactgccctctgggtccagcagagggagtggaggaagggccactgcctcccacctagagcttctccgaatgacaatcagctcgtgccaggtggggaccaggatatgactcctggtgcccaggccctgggcctgctccttgccaccaaccgaaccgtgaatgtagggcccccagcctcacctctgccccaggaccaacaacaccctggtttggagctgggaggaagaagggggcctgagagagccccaggtccattctacccccagcttcactcagcactggagctggcagagacgcaaaacccagtctgcccttgggattccaaacctccctagggctcccaactgacctcaggcctctgagtcactgaatgtcaccaggagaggtgggggagggaaagtgggccagtggggagggggtcacctaggggactgcctctgtgcctctccccaggaagcatccagggcagaggaagccacatctcccggtgcccccaaccccagctgcagcctcctccccctgagcattcattctctccaccaggcctccaggtcctgagcccttcctctgtaaaagtgtcacaccacctccctcagcacttccccatcacaacaacctatgtcactgactcagatgcagggtctgctcaccccaacacatgccttccctccccagccacaccgtgcacgaagggggcacaggagaggagaggggctgtgccccaggctccccatttcccagctcctcacagaggcctggtttgctcagtcttctgaactccagggaccagccctggtgggcatggggtggggagcagggagttgcccttcccctccctcgggaagccacctaagaatgtttacatgccaaacagaatgtaacacccctccccaagcccttcccagtcactgcatggcctctgcccatcctgcacctgtccaccccaccccaacaccctggaagccactgtcaatgattagatcgggtctcggaagggaagtagccatcacaccattaaaaagcctgtggacct

SEQ ID NO: 440642 - DNA, 4245 bp, Homo sapiens
ctctgacgatccctttcgcttagcccgacagcctcacaagtagctggtgtactacaggtgcccgccaccgcacctggctactttttgtatttttagtagagatggtgtttcaccatgttagccaggatggtctcgatctcccgacctcgtgatccacccgcctcagcctcacaaattgagaggacctttgtgcacattgcggagaaaacccacctcaacgtcatgtcttccggtggacaagccttgcggtctgaggagttcagcgctgggggcgagctgggtctggagctggcctctgatgggggcgctgtggaggagggggcccgagcgcccctggagaacggcctcgccctgtcagggctgaatggggctgagatagagggctctgccctgtctggggccccccgggaaaccccctcagagatggccacaaactcactgcccaatggcccggcccttgcagacgggccagccccggtgtccccgctggagccaagccctgagaaagtggccaccatctcccccagacgccatgctatgccaggctctcgccccaggagccgtatccctgtcctgctctctgaggaggacacgggctcggagccctcaggctcactgtcggccaaagagcggtggagcaagcgggctcggccgcagcaggacctggcgcggctggtgatggagaagaggcagggccgcctgctgttgcggctggcctcaggggcctcgtcctcctccagtgaggagcagcgccgtgcctctgagaccctctcaggcacgggctctgaggaggacacgcccgcctctgagccggcagcggccttgcccaggaagagcgggagggcagccgccaccaggagccggattccccgccccattggcctccgcatgcccatgcctgttgcagcccagcagcccgccagcagatcccatggcgcggccccagcattggacacagccatcaccagcaggctccagctgcagacgcccccagggtcggccactgctgctgacctccgccccaaacaacctcctggccgcggcctgggcccagggcgagcccaagccggagccaggcccccagcgccgcgcagcccgcgcctccccgcgtccacatccgccgcgcgcaatgccagcgcgtccccccggagccagtccctgtcccgcagagagagcccctccccctcgcaccaggcccggcccggggtccccccgccccggggcgtcccgccggcccgggcccagcctgatggcaccccctcccccgggggctccaagaaaggacccagagggaaactccaggctcagcgcgcaacaaccaaaggccgggcaggaggcgcggagggccgggctggggccagataatgacgcccgctgctctccgcggtcccccaccctcaccccggccccccacccgcagccggccacactggagcagctcccagcacagccttacgcgcccgacgcgcgccacccgcggccccagctttccgcctgcacccgcgaggacgcgcgcgagcacacgcggcgccccgccaggccttagggcccgtgggggacgcggccccgcgccgcggggagggtctgcctccccttcctcgccctgtgtcctctcatcctcccgccgcccgtcaggccggccagcctcacatcagtctctccgccccggggaaggctcagccacttttcatcgaggactccacttctggggacgcctggttcgttcgcccaccaggcctaggctacgctccatgctcccccagcaatctctgcctacacctcctgcggcgccttgccctcctccgacccctttccagccaaagtccccccaccccttcagagaagcagcctcaaattccagaagtggaggctccagcctccccgcgagggtccagccccacagtcttctgggagccattgtggccagggacggcctctggactgccaggctgggttggggacccagggaacatcggtctactcaggtgtgagggggcaggtctgacctgccccaaagttggctccatcctggacaactcggtgagaggcagtgggcaagtgatcttggagatgggtgggcaggtgattctgtgggcaggggatgtgctcccctgcacctctggggtgcagaaacctcttgcctccagatttgggtggagcctctgtgggaaccataggaagtgtgtgggctgccttcctgggcaagtatttcccagtgggaagttggagggggctttaacaaagttttactccctcccctgttcccctgatctagtgctcaggacccttcaccatcaggaattccttcctgtcatctaacctcagtcctgcctactgcagttccagccaacctgctctttcctgagttcaaagcaggtggagactggctggttaccatctttgcactggcccttcggagattcggggactcagttctggtggggtcaccctccctgtcctcccgcctgtgggagggagggagggctggctcaggcatcgtctcccgcaatgggcagagagagcagagacaggtggaccaacagacagctggcccctggaggcagaaaggcccttctaacttccagattgtatgcttgagtgatgggtccccagcccaagcccactcttccctcagctcacccttcagcctgttccttcttgccctgaccccagcccgtgcagctgctctactccaggaatggatgtggggactcttcctgggttctggctcctgcatagctcaccccacctcatcatgagcctcaactgcctacatctggggcaagcagcacaccggctgcagatgggacagccagccctgcctatctggacaggcccctgcagcctctgtcccctggcctagcctctctgtccttccctgagtcacagagagcaagccaagacatccagggaaagaggaagaaaggccttagtgtgccccagcagtctggctgcgtccagccaccatcacccggaaggatgcccacaaggcagctgaccctgaaagcagcctccccctcatggagagtcagcagcttgggcagccacttccaggccagggtggtggcttctctgcagaccagctgaggggaggactcctgggtggacagcctttgacgtccaccccacgctgatgcagaagctcccagaacactcaggaaacttctccggacagagccctccttgtcaacttgaggccctcccaaggccctctactgccctctgggtccagcagagggagtggaggaagggccactgcctcccacctagagcttctccgaatgacaatcagctcgtgccaggtggggaccaggatatgactcctggtgcccaggccctgggcctgctccttgccaccaaccgaaccgtgaatgtagggcccccagcctcacctctgccccaggaccaacaacaccctggtttggagctgggaggaagaagggggcctgagagagccccaggtccattctacccccagcttcactcagcactggagctggcagagacgcaaaacccagtctgcccttgggattccaaacctccctagggctcccaactgacctcaggcctctgagtcactgaatgtcaccaggagaggtgggggagggaaagtgggccagtggggagggggtcacctaggggactgcctctgtgcctctccccaggaagcatccagggcagaggaagccacatctcccggtgcccccaaccccagctgcagcctcctccccctgagcattcattctctccaccaggcctccaggtcctgagcccttcctctgtaaaagtgtcacaccacctccctcagcacttccccatcacaacaacctatgtcactgactcagatgcagggtctgctcaccccaacacatgccttccctccccagccacaccgtgcacgaagggggcacaggagaggagaggggctgtgccccaggctccccatttcccagctcctcacagaggcctggtttgctcagtcttctgaactccagggaccagccctggtgggcatggggtggggagcagggagttgcccttcccctccctcgggaagccacctaagaatgtttacatgccaaacagaatgtaacacccctccccaagcccttcccagtcactgcatggcctctgcccatcctgcacctgtccaccccaccccaacaccctggaagccactgtcaatgattagatcgggtctcggaagggaagtagccatcacaccattaaaaagcctgtggacct

SEQ ID NO: 440643 - DNA, 2080 bp, Homo sapiens
atcttgaatatttgtgctaggaaaaaaatctccaacttaaagagatgaaaactgaggcccagaaaggttagttgaaaggttcaaggccacccagcaggcctgctgccttaggcagccacaccagttacaccaaatcacattgccttgctggggagtcccaaaaatgtggagctgtacagacgtggctgagtcaccacttgctgtgtaatctcagagatgcttcctaagctctttgacctttagtttcctcatctctaaaatggggatgatcacacccacccctcagatgagaggctgtgacctgatgcacacatgtgaatactgacgtttccttgcgggcgagtgaatgtggggctgaaagcccttcaccagctgcagagctgtttcttggtgccccttgaggtggcccagctggggttggggcccccagagctcacagctgctgtctcccccagtcaaactttgccatgggcaggctgccctccacctacaggaagtgctatatgctggacttcgggctggcccggcagtacaccaacaccacgggggatgtgcggccccctcggaatgtggccgggtttcgaggaacggttcgctatgcctcagtcaatgcccacaagaaccgggagatgggccgccacgacgacctgtggtccctcttctacatgctggtggagtttgcagtgggccagctgccctggaggaagatcaaggacaaggaacaggtagggatgatcaaggagaagtatgagcaccggatgctgctgaagcacatgccgtcagagttccacctcttcctggaccacattgccagcctcgactacttcaccaagcccgactaccagttgatcatgtcagtgtttgagaacagcatgaaggagaggggcattgccgagaatgaggcctttgactgggagaaggcaggcaccgatgccctcctgtccacgagcacctctaccccgccccagcagaacacccggcagacggcagccatgtttggggtggtcaatgtgacgccagtgcctggggacctgctccgggagaacaccgaggatgtgctacagggagagcacctgagtgaccaggagaatgcacccccaattctgcccgggaggccctctgaggggctgggccccagtccccaccttgtcccccaccccgggggtcctgaggctgaagtctgggaggagacagatgtcaaccggaacaaactccggatcaacatcggcaaaagcccctgtgtggaggaggaacagagccgaggcatgggggtccccagctccccagtgcgtgcccccccagactcccccacaaccccagtccgttctctgcgctaccggagggtgaacagccctgagtcagaaaggctgtccacggcggacgggcgagtggagctacctgagaggaggtcacggatggatctgcctggctcgccctcgcgccaggcctgctcctctcagccagcccagatgctgtcagtggacacaggccacgctgaccgacaggccagtggccgcatggacgtgtcagcctctgtggagcaggaggccctgagcaacgccttccgctcggtgccgctggctgaggaggaggatttcgacagcaaagagtgggtcatcatcgacaaggagacggagctcaaggacttccctccaggggctgagcccagcacatcgggcaccacggatgaggagcccgaggagctgcggccactgcccgaggagggcgaagagcggcggcggctgggggcagagcccaccgtccggccccggggacgcagcatgcaggcgctggcggaggaggacctgcagcatttgccgccccagcccctgccaccccagctgagccagggcgatggccgttccgagacgtcacagccctccctcgggaagccacctaagaatgtttacatgccaaacagaatgtaacacccctccccaagcccttcccagtcactgcatggcctctgcccatcctgcacctgtccaccccaccccaacaccctggaagccactgtcaatgattagatcgggtctcggaagggaagtagccatcacaccattaaaaagcctgtggacct

SEQ ID NO: 440644 - DNA, 2398 bp, Homo sapiens
gaaatcagcctttctattggtcagggttagaaaccccgcctttgaggcattttcaaccaatggaagcgcggcattcttcatttaaactgtctataaatttctgcctagtcaaagttaagagtggcgccagggatttgaaccgcgctgacgaagtttggtgatccatcttccgagtatcgccgggatttcgaatcgcgatgatcatcccctctctagaggagctggactccctcaagtacagtgacctgcagaacttagccaagagtctgggtctccgggccaacctgagggcaaccaagttgttaaaagccttgaaaggctacattaaacatgaggcaagaaaaggaaatgagaatcaggatgaaagtcaaacttctgcatcctcttgtgatgagactgagatacagatcagcaaccaggaagaagctgagagacagccacttggccatgtcaccaaaacaaggagaaggtgcaagactgtccgtgtggaccctgactcacagcagaatcattcagagataaaaataagtaatcccactgaattccagaatcatgaaaagcaggaaagccaggatctcagagctactgcaaaagttccttctccaccagacgagcaccaagaagctgagaatgctgtttcctcaggtaacagagattcaaaggtaccttcagaaggaaagaaatctctctacacagatgagtcatccaaacctggaaaaaataaaagaactgcaatcactactccaaactttaagaagcttcatgaagctcattttaaggaaatggagtccattgatcaatatattgagagaaaaaagaaacattttgaagaacacaattccatgaatgaactgaagcagcagcccatcaataagggaggggtcaggactccagtacctccaagaggaagactctctgtggcttctactcccatcagccaacgacgctcgcaaggccggtcttgtggccctgcaagtcagagtaccttgggtctgaaggggtcactcaagcgctctgctatctctgcagctaaaacgggtgtcaggttttcagctgctactaaagataatgagcataagcgttcactgaccaagactccagccagaaagtctgcacatgtgaccgtgtctgggggcaccccaaaaggcgaggctgtgcttgggacacacaaattaaagaccatcacggggaattctgctgctgttattaccccattcaagttgacaactgaggcaacgcagactccagtctccaataagaaaccagtgtttgatcttaaagcaagtttgtctcgtcccctcaactatgaaccacacaaaggaaagctaaaaccatgggggcaatctaaagaaaataattatctaaatcaacatgtcaacagaattaacttctacaagaaaacttacaaacaaccccatctccagacaaaggaagagcaacggaagaaacgcgagcaagaacgaaaggagaagaaagcaaaggttttgggaatgcgaaggggcctcattttggctgaagattaataattttttaacatcttgtaaatattcctgtattctcaacttttttccttttgtaaattttttttttttgctgtcatccccactttagtcacgagatctttttctgctaactgttcatagtctgtgtagtgtccatgggttcttcatgtgctatgatctctgaaaagacgttatcaccttaaagctcaaattctttgggatggtttttacttaagtccattaacaattcaggtttctaacgagacccatcctaaaattctgtttctagatttttaatgtcaagttcccaagttccccctgctggttctaatattaacagaactgcagtcttctgctagccaatagcatttacctgatggcagctagttatgcaagcttcaggagaatttgaacaataacaagaatagggtaagctgggatagaaaggccacctcttcactctctatagaatatagtaacctttatgaaacggggccatatagtttggttatgacatcaatattttacctaggtgaaattgtttaggcttatgtaccttcgttcaaatatcctcatgtaattgccatctgtcactcactatattcacaaaaataaaactctacaactcattctaacattgcttacttaaaagctacatagccctatcgaaatgcgaggattaatgctttaatgcttttagagacagggtctcactgtgttgcccaggctggtctcaaactccaccaaatgtacttcttattcattttatggaaaagactaggctttgcttagtatcatgtccatgtttccttcacctcagtggagcttctgagttttatactgctcaagatcgtcataaataaaattttttctcattgtcaaaaaaaaattctttg

SEQ ID NO: 440645 - DNA, 884 bp, Homo sapiens
gaaatcagcctttctattggtcagggttagaaaccccgcctttgaggcattttcaaccaatggaagcgcggcattcttcatttaaactgtctataaatttctgcctagtcaaagttaagagtggcgccagggatttgaaccgcgctgacgaagtttggtgatccatcttccgagtatcgccgggatttcgaatcgcgatgatcatcccctctctagaggagctggactccctcaagtacagtgacctgcagaacttagccaagagtctgggtctccgggccaacctgagggcaaccaagttgttaaaagccttgaaaggctacattaaacatgaggcaagaaaaggaaatgagaatcaggatgaaagtcaaacttctgcatcctcttgtgatgagactgagatacagatcagcaaccaggaagaagctgagagacagccacttggccatgtcaccaaaacaaggagaaggtgcaagactgtccgtgtggaccctgactcacagcagaatcattcagagataaaaataagtaatcccactgaattccagaatcatgaaaagcaggaaagccaggatctcagagctactgcaaaagttccttctccaccagacgagcaccaagaagctgagaatgctgtttcctcaggtaacagagattcaaaggtaccttcagaaggaaagaaatctctctacacagatgagtcatccaaacctggaaaaaataaaaaaaaaaaaaattttgtgggggggtccggaatggaaaatttttaaacaaattttgtgggggggcgggccagtgttttggaaatggtctgggggtcaagggagccgctggaagggggggttcccaaaaaaaggggggacgcgttgcaaatcagggggtgg

SEQ ID NO: 440646 - DNA, 466 bp, Homo sapiens
taatcccagcagtttgggaggctgaggcaggcagatcacaaggtcagcagttcaagaccagcctggccaacacagtgaaaccccgtctctactaaaaatacaaaaattactgggactataggcacatgccacaacgcccggctaatttttgtatttttagtagagatggggtttcaccatgttggagaggccaagcttttaaaatgatgcattttctcttcagcacagcagcccatcaataagggaggggtcaggactccagtacctccaagaggaagactctctgtggcttctactcccatcagccaacgacgctcgcaaggccggtcttgtggccctgcaagtcagagtaccttgggtctgaaggggtcactcaagcgctctgctatctctgcagctaaaacgggtgtcaggtaaagaaatcactccaaaatgtaatcatgaacaagatttcacatggactata

SEQ ID NO: 440647 - DNA, 2353 bp, Homo sapiens
gaaatcagcctttctattggtcagggttagaaaccccgcctttgaggcattttcaaccaatggaagcgcggcattcttcatttaaactgtctataaatttctgcctagtcaaagttaagagtggcgccagggatttgaaccgcgctgacgaagtttggtgatccatcttccgagtatcgccgggatttcgaatcgcgatgatcatcccctctctagaggagctggactccctcaagtacagtgacctgcagaacttagccaagagtctgggtctccgggccaacctgagggcaaccaagttgttaaaagccttgaaaggctacattaaacatgaggcaagaaaaggaaatgagaatcaggatgaaagtcaaacttctgcatcctcttgtgatgagactgagatacagatcagcaaccaggaagaagctgagagacagccacttggccatgtcaccaaaacaaggagaaggtgcaagactgtccgtgtggaccctgactcacagaatcatgaaaagcaggaaagccaggatctcagagctactgcaaaagttccttctccaccagacgagcaccaagaagctgagaatgctgtttcctcaggtaacagagattcaaaggtaccttcagaaggaaagaaatctctctacacagatgagtcatccaaacctggaaaaaataaaagaactgcaatcactactccaaactttaagaagcttcatgaagctcattttaaggaaatggagtccattgatcaatatattgagagaaaaaagaaacattttgaagaacacaattccatgaatgaactgaagcagcagcccatcaataagggaggggtcaggactccagtacctccaagaggaagactctctgtggcttctactcccatcagccaacgacgctcgcaaggccggtcttgtggccctgcaagtcagagtaccttgggtctgaaggggtcactcaagcgctctgctatctctgcagctaaaacgggtgtcaggttttcagctgctactaaagataatgagcataagcgttcactgaccaagactccagccagaaagtctgcacatgtgaccgtgtctgggggcaccccaaaaggcgaggctgtgcttgggacacacaaattaaagaccatcacggggaattctgctgctgttattaccccattcaagttgacaactgaggcaacgcagactccagtctccaataagaaaccagtgtttgatcttaaagcaagtttgtctcgtcccctcaactatgaaccacacaaaggaaagctaaaaccatgggggcaatctaaagaaaataattatctaaatcaacatgtcaacagaattaacttctacaagaaaacttacaaacaaccccatctccagacaaaggaagagcaacggaagaaacgcgagcaagaacgaaaggagaagaaagcaaaggttttgggaatgcgaaggggcctcattttggctgaagattaataattttttaacatcttgtaaatattcctgtattctcaacttttttccttttgtaaattttttttttttgctgtcatccccactttagtcacgagatctttttctgctaactgttcatagtctgtgtagtgtccatgggttcttcatgtgctatgatctctgaaaagacgttatcaccttaaagctcaaattctttgggatggtttttacttaagtccattaacaattcaggtttctaacgagacccatcctaaaattctgtttctagatttttaatgtcaagttcccaagttccccctgctggttctaatattaacagaactgcagtcttctgctagccaatagcatttacctgatggcagctagttatgcaagcttcaggagaatttgaacaataacaagaatagggtaagctgggatagaaaggccacctcttcactctctatagaatatagtaacctttatgaaacggggccatatagtttggttatgacatcaatattttacctaggtgaaattgtttaggcttatgtaccttcgttcaaatatcctcatgtaattgccatctgtcactcactatattcacaaaaataaaactctacaactcattctaacattgcttacttaaaagctacatagccctatcgaaatgcgaggattaatgctttaatgcttttagagacagggtctcactgtgttgcccaggctggtctcaaactccaccaaatgtacttcttattcattttatggaaaagactaggctttgcttagtatcatgtccatgtttccttcacctcagtggagcttctgagttttatactgctcaagatcgtcataaataaaattttttctcattgtcaaaaaaaaattctttg

SEQ ID NO: 440648 - DNA, 2145 bp, Homo sapiens
  misc_feature (1903)..(1905): n is a, c, g, or t
gaaatcagcctttctattggtcagggttagaaaccccgcctttgaggcattttcaaccaatggaagcgcggcattcttcatttaaactgtctataaatttctgcctagtcaaagttaagagtggcgccagggatttgaaccgcgctgacgaagtttggtgatccatcttccgagtatcgccgggatttcgaatcgcgatgatcatcccctctctagaggagctggactccctcaagtacagtgacctgcagaacttagccaagagtctgggtctccgggccaacctgagggcaaccaagttgttaaaagccttgaaaggctacattaaacatgaggcaagaaaaggaaatgagaatcaggatgaaagtcaaacttctgcatcctcttgtgatgagactgagatacagatcagcaaccaggaagaagctgagagacagccacttggccatgtcaccaaaacaaggagaaggtgcaagactgtccgtgtggaccctgactcacagcagaatcattcagagataaaaataagtaatcccactgaattccagaatcatgaaaagcaggaaagccaggatctcagagctactgcaaaagttccttctccaccagacgagcaccaagaagctgagaatgctgtttcctcaggtaacagagattcaaaggtaccttcagaaggaaagaaatctctctacacagatgagtcatccaaacctggaaaaaataaaagaactgcaatcactactccaaactttaagaagcttcatgaagctcattttaaggaaatggagtccattgatcaatatattgagagaaaaaagaaacattttgaagaacacaattccatgaatgaactgaagcagcagcccatcaataagggaggggtcaggactccagtacctccaagaggaagactctctgtggcttctactcccatcagccaacgacgctcgcaaggccggtcttgtggccctgcaagtcagagtaccttgggtctgaaggggtcactcaagcgctctgctatctctgcagctaaaacgggtgtcaggttttcagctgctactaaagataatgagcataagcgttcactgaccaagactccagccagaaagtctgcacatgtgaccgtgtctgggggcaccccaaaaggcgaggctgtgcttgggacacacaaattaaagaccatcacggggaattctgctgctgttattaccccattcaagttgacaactgaggcaacgcagactccagtctccaataagaaaccagtgtttgatcttaaagcaagtttgtctcgtcccctcaactatgaaccacacaaaggaaagctaaaaccatgggggcaatctaaagaaaataattatctaaatcaacatgtcaacagaattaacttctacaagaaaacttacaaacaaccccatctccagacaaaggaagagcaacggaagaaacgcgagcaagaacgaaaggagaagaaagcaaaggttttgggaatgcgaaggggcctcattttggctgaagattaataattttttaacatcttgtaaatattcctgtattctcaacttttttccttttgtaaattttttttttttgctgtcatccccactttagtcacgagatctttttctgctaactgttcatagtctgtgtagtgtccatgggttcttcatgtgctatgatctctgaaaagacgttatcaccttaaagctcaaattctttgggatggtttttacttaagtccattaacaattcaggtttctaacgagacccatcctaaaattctgtttctagatttttaatgtcaagttcccaagttccccctgctggttctaatattaacagaactgcagtcttctgctagccaatagcatttacctgatggcagggaaagctaagacaaacnnnctacaatgttcagcctaggtcgatcctcaactagacatcctgcgcataaaatagatgatgatagcacaacacatcctgctaactagctgacgtcgtgcatagacgcctcggatcgccatacctaggtggacaacacctttgaaagtgtgactctagatgcgtcagcataaaggcaactcgacactagatttctagaacgatagtctcctacctatgcatatcatagacaaaagctaactt

SEQ ID NO: 440649 - DNA, 2281 bp, Homo sapiens
gaaatcagcctttctattggtcagggttagaaaccccgcctttgaggcattttcaaccaatggaagcgcggcattcttcatttaaactgtctataaatttctgcctagtcaaagttaagagtggcgccagggatttgaaccgcgctgacgaagtttggtgatccatcttccgagtatcgccgggatttcgaatcgcgatgatcatcccctctctagaggagctggactccctcaagtacagtgacctgcagaacttagccaagagtctgggtctccgggccaacctgagggcaaccaagttgttaaaagccttgaaaggctacattaaacatgaggcaagaaaaggaaatgagaatcaggatgaaagtcaaacttctgcatcctcttgtgatgagactgagatacagatcagcaaccaggaagaagctgagagacagccacttggccatgtcaccaaaacaaggagaaggtgcaagactgtccgtgtggaccctgactcacagcagaatcattcagagataaaaataagtaatcccactgaattccagaatcatgaaaagcaggaaagccaggatctcagagctactgcaaaagttccttctccaccagacgagcaccaagaagctgagaatgctgtttcctcaggtaacagagattcaaaggtaccttcagaaggaaagaaatctctctacacagatgagtcatccaaacctggaaaaaataaaagaactgcaatcactactccaaactttaagaagcttcatgaagctcattttaaggaaatggagtccattgatcaatatattgagagaaaaaagaaacattttgaagaacacaattccatgaatgaactgaagcagcagcccatcaataagggaggggtcaggactccagtacctccaagaggaagactctctgtggcttctactcccatcagccaacgacgctcgcaaggccggtcttgtggccctgcaagtcagagtaccttgggtctgaaggggtcactcaagcgctctgctatctctgcagctaaaacgggtgtcaggttttcagctgctactaaagataatgagcataagcgttcactgaccaagactccagccagaaagtctgcacatgtgaccgtgtctgggggcaccccaaaaggcgaggctgtgcttgggacacacaaattaaagaccatcacggggaattctgctgctggaaagctaaaaccatgggggcaatctaaagaaaataattatctaaatcaacatgtcaacagaattaacttctacaagaaaacttacaaacaaccccatctccagacaaaggaagagcaacggaagaaacgcgagcaagaacgaaaggagaagaaagcaaaggttttgggaatgcgaaggggcctcattttggctgaagattaataattttttaacatcttgtaaatattcctgtattctcaacttttttccttttgtaaattttttttttttgctgtcatccccactttagtcacgagatctttttctgctaactgttcatagtctgtgtagtgtccatgggttcttcatgtgctatgatctctgaaaagacgttatcaccttaaagctcaaattctttgggatggtttttacttaagtccattaacaattcaggtttctaacgagacccatcctaaaattctgtttctagatttttaatgtcaagttcccaagttccccctgctggttctaatattaacagaactgcagtcttctgctagccaatagcatttacctgatggcagctagttatgcaagcttcaggagaatttgaacaataacaagaatagggtaagctgggatagaaaggccacctcttcactctctatagaatatagtaacctttatgaaacggggccatatagtttggttatgacatcaatattttacctaggtgaaattgtttaggcttatgtaccttcgttcaaatatcctcatgtaattgccatctgtcactcactatattcacaaaaataaaactctacaactcattctaacattgcttacttaaaagctacatagccctatcgaaatgcgaggattaatgctttaatgcttttagagacagggtctcactgtgttgcccaggctggtctcaaactccaccaaatgtacttcttattcattttatggaaaagactaggctttgcttagtatcatgtccatgtttccttcacctcagtggagcttctgagttttatactgctcaagatcgtcataaataaaattttttctcattgtcaaaaaaaaattctttg

SEQ ID NO: 440650 - DNA, 2329 bp, Homo sapiens
gaaatcagcctttctattggtcagggttagaaaccccgcctttgaggcattttcaaccaatggaagcgcggcattcttcatttaaactgtctataaatttctgcctagtcaaagttaagagtggcgccagggatttgaaccgcgctgacgaagtttggtgatccatcttccgagtatcgccgggatttcgaatcgcgatgatcatcccctctctagaggagctggactccctcaagtacagtgacctgcagaacttagccaagagtctgggtctccgggccaacctgagggcaaccaagttgttaaaagccttgaaaggctacattaaacatgaggcaagaaaaggaaatgagaatcaggatgaaagtcaaacttctgcatcctcttgtgatgagactgagatacagatcagcaaccaggaagaagctgagagacagccacttggccatgtcaccaaaacaaggagaaggtgcaagactgtccgtgtggaccctgactcacagcagaatcattcagagataaaaataagtaatcccactgaattccagaatcatgaaaagcaggaaagccaggatctcagagctactgcaaaagttccttctccaccagacgagcaccaagaagctgagaatgctgtttcctcaggtaacagagattcaaaggtaccttcagaaggaaagaaatctctctacacagatgagtcatccaaacctggaaaaaataaaagaactgcaatcactactccaaactttaagaagcttcatgaagctcattttaaggaaatggagtccattgatcaatatattgagagaaaaaagaaacattttgaagaacacaattccatgaatgaactgaagcagcagcccatcaataagggaggggtcaggactccagtacctccaagaggaagactctctgtggcttctactcccatcagccaacgacgctcgcaaggccggtcttgtggccctgcaagtcagagtaccttgggtctgaaggggtcactcaagcgctctgctatctctgcagctaaaacgggtgtcaggttcaagtgattcttctgcctcagcctcccgagtagctgggactacaggttttcagctgctactaaagataatgagcataagcgttcactgaccaagactccagccagaaagtctgcacatgtgaccgtgtctgggggcaccccaaaaggcgaggctgtgcttgggacacacaaattaaagaccatcacggggaattctgctgctggaaagctaaaaccatgggggcaatctaaagaaaataattatctaaatcaacatgtcaacagaattaacttctacaagaaaacttacaaacaaccccatctccagacaaaggaagagcaacggaagaaacgcgagcaagaacgaaaggagaagaaagcaaaggttttgggaatgcgaaggggcctcattttggctgaagattaataattttttaacatcttgtaaatattcctgtattctcaacttttttccttttgtaaattttttttttttgctgtcatccccactttagtcacgagatctttttctgctaactgttcatagtctgtgtagtgtccatgggttcttcatgtgctatgatctctgaaaagacgttatcaccttaaagctcaaattctttgggatggtttttacttaagtccattaacaattcaggtttctaacgagacccatcctaaaattctgtttctagatttttaatgtcaagttcccaagttccccctgctggttctaatattaacagaactgcagtcttctgctagccaatagcatttacctgatggcagctagttatgcaagcttcaggagaatttgaacaataacaagaatagggtaagctgggatagaaaggccacctcttcactctctatagaatatagtaacctttatgaaacggggccatatagtttggttatgacatcaatattttacctaggtgaaattgtttaggcttatgtaccttcgttcaaatatcctcatgtaattgccatctgtcactcactatattcacaaaaataaaactctacaactcattctaacattgcttacttaaaagctacatagccctatcgaaatgcgaggattaatgctttaatgcttttagagacagggtctcactgtgttgcccaggctggtctcaaactccaccaaatgtacttcttattcattttatggaaaagactaggctttgcttagtatcatgtccatgtttccttcacctcagtggagcttctgagttttatactgctcaagatcgtcataaataaaattttttctcattgtcaaaaaaaaattctttg

SEQ ID NO: 440651 - DNA, 2416 bp, Homo sapiens
gaaatcagcctttctattggtcagggttagaaaccccgcctttgaggcattttcaaccaatggaagcgcggcattcttcatttaaactgtctataaatttctgcctagtcaaagttaagagtggcgccagggatttgaaccgcgctgacgaagtttggtgatccatcttccgagtatcgccgggatttcgaatcgcgatgatcatcccctctctagaggagctggactccctcaagtacagtgacctgcagaacttagccaagagtctgggtctccgggccaacctgagggcaaccaagttgttaaaagccttgaaaggctacattaaacatgaggcaagaaaaggaaatgagaatcaggatgaaagtcaaacttctgcatcctcttgtgatgagactgagatacagatcagcaaccaggaagaagctgagagacagccacttggccatgtcaccaaaacaaggagaaggtgcaagactgtccgtgtggaccctgactcacagcagaatcattcagagataaaaataagtaatcccactgaattccagaatcatgaaaagcaggaaagccaggatctcagagctactgcaaaagttccttctccaccagacgagcaccaagaagctgagaatgctgtttcctcaggtaaacgtggaataaatggtaacagagattcaaaggtaccttcagaaggaaagaaatctctctacacagatgagtcatccaaacctggaaaaaataaaagaactgcaatcactactccaaactttaagaagcttcatgaagctcattttaaggaaatggagtccattgatcaatatattgagagaaaaaagaaacattttgaagaacacaattccatgaatgaactgaagcagcagcccatcaataagggaggggtcaggactccagtacctccaagaggaagactctctgtggcttctactcccatcagccaacgacgctcgcaaggccggtcttgtggccctgcaagtcagagtaccttgggtctgaaggggtcactcaagcgctctgctatctctgcagctaaaacgggtgtcaggttttcagctgctactaaagataatgagcataagcgttcactgaccaagactccagccagaaagtctgcacatgtgaccgtgtctgggggcaccccaaaaggcgaggctgtgcttgggacacacaaattaaagaccatcacggggaattctgctgctgttattaccccattcaagttgacaactgaggcaacgcagactccagtctccaataagaaaccagtgtttgatcttaaagcaagtttgtctcgtcccctcaactatgaaccacacaaaggaaagctaaaaccatgggggcaatctaaagaaaataattatctaaatcaacatgtcaacagaattaacttctacaagaaaacttacaaacaaccccatctccagacaaaggaagagcaacggaagaaacgcgagcaagaacgaaaggagaagaaagcaaaggttttgggaatgcgaaggggcctcattttggctgaagattaataattttttaacatcttgtaaatattcctgtattctcaacttttttccttttgtaaattttttttttttgctgtcatccccactttagtcacgagatctttttctgctaactgttcatagtctgtgtagtgtccatgggttcttcatgtgctatgatctctgaaaagacgttatcaccttaaagctcaaattctttgggatggtttttacttaagtccattaacaattcaggtttctaacgagacccatcctaaaattctgtttctagatttttaatgtcaagttcccaagttccccctgctggttctaatattaacagaactgcagtcttctgctagccaatagcatttacctgatggcagctagttatgcaagcttcaggagaatttgaacaataacaagaatagggtaagctgggatagaaaggccacctcttcactctctatagaatatagtaacctttatgaaacggggccatatagtttggttatgacatcaatattttacctaggtgaaattgtttaggcttatgtaccttcgttcaaatatcctcatgtaattgccatctgtcactcactatattcacaaaaataaaactctacaactcattctaacattgcttacttaaaagctacatagccctatcgaaatgcgaggattaatgctttaatgcttttagagacagggtctcactgtgttgcccaggctggtctcaaactccaccaaatgtacttcttattcattttatggaaaagactaggctttgcttagtatcatgtccatgtttccttcacctcagtggagcttctgagttttatactgctcaagatcgtcataaataaaattttttctcattgtcaaaaaaaaattctttg

SEQ ID NO: 440652 - DNA, 1647 bp, Homo sapiens
  misc_feature (1432)..(1432): n is a, c, g, or t
gaaatcagcctttctattggtcagggttagaaaccccgcctttgaggcattttcaaccaatggaagcgcggcattcttcatttaaactgtctataaatttctgcctagtcaaagttaagagtggcgccagggatttgaaccgcgctgacgaagtttggtgatccatcttccgagtatcgccgggatttcgaatcgcgatgatcatcccctctctagaggagctggactccctcaagtacagtgacctgcagaacttagccaagagtctgggtctccgggccaacctgagggcaaccaagttgttaaaagccttgaaaggctacattaaacatgaggcaagaaaaggaaatgagaatcaggatgaaagtcaaacttctgcatcctcttgtgatgagactgagatacagatcagcaaccaggaagaagctgagagacagccacttggccatgtcaccaaaacaaggagaaggtgcaagactgtccgtgtggaccctgactcacagcagaatcattcagagataaaaataagtaatcccactgaattccagaatcatgaaaagcaggaaagccaggatctcagagctactgcaaaagttccttctccaccagacgagcaccaagaagctgagaatgctgtttcctcaggtaacagagattcaaaggtaccttcagaaggaaagaaatctctctacacagatgagtcatccaaacctggaaaaaataaaagaactgcaatcactactccaaactttaagaagcttcatgaagctcattttaaggaaatggagtccattgatcaatatattgagagaaaaaagaaacattttgaagaacacaattccatgaatgaactgaagcagcagcccatcaataagggaggggtcaggactccagtacctccaagaggaagactctctgtggcttctactcccatcagccaacgacgctcgcaaggccggtcttgtggccctgcaagtcagagtaccttgggtctgaaggggtcactcaagcgctctgctatctctgcagctaaaacgggtgtcaggttttcagctgctactaaagataatgagcataagcgttcactgaccaagactccagccagaaagtctgcacatgtgaccgtgtctgggggcaccccaaaaggcgaggctgtgcttgggacacacaaattaaagaccatcacggggaattctgctgctgttattaccccattcaagttgacaactgaggcaacgcagactccagtctccaataagaaaccagtgtttgatcttaaagcaagtttgtctcgtcccctcaactatgaaccacacaaaggaaagctaaaaccatgggggcaatctaaagaaaataattatctaaatcaacatgtcaacagaattaacttctacaagaaaacttacaaacaaccccatctccagacaaagangagccacggaagaacgcgagcagaacgaaggggagcaaggccagcgttgggaaatgggaacgggctcatatgggtgcaaatacatatctttaactctgttagtattcgggatccacacctttctcttgtgaaatcccatgcggcgatccccttttcgagagatttcgcgaacgccaaatgtgtagtgcacggtctcagcgtactctaaagagtat

SEQ ID NO: 440653 - DNA, 2299 bp, Homo sapiens
gaaatcagcctttctattggtcagggttagaaaccccgcctttgaggcattttcaaccaatggaagcgcggcattcttcatttaaactgtctataaatttctgcctagtcaaagttaagagtggcgccagggatttgaaccgcgctgacgaagtttggtgatccatcttccgagtatcgccgggatttcgaatcgcgatgatcatcccctctctagaggagctggactccctcaagtacagtgacctgcagaacttagccaagagtctgggtctccgggccaacctgagggcaaccaagttgttaaaagccttgaaaggctacattaaacatgaggcaagaaaaggaaatgagaatcaggatgaaagtcaaacttctgcatcctcttgtgatgagactgagatacagatcagcaaccaggaagaagctgagagacagccacttggccatgtcaccaaaacaaggagaaggtgcaagactgtccgtgtggaccctgactcacagaatcatgaaaagcaggaaagccaggatctcagagctactgcaaaagttccttctccaccagacgagcaccaagaagctgagaatgctgtttcctcaggtaacagagattcaaaggtaccttcagaaggaaagaaatctctctacacagatgagtcatccaaacctggaaaaaataaagaaatggagtccattgatcaatatattgagagaaaaaagaaacattttgaagaacacaattccatgaatgaactgaagcagcagcccatcaataagggaggggtcaggactccagtacctccaagaggaagactctctgtggcttctactcccatcagccaacgacgctcgcaaggccggtcttgtggccctgcaagtcagagtaccttgggtctgaaggggtcactcaagcgctctgctatctctgcagctaaaacgggtgtcaggttttcagctgctactaaagataatgagcataagcgttcactgaccaagactccagccagaaagtctgcacatgtgaccgtgtctgggggcaccccaaaaggcgaggctgtgcttgggacacacaaattaaagaccatcacggggaattctgctgctgttattaccccattcaagttgacaactgaggcaacgcagactccagtctccaataagaaaccagtgtttgatcttaaagcaagtttgtctcgtcccctcaactatgaaccacacaaaggaaagctaaaaccatgggggcaatctaaagaaaataattatctaaatcaacatgtcaacagaattaacttctacaagaaaacttacaaacaaccccatctccagacaaaggaagagcaacggaagaaacgcgagcaagaacgaaaggagaagaaagcaaaggttttgggaatgcgaaggggcctcattttggctgaagattaataattttttaacatcttgtaaatattcctgtattctcaacttttttccttttgtaaattttttttttttgctgtcatccccactttagtcacgagatctttttctgctaactgttcatagtctgtgtagtgtccatgggttcttcatgtgctatgatctctgaaaagacgttatcaccttaaagctcaaattctttgggatggtttttacttaagtccattaacaattcaggtttctaacgagacccatcctaaaattctgtttctagatttttaatgtcaagttcccaagttccccctgctggttctaatattaacagaactgcagtcttctgctagccaatagcatttacctgatggcagctagttatgcaagcttcaggagaatttgaacaataacaagaatagggtaagctgggatagaaaggccacctcttcactctctatagaatatagtaacctttatgaaacggggccatatagtttggttatgacatcaatattttacctaggtgaaattgtttaggcttatgtaccttcgttcaaatatcctcatgtaattgccatctgtcactcactatattcacaaaaataaaactctacaactcattctaacattgcttacttaaaagctacatagccctatcgaaatgcgaggattaatgctttaatgcttttagagacagggtctcactgtgttgcccaggctggtctcaaactccaccaaatgtacttcttattcattttatggaaaagactaggctttgcttagtatcatgtccatgtttccttcacctcagtggagcttctgagttttatactgctcaagatcgtcataaataaaattttttctcattgtcaaaaaaaaattctttg

SEQ ID NO: 440654 - DNA, 1597 bp, Homo sapiens
ccaaggcagggagagcagaaaagacaagaacatattttacaaataatgttagttgatatgtgatttaatttagcattagccttttaggaatatgtctcttctgcaaaagaggttcgttcctatgacaattattaattgaggcccttttcactgcttgctaatagtcaagtggttttatttataagctagacacaagttactcttgccacagtactcatgtcttgtactctgctgtcctatttaggttttcagctgctactaaagataatgagcataagcgttcactgaccaagactccagccagaaagtctgcacatgtgaccgtgtctgggggcaccccaaaaggcgaggctgtgcttgggacacacaaattaaagaccatcacggggaattctgctgctgttattaccccattcaagttgacaactgaggcaacgcagactccagtctccaataagaaaccagtgtttgatcttaaagcaagtttgtctcgtcccctcaactatgaaccacacaaaggaaagctaaaaccatgggggcaatctaaagaaaataattatctaaatcaacatgtcaacagaattaacttctacaagaaaacttacaaacaaccccatctccagacaaaggaagagcaacggaagaaacgcgagcaagaacgaaaggagaagaaagcaaaggttttgggaatgcgaaggggcctcattttggctgaagattaataattttttaacatcttgtaaatattcctgtattctcaacttttttccttttgtaaattttttttttttgctgtcatccccactttagtcacgagatctttttctgctaactgttcatagtctgtgtagtgtccatgggttcttcatgtgctatgatctctgaaaagacgttatcaccttaaagctcaaattctttgggatggtttttacttaagtccattaacaattcaggtttctaacgagacccatcctaaaattctgtttctagatttttaatgtcaagttcccaagttccccctgctggttctaatattaacagaactgcagtcttctgctagccaatagcatttacctgatggcagctagttatgcaagcttcaggagaatttgaacaataacaagaatagggtaagctgggatagaaaggccacctcttcactctctatagaatatagtaacctttatgaaacggggccatatagtttggttatgacatcaatattttacctaggtgaaattgtttaggcttatgtaccttcgttcaaatatcctcatgtaattgccatctgtcactcactatattcacaaaaataaaactctacaactcattctaacattgcttacttaaaagctacatagccctatcgaaatgcgaggattaatgctttaatgcttttagagacagggtctcactgtgttgcccaggctggtctcaaactccaccaaatgtacttcttattcattttatggaaaagactaggctttgcttagtatcatgtccatgtttccttcacctcagtggagcttctgagttttatactgctcaagatcgtcataaataaaattttttctcattgtcaaaaaaaaattctttg

SEQ ID NO: 440655 - DNA, 2132 bp, Homo sapiens
gaaatcagcctttctattggtcagggttagaaaccccgcctttgaggcattttcaaccaatggaagcgcggcattcttcatttaaactgtctataaatttctgcctagtcaaagttaagagtggcgccagggatttgaaccgcgctgacgaagtttggtgatccatcttccgagtatcgccgggatttcgaatcgcgatgatcatcccctctctagaggagctggactccctcaagtacagtgacctgcagaacttagccaagagtctgggtctccgggccaacctgagggcaaccaagttgttaaaagccttgaaaggctacattaaacatgaggcaagaaaaggaaatgagaatcaggatgaaagtcaaacttctgcatcctcttgtgatgagactgagatacagatcagcaaccaggaagaagctgagagacagccacttggccatgtcaccaaaacaaggagaaggtgcaagactgtccgtgtggaccctgactcacagcagaatcattcagagataaaaataagtaatcccactgaattccagaatcatgaaaagcaggaaagccaggatctcagagctactgcaaaagttccttctccaccagacgagcaccaagaagctgagaatgctgtttcctcaggtaacagagattcaaaggtaccttcagaaggaaagaaatctctctacacagatgagtcatccaaacctggaaaaaataaaagaactgcaatcactactccaaactttaagaagcttcatgaagctcattttaaggaaatggagtccattgatcaatatattgagagaaaaaagaaacattttgaagaacacaattccatgaatgaactgaagcagcagcccatcaataagggaggggtcaggactccagtacctccaagaggaagactctctgtggcttctactcccatcagccaacgacgctcgcaaggccggtcttgtggccctgcaagtcagagtaccttgggtctgaaggggtcactcaagcgctctgctatctctgcagctaaaacgggtgtcaggttttcagctgctactaaagataatgagcataagcgttcactgaccaagactccagccagaaagtctgcacatgtgaccgtgtctgggggcaccccaaaaggcgaggctgtgcttgggacacacaaattaaagaccatcacggggaattctgctgctgttattaccccattcaagttgacaactgaggcaacgcagactccagtctccaataagaaaccagtgtttgatcttaaagcaagtttgtctcgtcccctcaactatgaaccacacaaaggaaagctaaaaccatgggggcaatctaaagaaaataattatctaaatcaacatgtcaacagaattaacttctacaagaaaacttacaaacaaccccatctccagacaaaggaagagcaacggaagaaacgcgagcaagaacgaaaggagaagaaagcaaaggttttgggaatgcgaaggggcctcattttggctgaagattaataattttttaacatcttgtaaatattcctgtattctcaacttttttccttttgtaaattttttttttttgctgtcatccccactttagtcacgagatctttttctgctaactgttcatagtctgtgtagtgtccatgggttcttcatgtgctatgatctctgaaaagacgttatcaccttaaagctcaaattctttgggatggtttttacttaagtccattaacaattcaggtttctaacgagacccatcctaaaattctgtttctagatttttaatgtcaagttcccaagttccccctgctggttctaatattaacagaactgcagtcttctgctagccaatagcatttacctgatggcagctagttatgcaagcttcaggagaatttgaacaataacaagaatagggtaagctgggatagaaaggccacctcttcactctctatagaatatagtaacctttatgaaacggggccatatagtttggttatgacatcaatattttacctaggtgaaattgtttaggcttatgtaccttcgttcaaatatcctcatgtaattgccatctgtcactcactatattcacaaaaataaaactctacaactcat

SEQ ID NO: 440656 - DNA, 2360 bp, Homo sapiens
  misc_feature (277)..(277): n is a, c, g, or t
  misc_feature (279)..(285): n is a, c, g, or t
  misc_feature (298)..(298): n is a, c, g, or t
  misc_feature (303)..(303): n is a, c, g, or t
gaaatcagcctttctattggtcagggttagaaaccccgcctttgaggcattttcaaccaatggaagcgcggcattcttcatttaaactgtctataaatttctgcctagtcaaagttaagagtggcgccagggatttgaaccgcgctgacgaagtttggtgatccatcttccgagtatcgccgggatttcgaatcgcgatgatcatcccctctctagaggagctggactccctcaaaaaaaagaaaaaaaaaaaaaaaaaaaaaaaaaataatagaanannnnnnnaaaaaaaaaaaanaaaanaaaaaaaaaaaagccttgaaaggctacattaaacatgaggcaagaaaaggaaatgagaatcaggatgaaagtcaaacttctgcatcctcttgtgatgagactgagatacagatcagcaaccaggaagaagctgagagacagccacttggccatgtcaccaaaacaaggagaaggtgcaagactgtccgtgtggaccctgactcacagaatcatgaaaagcaggaaagccaggatctcagagctactgcaaaagttccttctccaccagacgagcaccaagaagctgagaatgctgtttcctcaggtaacagagattcaaaggtaccttcagaaggaaagaaatctctctacacagatgagtcatccaaacctggaaaaaataaaagaactgcaatcactactccaaactttaagaagcttcatgaagctcattttaaggaaatggagtccattgatcaatatattgagagaaaaaagaaacattttgaagaacacaattccatgaatgaactgaagcagcagcccatcaataagggaggggtcaggactccagtacctccaagaggaagactctctgtggcttctactcccatcagccaacgacgctcgcaaggccggtcttgtggccctgcaagtcagagtaccttgggtctgaaggggtcactcaagcgctctgctatctctgcagctaaaacgggtgtcaggttttcagctgctactaaagataatgagcataagcgttcactgaccaagactccagccagaaagtctgcacatgtgaccgtgtctgggggcaccccaaaaggcgaggctgtgcttgggacacacaaattaaagaccatcacggggaattctgctgctgttattaccccattcaagttgacaactgaggcaacgcagactccagtctccaataagaaaccagtgtttgatcttaaagcaagtttgtctcgtcccctcaactatgaaccacacaaaggaaagctaaaaccatgggggcaatctaaagaaaataattatctaaatcaacatgtcaacagaattaacttctacaagaaaacttacaaacaaccccatctccagacaaaggaagagcaacggaagaaacgcgagcaagaacgaaaggagaagaaagcaaaggttttgggaatgcgaaggggcctcattttggctgaagattaataattttttaacatcttgtaaatattcctgtattctcaacttttttccttttgtaaattttttttttttgctgtcatccccactttagtcacgagatctttttctgctaactgttcatagtctgtgtagtgtccatgggttcttcatgtgctatgatctctgaaaagacgttatcaccttaaagctcaaattctttgggatggtttttacttaagtccattaacaattcaggtttctaacgagacccatcctaaaattctgtttctagatttttaatgtcaagttcccaagttccccctgctggttctaatattaacagaactgcagtcttctgctagccaatagcatttacctgatggcagctagttatgcaagcttcaggagaatttgaacaataacaagaatagggtaagctgggatagaaaggccacctcttcactctctatagaatatagtaacctttatgaaacggggccatatagtttggttatgacatcaatattttacctaggtgaaattgtttaggcttatgtaccttcgttcaaatatcctcatgtaattgccatctgtcactcactatattcacaaaaataaaactctacaactcattctaacattgcttacttaaaagctacatagccctatcgaaatgcgaggattaatgctttaatgcttttagagacagggtctcactgtgttgcccaggctggtctcaaactccaccaaatgtacttcttattcattttatggaaaagactaggctttgcttagtatcatgtccatgtttccttcacctcagtggagcttctgagttttatactgctcaagatcgtcataaataaaattttttctcattgtcaaaaaaaaattctttg

SEQ ID NO: 440657 - DNA, 2371 bp, Homo sapiens
gaaatcagcctttctattggtcagggttagaaaccccgcctttgaggcattttcaaccaatggaagcgcggcattcttcatttaaactgtctataaatttctgcctagtcaaagttaagagtggcgccagggatttgaaccgcgctgacgaagtttggtgatccatcttccgagtatcgccgggatttcgaatcgcgatgatcatcccctctctagaggagctggactccctcaagtacagtgacctgcagaacttagccaagagtctgggtctccgggccaacctgagggcaaccaagttgttaaaagccttgaaaggctacattaaacatgaggcaagaaaaggaaatgagaatcaggatgaaagtcaaacttctgcatcctcttgtgatgagactgagatacagatcagcaaccaggaagaagctgagagacagccacttggccatgtcaccaaaacaaggagaaggtgcaagactgtccgtgtggaccctgactcacagaatcatgaaaagcaggaaagccaggatctcagagctactgcaaaagttccttctccaccagacgagcaccaagaagctgagaatgctgtttcctcaggtaaacgtggaataaatggtaacagagattcaaaggtaccttcagaaggaaagaaatctctctacacagatgagtcatccaaacctggaaaaaataaaagaactgcaatcactactccaaactttaagaagcttcatgaagctcattttaaggaaatggagtccattgatcaatatattgagagaaaaaagaaacattttgaagaacacaattccatgaatgaactgaagcagcagcccatcaataagggaggggtcaggactccagtacctccaagaggaagactctctgtggcttctactcccatcagccaacgacgctcgcaaggccggtcttgtggccctgcaagtcagagtaccttgggtctgaaggggtcactcaagcgctctgctatctctgcagctaaaacgggtgtcaggttttcagctgctactaaagataatgagcataagcgttcactgaccaagactccagccagaaagtctgcacatgtgaccgtgtctgggggcaccccaaaaggcgaggctgtgcttgggacacacaaattaaagaccatcacggggaattctgctgctgttattaccccattcaagttgacaactgaggcaacgcagactccagtctccaataagaaaccagtgtttgatcttaaagcaagtttgtctcgtcccctcaactatgaaccacacaaaggaaagctaaaaccatgggggcaatctaaagaaaataattatctaaatcaacatgtcaacagaattaacttctacaagaaaacttacaaacaaccccatctccagacaaaggaagagcaacggaagaaacgcgagcaagaacgaaaggagaagaaagcaaaggttttgggaatgcgaaggggcctcattttggctgaagattaataattttttaacatcttgtaaatattcctgtattctcaacttttttccttttgtaaattttttttttttgctgtcatccccactttagtcacgagatctttttctgctaactgttcatagtctgtgtagtgtccatgggttcttcatgtgctatgatctctgaaaagacgttatcaccttaaagctcaaattctttgggatggtttttacttaagtccattaacaattcaggtttctaacgagacccatcctaaaattctgtttctagatttttaatgtcaagttcccaagttccccctgctggttctaatattaacagaactgcagtcttctgctagccaatagcatttacctgatggcagctagttatgcaagcttcaggagaatttgaacaataacaagaatagggtaagctgggatagaaaggccacctcttcactctctatagaatatagtaacctttatgaaacggggccatatagtttggttatgacatcaatattttacctaggtgaaattgtttaggcttatgtaccttcgttcaaatatcctcatgtaattgccatctgtcactcactatattcacaaaaataaaactctacaactcattctaacattgcttacttaaaagctacatagccctatcgaaatgcgaggattaatgctttaatgcttttagagacagggtctcactgtgttgcccaggctggtctcaaactccaccaaatgtacttcttattcattttatggaaaagactaggctttgcttagtatcatgtccatgtttccttcacctcagtggagcttctgagttttatactgctcaagatcgtcataaataaaattttttctcattgtcaaaaaaaaattctttg

SEQ ID NO: 440658 - DNA, 1974 bp, Homo sapiens
tacaggcgcccaccaccacgcccggctgacttttgtatttctagtagagatggggttgatagtttataagccaggatggtcttgatcttctgacctcgtgatccacccgcctcggctcccaaagtgctgggattacaggcgtgagctaccgtgcccggccacatatttcttaatgagaacttttttgaaatccttcattatttctgtgtctttggatttaggtaacagagattcaaaggtaccttcagaaggaaagaaatctctctacacagatgagtcatccaaacctggaaaaaataaaagaactgcaatcactactccaaactttaagaagcttcatgaagctcattttaaggaaatggagtccattgatcaatatattgagagaaaaaagaaacattttgaagaacacaattccatgaatgaactgaagcagcagcccatcaataagggaggggtcaggactccagtacctccaagaggaagactctctgtggcttctactcccatcagccaacgacgctcgcaaggccggtcttgtggccctgcaagtcagagtaccttgggtctgaaggggtcactcaagcgctctgctatctctgcagctaaaacgggtgtcaggttttcagctgctactaaagataatgagcataagcgttcactgaccaagactccagccagaaagtctgcacatgtgaccgtgtctgggggcaccccaaaaggcgaggctgtgcttgggacacacaaattaaagaccatcacggggaattctgctgctgttattaccccattcaagttgacaactgaggcaacgcagactccagtctccaataagaaaccagtgtttgatcttaaagcaagtttgtctcgtcccctcaactatgaaccacacaaaggaaagctaaaaccatgggggcaatctaaagaaaataattatctaaatcaacatgtcaacagaattaacttctacaagaaaacttacaaacaaccccatctccagacaaaggaagagcaacggaagaaacgcgagcaagaacgaaaggagaagaaagcaaaggttttgggaatgcgaaggggcctcattttggctgaagattaataattttttaacatcttgtaaatattcctgtattctcaacttttttccttttgtaaattttttttttttgctgtcatccccactttagtcacgagatctttttctgctaactgttcatagtctgtgtagtgtccatgggttcttcatgtgctatgatctctgaaaagacgttatcaccttaaagctcaaattctttgggatggtttttacttaagtccattaacaattcaggtttctaacgagacccatcctaaaattctgtttctagatttttaatgtcaagttcccaagttccccctgctggttctaatattaacagaactgcagtcttctgctagccaatagcatttacctgatggcagctagttatgcaagcttcaggagaatttgaacaataacaagaatagggtaagctgggatagaaaggccacctcttcactctctatagaatatagtaacctttatgaaacggggccatatagtttggttatgacatcaatattttacctaggtgaaattgtttaggcttatgtaccttcgttcaaatatcctcatgtaattgccatctgtcactcactatattcacaaaaataaaactctacaactcattctaacattgcttacttaaaagctacatagccctatcgaaatgcgaggattaatgctttaatgcttttagagacagggtctcactgtgttgcccaggctggtctcaaactccaccaaatgtacttcttattcattttatggaaaagactaggctttgcttagtatcatgtccatgtttccttcacctcagtggagcttctgagttttatactgctcaagatcgtcataaataaaattttttctcattgtcaaaaaaaaattctttg

SEQ ID NO: 440659 - DNA, 2308 bp, Homo sapiens
gaaatcagcctttctattggtcagggttagaaaccccgcctttgaggcattttcaaccaatggaagcgcggcattcttcatttaaactgtctataaatttctgcctagtcaaagttaagagtggcgccagggatttgaaccgcgctgacgaagtttggtgatccatcttccgagtatcgccgggatttcgaatcgcgatgatcatcccctctctagaggagctggactccctcaagtacagtgacctgcagaacttagccaagagtctgggtctccgggccaacctgagggcaaccaagttgttaaaagccttgaaaggctacattaaacatgaggcaagaaaaggaaatgagaatcaggatgaaagtcaaacttctgcatcctcttgtgatgagactgagatacagatcagcaaccaggaagaagctgagagacagccacttggccatgtcaccaaaacaaggagaaggtgcaagactgtccgtgtggaccctgactcacagaatcatgaaaagcaggaaagccaggatctcagagctactgcaaaagttccttctccaccagacgagcaccaagaagctgagaatgctgtttcctcaggtaacagagattcaaaggtaccttcagaaggaaagaaatctctctacacagatgagtcatccaaacctggaaaaaataaaagaactgcaatcactactccaaactttaagaagcttcatgaagctcattttaaggaaatggagtccattgatcaatatattgagagacagcagcccatcaataagggaggggtcaggactccagtacctccaagaggaagactctctgtggcttctactcccatcagccaacgacgctcgcaaggccggtcttgtggccctgcaagtcagagtaccttgggtctgaaggggtcactcaagcgctctgctatctctgcagctaaaacgggtgtcaggttttcagctgctactaaagataatgagcataagcgttcactgaccaagactccagccagaaagtctgcacatgtgaccgtgtctgggggcaccccaaaaggcgaggctgtgcttgggacacacaaattaaagaccatcacggggaattctgctgctgttattaccccattcaagttgacaactgaggcaacgcagactccagtctccaataagaaaccagtgtttgatcttaaagcaagtttgtctcgtcccctcaactatgaaccacacaaaggaaagctaaaaccatgggggcaatctaaagaaaataattatctaaatcaacatgtcaacagaattaacttctacaagaaaacttacaaacaaccccatctccagacaaaggaagagcaacggaagaaacgcgagcaagaacgaaaggagaagaaagcaaaggttttgggaatgcgaaggggcctcattttggctgaagattaataattttttaacatcttgtaaatattcctgtattctcaacttttttccttttgtaaattttttttttttgctgtcatccccactttagtcacgagatctttttctgctaactgttcatagtctgtgtagtgtccatgggttcttcatgtgctatgatctctgaaaagacgttatcaccttaaagctcaaattctttgggatggtttttacttaagtccattaacaattcaggtttctaacgagacccatcctaaaattctgtttctagatttttaatgtcaagttcccaagttccccctgctggttctaatattaacagaactgcagtcttctgctagccaatagcatttacctgatggcagctagttatgcaagcttcaggagaatttgaacaataacaagaatagggtaagctgggatagaaaggccacctcttcactctctatagaatatagtaacctttatgaaacggggccatatagtttggttatgacatcaatattttacctaggtgaaattgtttaggcttatgtaccttcgttcaaatatcctcatgtaattgccatctgtcactcactatattcacaaaaataaaactctacaactcattctaacattgcttacttaaaagctacatagccctatcgaaatgcgaggattaatgctttaatgcttttagagacagggtctcactgtgttgcccaggctggtctcaaactccaccaaatgtacttcttattcattttatggaaaagactaggctttgcttagtatcatgtccatgtttccttcacctcagtggagcttctgagttttatactgctcaagatcgtcataaataaaattttttctcattgtcaaaaaaaaattctttg

SEQ ID NO: 440660 - DNA, 1548 bp, Homo sapiens
  misc_feature (18)..(18): n is a, c, g, or t
  misc_feature (38)..(38): n is a, c, g, or t
aaaacctatacggggctntaagggttaagcgagggccncgggcggggtggttagaaagtcggccgagggaaaatggcgctgacgtgagcgcgaactcgcactgcccagagggtggccgccgcctaagctgcagccgccggagccgcagaaacaagaggccgagccgtgtcgaagatggaggagaaaccctcagggcccatcccagacatgctggccactgcagagcccagctccagtgagaccgacaaggaggtgttgtccccggctgtgccagctgcagccccttcctcctccatgtcggaggagccaggccctgagcaggcagccacaccgccagtgtgggaacgtggaggggctggagggatgcggcagggctcctccccagccccagacagctgccagcctggccccggacccagccctggcctgaccagcatagtctccgggaccagcgaggacctgcggcctcccagacgacgcccacctccagggaagcaaatcccttgctccagccctggctgctgcctcagttttcccagcgtccgtgacctggcacagcatctgcgaacccactgcccgcccacacagtccctggaaggcaagctcttccgctgctcagccctgagctgcaccgagaccttccccagcatgcaggagctggtggctcacagcaaactgcactacaaacccaatcgctacttcaagtgtgagaactgcctcctgcgcttccgcacgcaccgctcgctcttcaagcacctgcatgtttgcgcggagcatgcgcagagcccagccccgccgccacccccggccctggaccgagagccgcccgcgccggagcgccccccggaggttgaccccgcatcagcgccgggcctgccgttcccgctgctggaacccttcacgacccccgcccctgcccccaccggaccgttcctgccctacttgaaccctgcgccctttggcctaagccccccgcgcctgcgccccttcctggccgctgcacccgggccgccggcttccagcgccgccgtctggaaaaagagccaaggtgctggcagcagcccccgaagaccccagggcggctccgacgcgccctcagggcacgcggccccgagccgcatcgtgtgggagcacacacgcggccgctactcgtgcatgcagtgcgccttctccacggcctcgcggcccgccatgaccctgcacctggaggaccaccgccccggcgcccccgcggcccccgcggccgggccgccgcgccccgacgcccccgcgggtaaggccgaggaatgcgcgggtggagaggggggcgggggcccaaggcgctgaggctcaggcgcccccctcctctgccccacccagatccggccccgcttgcacccaaggtgtcgccgctgctgtcagagggggagcttccagtgttctcgcagctctgaatcccgccgctttgggggtgggccatgggatgtgggtagttttgtcatttggagggggctgcagggaaggggggctggggtggacaataaagaaggcgccatgagccagcctatg

SEQ ID NO: 440661 - DNA, 1462 bp, Homo sapiens
  misc_feature (18)..(18): n is a, c, g, or t
  misc_feature (38)..(38): n is a, c, g, or t
aaaacctatacggggctntaagggttaagcgagggccncgggcggggtggttagaaagtcggccgagggaaaatggcgctgacgtgagcgcgaactcgcactgcccagagggtggccgccgcctaagctgcagccgccggagccgcagaaacaagaggccgagccgtgtcgaagatggaggagaaaccctcagggcccatcccagacatgctggccactgcagagcccagctccagtgagaccgacaaggaggtgttgtccccggctgtgccagctgcagccccttcctcctccatgtcggaggagccaggccctgagcaggcagccacaccgccagtgtgggaacgtggaggggctggagggatgcggcagggctcctccccagccccagacagctgccagcctggccccggacccagccctggcctgaccagcatagtctccgggaccagcgaggacctgcggcctcccagacgacgcccacctccagggaagcaaatcccttgctccagccctggctgctgcctcagttttcccagcgtccgtgacctggcacagcatctgcgaacccactgcccgcccacacagtccctggaaggcaagctcttccgctgctcagccctgagctgcaccgagaccttccccagcatgcaggagctggtggctcacagcaaactgcactacaaacccaatcgctacttcaagtgtgagaactgcctcctgcgcttccgcacgcaccgctcgctcttcaagcacctgcatgtttgcgcggagcatgcgcagagcccagccccgccgccacccccggccctggaccgagagccgcccgcgccggagcgccccccggaggttgaccccgcatcagcgccgggcctgccgttcccgctgctggaacccttcacgacccccgcccctgcccccaccggaccgttcctgccctacttgaaccctgcgccctttggcctaagccccccgcgcctgcgccccttcctggccgctgcacccgggccgccggcttccagcgccgccgtctggaaaaagagccaaggtgctggcagcagcccccgaagaccccagggcggctccgacgcgccctcagggcacgcggccccgagccgcatcgtgtgggagcacacacgcggccgctactcgtgcatgcagtgcgccttctccacggcctcgcggcccgccatgaccctgcacctggaggaccaccgccccggcgcccccgcggcccccgcggccgggccgccgcgccccgacgcccccgcggatccggccccgcttgcacccaaggtgtcgccgctgctgtcagagggggagcttccagtgttctcgcagctctgaatcccgccgctttgggggtgggccatgggatgtgggtagttttgtcatttggagggggctgcagggaaggggggctggggtggacaataaagaaggcgccatgagccagcctatg

SEQ ID NO: 440662 - DNA, 1245 bp, Homo sapiens
  misc_feature (18)..(18): n is a, c, g, or t
  misc_feature (38)..(38): n is a, c, g, or t
aaaacctatacggggctntaagggttaagcgagggccncgggcggggtggttagaaagtcggccgagggaaaatggcgctgacgtgagcgcgaactcgcactgcccagagggtggccgccgcctaagctgcagccgccggagccgcagaaacaagaggccgagccgtgtcgaagatggaggagaaaccctcagggcccatcccagacatgctggccactgcagagcccagctccagtgagaccgacaaggaggtgttgtccccggctgtgccagctgcagccccttcctcctccatgtcggaggagccaggccctgagcaggcagccacaccgccagtgtgggaacgtggaggggctggagggatgcggcagggctcctccccagccccagacagctgccagcctggccccggacccagccctggcctgaccagcatagtctccgggaccagcgaggacctgcggcctcccagacgacgcccacctccagggaagcaaatcccttgctccagccctggctgctgcctcagttttcccagcgtccgtgacctggcacagcatctgcgaacccactgcccgcccacacagtccctggaaggcaagctcttccgctgctcagccctgagctgcaccgagaccttccccagcatgcaggagctggtggctcacagcaaactgcactacaaacccaatcgctacttcaagtgtgagaactgcctcctgcgcttccgcacgcaccgctcgctcttcaagcacctgcatgtttgcgcggagcatgcgcagagcccagccccgccgccacccccggccctggaccgagagccgcccgcgccggagcgccccccggaggttgaccccgcatcagcgccgggcctgccgttcccgctgctggaacccttcacgacccccgcccctgcccccaccggaccgttcctgccctacttgaaccctgcgccctttggcctaagccccccgcgcctgcgccccttcctggccgctgcacccgggccgccggcttccagcgccgccgtctggaaaaagagccaaggtgctggcagcagcccccgaagaccccagggcggctccgacgcgccctcaggtgcgtgcaggtgaccaccagggaggggtggaggggctttctttcctgcgccctgcggggtccggtggataccaggaggcagcagtgctcatccccttcccagggggcacaaatgccaccgtcccgaaatacaggatttttgcctt

SEQ ID NO: 440663 - DNA, 1235 bp, Homo sapiens
  misc_feature (18)..(18): n is a, c, g, or t
  misc_feature (38)..(38): n is a, c, g, or t
aaaacctatacggggctntaagggttaagcgagggccncgggcggggtggttagaaagtcggccgagggaaaatggcgctgacgtgagcgcgaactcgcactgcccagagggtggccgccgcctaagctgcagccgccggagccgcagaaacaagaggccgagccgtgtcgaagatgggaagcaaatcccttgctccagccctggctgctgcctcagttttcccagcgtccgtgacctggcacagcatctgcgaacccactgcccgcccacacagtccctggaaggcaagctcttccgctgctcagccctgagctgcaccgagaccttccccagcatgcaggagctggtggctcacagcaaactgcactacaaacccaatcgctacttcaagtgtgagaactgcctcctgcgcttccgcacgcaccgctcgctcttcaagcacctgcatgtttgcgcggagcatgcgcagagcccagccccgccgccacccccggccctggaccgagagccgcccgcgccggagcgccccccggaggttgaccccgcatcagcgccgggcctgccgttcccgctgctggaacccttcacgacccccgcccctgcccccaccggaccgttcctgccctacttgaaccctgcgccctttggcctaagccccccgcgcctgcgccccttcctggccgctgcacccgggccgccggcttccagcgccgccgtctggaaaaagagccaaggtgctggcagcagcccccgaagaccccagggcggctccgacgcgccctcagggcacgcggccccgagccgcatcgtgtgggagcacacacgcggccgctactcgtgcatgcagtgcgccttctccacggcctcgcggcccgccatgaccctgcacctggaggaccaccgccccggcgcccccgcggcccccgcggccgggccgccgcgccccgacgcccccgcgggtaaggccgaggaatgcgcgggtggagaggggggcgggggcccaaggcgctgaggctcaggcgcccccctcctctgccccacccagatccggccccgcttgcacccaaggtgtcgccgctgctgtcagagggggagcttccagtgttctcgcagctctgaatcccgccgctttgggggtgggccatgggatgtgggtagttttgtcatttggagggggctgcagggaaggggggctggggtggacaataaagaaggcgccatgagccagcctatg

SEQ ID NO: 440664 - DNA, 2421 bp, Homo sapiens
gcaggctgtacggtcgggattttggaaaatggcgctgacgtgagcgcgaactcgcactgcccagagggtggccgccgcctaagctgcagccgccggagccgcagaaacaagaggccgagccgtgtcgaagatggtgagcgcggcaccggggtcgcgggcgcggcggagctgcggggactggcggggagcggccctgtcgcgcctacagcctccggccgaccccgcccccacatccgggcacccgtccgccgctggctgtcactcggagagcgccctacttccgggcccggcccggaatggaccacgcccgtcaggctaggactccgcccctaaacttcttacatccgggcccccagcacctccaagattgtccacactgctcgaggccggccggtctcggtcctcagacaatccatgtctagctcctctagcatcttcccagtccatgcctgcccatagccccgcctccgtagccttggccccgcccactccctctaggccacgcttgtgtgcatactggggctcccacctatcctagttgaggagagcagatgtttctcccgtatgcataaggagctcaatccgggccagtgcagtggctgacgactctaatcccagcactttgggaggctgaggcaggaggatcacttgagaccaggggttcaagaccagtgagggcaacatggcgagaccccatctttataaaaagaaaaaaagagcttagtccacccttacgtattcccctatcctctcctgctggtgattccttaggatgggggccgactgggttgacccagagcccagaagggttctctccgcctcttccttccaccaggaggagaaaccctcagggcccatcccagacatgctggccactgcagagcccagctccagtgagaccgacaaggaggtgttgtccccggctgtgccagctgcagccccttcctcctccatgtcggaggagccaggccctgagcaggcagccacaccgccagtgtgggaacgtggaggggctggagggatgcggcagggctcctccccagccccagacagctgccagcctggccccggacccagccctggcctgaccagcatagtctccgggaccagcgaggacctgcggcctcccagacgacgcccacctccagggaagcaaatcccttgctccagccctggctgctgcctcagttttcccagcgtccgtgacctggcacagcatctgcgaacccactgcccgcccacacagtccctggaaggcaagctcttccgctgctcagccctgagctgcaccgagaccttccccagcatgcaggagctggtggctcacagcaaactgcactacaaacccaatcgctacttcaagtgagaccctgacctcttgagcccgccctcaactccctggatggggcggggcatacgtgggcgtggccccacccagccaggctttacctcccaagtggaaaaccggccgcctaacttaaaattgagacttctttccgggtttccccgggtttccccaggttcccacccgaagtggtcaggaagggtcgctgccacagttgtacaggagcggggaggtgtgagaactgcctcctgcgcttccgcacgcaccgctcgctcttcaagcacctgcatgtttgcgcggagcatgcgcagagcccagccccgccgccacccccggccctggaccgagagccgcccgcgccggagcgccccccggaggttgaccccgcatcagcgccgggcctgccgttcccgctgctggaacccttcacgacccccgcccctgcccccaccggaccgttcctgccctacttgaaccctgcgccctttggcctaagccccccgcgcctgcgccccttcctggccgctgcacccgggccgccggcttccagcgccgccgtctggaaaaagagccaaggtgctggcagcagcccccgaagaccccagggcggctccgacgcgccctcagggcacgcggccccgagccgcatcgtgtgggagcacacacgcggccgctactcgtgcatgcagtgcgccttctccacggcctcgcggcccgccatgaccctgcacctggaggaccaccgccccggcgcccccgcggcccccgcggccgggccgccgcgccccgacgcccccgcgggtaaggccgaggaatgcgcgggtggagaggggggcgggggcccaaggcgctgaggctcaggcgcccccctcctctgccccacccagatccggccccgcttgcacccaaggtgtcgccgctgctgtcagagggggagcttccagtgttctcgcagctctgaatcccgccgctttgggggtgggccatgggatgtgggtagttttgtcatttggagggggctgcagggaaggggggctggggtggacaataaagaaggcgccatgagccagcctatg

SEQ ID NO: 440665 - DNA, 1473 bp, Homo sapiens
  misc_feature (18)..(18): n is a, c, g, or t
  misc_feature (38)..(38): n is a, c, g, or t
aaaacctatacggggctntaagggttaagcgagggccncgggcggggtggttagaaagtcggccgagggaaaatggcgctgacgtgagcgcgaactcgcactgcccagagggtggccgccgcctaagctgcagccgccggagccgcagaaacaagaggccgagccgtgtcgaagatggaggagaaaccctcagggcccatcccagacatgctggccactgcagagcccagctccagtgagaccgacaaggaggtgttgtccccggctgtgccagctgcagccccttcctcctccatgtcggaggagccaggccctgagcaggcagccacaccgccagtgtgggaacgtggaggggctggagggatgcggcagggctcctccccagccccagacagctgccagcctggccccggacccagccctggcctgaccagcatagtctccgggaccagcgaggacctgcggcctcccagacgacgcccacctccagggaagcaaatcccttgctccagccctggctgctgcctcagttttcccagcgtccgtgacctggcacagcatctgcgaacccactgcccgcccacacagtccctggaaggcaagctcttccgctgctcagccctgagctgcaccgagaccttccccagcatgcaggagctggtggctcacagcaaactgcactacaaacccaatcgctacttcaagtgtgagaactgcctcctgcgcttccgcacgcaccgctcgctcttcaagcacctgcatgtttgcgcggagcatgcgcagagcccagccccgccgccacccccggccctggaccgagagccgcccgcgccggagcgccccccggaggttgaccccgcatcagcgccgggcctgccgttcccgctgctggaacccttcacgacccgccccttcctggccgctgcacccgggccgccggcttccagcgccgccgtctggaaaaagagccaaggtgctggcagcagcccccgaagaccccagggcggctccgacgcgccctcagggcacgcggccccgagccgcatcgtgtgggagcacacacgcggccgctactcgtgcatgcagtgcgccttctccacggcctcgcggcccgccatgaccctgcacctggaggaccaccgccccggcgcccccgcggcccccgcggccgggccgccgcgccccgacgcccccgcgggtaaggccgaggaatgcgcgggtggagaggggggcgggggcccaaggcgctgaggctcaggcgcccccctcctctgccccacccagatccggccccgcttgcacccaaggtgtcgccgctgctgtcagagggggagcttccagtgttctcgcagctctgaatcccgccgctttgggggtgggccatgggatgtgggtagttttgtcatttggagggggctgcagggaaggggggctggggtggacaataaagaaggcgccatgagccagcctatg

SEQ ID NO: 440666 - DNA, 1628 bp, Homo sapiens
  misc_feature (18)..(18): n is a, c, g, or t
  misc_feature (38)..(38): n is a, c, g, or t
aaaacctatacggggctntaagggttaagcgagggccncgggcggggtggttagaaagtcggccgagggaaaatggcgctgacgtgagcgcgaactcgcactgcccagagggtggccgccgcctaagctgcagccgccggagccgcagaaacaagaggccgagccgtgtcgaagatggaggagaaaccctcagggcccatcccagacatgctggccactgcagagcccagctccagtgagaccgacaaggaggtgttgtccccggctgtgccagctgcagccccttcctcctccatgtcggaggagccaggccctgagcaggcagccacaccgccagtgtgggaacgtggaggggctggagggatgcggcagggctcctccccagccccagacagctgccagcctggccccggacccagccctggcctgaccagcatagtctccgggaccagcgaggacctgcggcctcccagacgacgcccacctccagggaagcaaatcccttgctccagccctggctgctgcctcagttttcccagcgtccgtgacctggcacagcatctgcgaacccactgcccgcccacacagtccctggaaggcaagctcttccgctgctcagccctgagctgcaccgagaccttccccagcatgcaggagctggtggctcacagcaaactgcactacaaacccaatcgctacttcaagtgtgagaactgcctcctgcgcttccgcacgcaccgctcgctcttcaagcacctgcatgtttgcgcggagcatgcgcagagcccagccccgccgccacccccggccctggaccgagagccgcccgcgccggagcgccccccggaggttgaccccgcatcagcgccgggcctgccgttcccgctgctggaacccttcacgacccccgcccctgcccccaccggaccgttcctgccctacttgaaccctgcgccctttggcctaagccccccgcgcctgcgccccttcctggccgctgcacccgggccgccggcttccagcgccgccgtctggaaaaagagccaaggtgagtgtggggtcgggggcctccaggagggcgggctgggctcgccctgactctgaacttgacccgcccctttaccgcaggtgctggcagcagcccccgaagaccccagggcggctccgacgcgccctcagggcacgcggccccgagccgcatcgtgtgggagcacacacgcggccgctactcgtgcatgcagtgcgccttctccacggcctcgcggcccgccatgaccctgcacctggaggaccaccgccccggcgcccccgcggcccccgcggccgggccgccgcgccccgacgcccccgcgggtaaggccgaggaatgcgcgggtggagaggggggcgggggcccaaggcgctgaggctcaggcgcccccctcctctgccccacccagatccggccccgcttgcacccaaggtgtcgccgctgctgtcagagggggagcttccagtgttctcgcagctctgaatcccgccgctttgggggtgggccatgggatgtgggtagttttgtcatttggagggggctgcagggaaggggggctggggtggacaataaagaaggcgccatgagccagcctatg

SEQ ID NO: 440667 - DNA, 2225 bp, Homo sapiens
gcaggctgtacggtcgggattttggaaaatggcgctgacgtgagcgcgaactcgcactgcccagagggtggccgccgcctaagctgcagccgccggagccgcagaaacaagaggccgagccgtgtcgaagatggtgagcgcggcaccggggtcgcgggcgcggcggagctgcggggactggcggggagcggccctgtcgcgcctacagcctccggccgaccccgcccccacatccgggcacccgtccgccgctggctgtcactcggagagcgccctacttccgggcccggcccggaatggaccacgcccgtcaggctaggactccgcccctaaacttcttacatccgggcccccagcacctccaagattgtccacactgctcgaggccggccggtctcggtcctcagacaatccatgtctagctcctctagcatcttcccagtccatgcctgcccatagccccgcctccgtagccttggccccgcccactccctctaggccacgcttgtgtgcatactggggctcccacctatcctagttgaggagagcagatgtttctcccgtatgcataaggagctcaatccgggccagtgcagtggctgacgactctaatcccagcactttgggaggctgaggcaggaggatcacttgagaccaggggttcaagaccagtgagggcaacatggcgagaccccatctttataaaaagaaaaaaagagcttagtccacccttacgtattcccctatcctctcctgctggtgattccttaggatgggggccgactgggttgacccagagcccagaagggttctctccgcctcttccttccaccaggaggagaaaccctcagggcccatcccagacatgctggccactgcagagcccagctccagtgagaccgacaaggaggtgttgtccccggctgtgccagctgcagccccttcctcctccatgtcggaggagccaggccctgagcaggcagccacaccgccagtgtgggaacgtggaggggctggagggatgcggcagggctcctccccagccccagacagctgccagcctggccccggacccagccctggcctgaccagcatagtctccgggaccagcgaggacctgcggcctcccagacgacgcccacctccagggaagcaaatcccttgctccagccctggctgctgcctcagttttcccagcgtccgtgacctggcacagcatctgcgaacccactgcccgcccacacagtccctggaaggcaagctcttccgctgctcagccctgagctgcaccgagaccttccccagcatgcaggagctggtggctcacagcaaactgcactacaaacccaatcgctacttcaagtgagaccctgacctcttgagcccgccctcaactccctggatggggcggggcatacgtgggcgtggccccacccagccaggctttacctcccaagtggaaaaccggccgcctaacttaaaattgagacttctttccgggtttccccgggtttccccaggttcccacccgaagtggtcaggaagggtcgctgccgttcccgctgctggaacccttcacgacccccgcccctgcccccaccggaccgttcctgccctacttgaaccctgcgccctttggcctaagccccccgcgcctgcgccccttcctggccgctgcacccgggccgccggcttccagcgccgccgtctggaaaaagagccaaggtgctggcagcagcccccgaagaccccagggcggctccgacgcgccctcagggcacgcggccccgagccgcatcgtgtgggagcacacacgcggccgctactcgtgcatgcagtgcgccttctccacggcctcgcggcccgccatgaccctgcacctggaggaccaccgccccggcgcccccgcggcccccgcggccgggccgccgcgccccgacgcccccgcgggtaaggccgaggaatgcgcgggtggagaggggggcgggggcccaaggcgctgaggctcaggcgcccccctcctctgccccacccagatccggccccgcttgcacccaaggtgtcgccgctgctgtcagagggggagcttccagtgttctcgcagctctgaatcccgccgctttgggggtgggccatgggatgtgggtagttttgtcatttggagggggctgcagggaaggggggctggggtggacaataaagaaggcgccatgagccagcctatg

SEQ ID NO: 440668 - DNA, 2206 bp, Homo sapiens
gcaggctgtacggtcgggattttggaaaatggcgctgacgtgagcgcgaactcgcactgcccagagggtggccgccgcctaagctgcagccgccggagccgcagaaacaagaggccgagccgtgtcgaagatggtgagcgcggcaccggggtcgcgggcgcggcggagctgcggggactggcggggagcggccctgtcgcgcctacagcctccggccgaccccgcccccacatccgggcacccgtccgccgctggctgtcactcggagagcgccctacttccgggcccggcccggaatggaccacgcccgtcaggctaggactccgcccctaaacttcttacatccgggcccccagcacctccaagattgtccacactgctcgaggccggccggtctcggtcctcagacaatccatgtctagctcctctagcatcttcccagtccatgcctgcccatagccccgcctccgtagccttggccccgcccactccctctaggccacgcttgtgtgcatactggggctcccacctatcctagttgaggagagcagatgtttctcccgtatgcataaggagctcaatccgggccagtgcagtggctgacgactctaatcccagcactttgggaggctgaggcaggaggatcacttgagaccaggggttcaagaccagtgagggcaacatggcgagaccccatctttataaaaagaaaaaaagagcttagtccacccttacgtattcccctatcctctcctgctggtgattccttaggatgggggccgactgggttgacccagagcccagaagggttctctccgcctcttccttccaccaggaggagaaaccctcagggcccatcccagacatgctggccactgcagagcccagctccagtgagaccgacaaggaggtgttgtccccggctgtgccagctgcagccccttcctcctccatgtcggaggagccaggccctgagcaggcagccacaccgccagtgtgggaacgtggaggggctggagggatgcggcagggctcctccccagccccagacagctgccagcctggccccggacccagccctggcctgaccagcatagtctccgggaccagcgaggacctgcggcctcccagacgacgcccacctccagggaagcaaatcccttgctccagccctggctgctgcctcagttttcccagcgtccgtgacctggcacagcatctgcgaacccactgcccgcccacacagtccctggaaggcaagctcttccgctgctcagccctgagctgcaccgagaccttccccagcatgcaggagctggtggctcacagcaaactgcactacaaacccaatcgctacttcaagtgtgagaactgcctcctgcgcttccgcacgcaccgctcgctcttcaagcacctgcatgtttgcgcggagcatgcgcagagcccagccccgccgccacccccggccctggaccgagagccgcccgcgccggagcgccccccggaggttgaccccgcatcagcgccgggcctgccgttcccgctgctggaacccttcacgacccccgcccctgcccccaccggaccgttcctgccctacttgaaccctgcgccctttggcctaagccccccgcgcctgcgccccttcctggccgctgcacccgggccgccggcttccagcgccgccgtctggaaaaagagccaaggtgctggcagcagcccccgaagaccccagggcggctccgacgcgccctcagggcacgcggccccgagccgcatcgtgtgggagcacacacgcggccgctactcgtgcatgcagtgcgccttctccacggcctcgcggcccgccatgaccctgcacctggaggaccaccgccccggcgcccccgcggcccccgcggccgggccgccgcgccccgacgcccccgcgggtaaggccgaggaatgcgcgggtggagaggggggcgggggcccaaggcgctgaggctcaggcgcccccctcctctgccccacccagatccggccccgcttgcacccaaggtgtcgccgctgctgtcagagggggagcttccagtgttctcgcagctctgaatcccgccgctttgggggtgggccatgggatgtgggtagttttgtcatttggagggggctgcagggaaggggggctggggtggacaataaagaaggcgccatgagccagcctatg

SEQ ID NO: 440669 - DNA, 1729 bp, Homo sapiens
  misc_feature (18)..(18): n is a, c, g, or t
  misc_feature (38)..(38): n is a, c, g, or t
aaaacctatacggggctntaagggttaagcgagggccncgggcggggtggttagaaagtcggccgagggaaaatggcgctgacgtgagcgcgaactcgcactgcccagagggtggccgccgcctaagctgcagccgccggagccgcagaaacaagaggccgagccgtgtcgaagatggtgagcgcggcaccggggtcgcgggcgcggcggagctgcggggactggcggggagcggccctgtcgcgcctacagcctccggccgaccccgcccccacatccgggcacccgtccgccgctggctgtcactcggagagcgccctacttccgggcccggcccggaatggaccacgcccgtcaggaggagaaaccctcagggcccatcccagacatgctggccactgcagagcccagctccagtgagaccgacaaggaggtgttgtccccggctgtgccagctgcagccccttcctcctccatgtcggaggagccaggccctgagcaggcagccacaccgccagtgtgggaacgtggaggggctggagggatgcggcagggctcctccccagccccagacagctgccagcctggccccggacccagccctggcctgaccagcatagtctccgggaccagcgaggacctgcggcctcccagacgacgcccacctccagggaagcaaatcccttgctccagccctggctgctgcctcagttttcccagcgtccgtgacctggcacagcatctgcgaacccactgcccgcccacacagtccctggaaggcaagctcttccgctgctcagccctgagctgcaccgagaccttccccagcatgcaggagctggtggctcacagcaaactgcactacaaacccaatcgctacttcaagtgtgagaactgcctcctgcgcttccgcacgcaccgctcgctcttcaagcacctgcatgtttgcgcggagcatgcgcagagcccagccccgccgccacccccggccctggaccgagagccgcccgcgccggagcgccccccggaggttgaccccgcatcagcgccgggcctgccgttcccgctgctggaacccttcacgacccccgcccctgcccccaccggaccgttcctgccctacttgaaccctgcgccctttggcctaagccccccgcgcctgcgccccttcctggccgctgcacccgggccgccggcttccagcgccgccgtctggaaaaagagccaaggtgctggcagcagcccccgaagaccccagggcggctccgacgcgccctcagggcacgcggccccgagccgcatcgtgtgggagcacacacgcggccgctactcgtgcatgcagtgcgccttctccacggcctcgcggcccgccatgaccctgcacctggaggaccaccgccccggcgcccccgcggcccccgcggccgggccgccgcgccccgacgcccccgcgggtaaggccgaggaatgcgcgggtggagaggggggcgggggcccaaggcgctgaggctcaggcgcccccctcctctgccccacccagatccggccccgcttgcacccaaggtgtcgccgctgctgtcagagggggagcttccagtgttctcgcagctctgaatcccgccgctttgggggtgggccatgggatgtgggtagttttgtcatttggagggggctgcagggaaggggggctggggtggacaataaagaaggcgccatgagccagcctatg

SEQ ID NO: 440670 - DNA, 2009 bp, Homo sapiens
  misc_feature (18)..(18): n is a, c, g, or t
  misc_feature (38)..(38): n is a, c, g, or t
aaaacctatacggggctntaagggttaagcgagggccncgggcggggtggttagaaagtcggccgagggaaaatggcgctgacgtgagcgcgaactcgcactgcccagagggtggccgccgcctaagctgcagccgccggagccgcagaaacaagaggccgagccgtgtcgaagatggaggagaaaccctcagggcccatcccagacatgctggccactgcagagcccagctccagtgagaccgacaaggaggtgttgtccccggctgtgccagctgcagccccttcctcctccatgtcggaggagccaggccctgagcaggcagccacaccgccagtgtgggaacgtggaggggctggagggatgcggcagggctcctccccagccccagacagctgccagcctggccccggacccagccctggcctgaccagcatagtctccgggaccagcgaggacctgcggcctcccagacgacgcccacctccagggaagcaaatcccttgctccagccctggctgctgcctcagttttcccagcgtccgtgacctggcacagcatctgcgaacccactgcccgcccacacagtccctggaaggcaagctcttccgctgctcagccctgagctgcaccgagaccttccccagcatgcaggagctggtggctcacagcaaactgcactacaaacccaatcgctacttcaagtgtgagaactgcctcctgcgcttccgcacgcaccgctcgctcttcaagcacctgcatgtttgcgcggagcatgcgcagagcccagccccgccgccacccccggccctggaccgagagccgcccgcgccggagcgccccccggaggttgaccccgcatcagcgccgggcctgccgttcccgctgctggaacccttcacgacccccgcccctgcccccaccggaccgttcctgccctacttgaaccctgcgccctttggcctaagccccccgcgcctgcgccccttcctggccgctgcacccgggccgccggcttccagcgccgccgtctggaaaaagagccaaggtgctggcagcagcccccgaagaccccagggcggctccgacgcgccctcaggtgcgtgcaggtgaccaccagggaggggtggaggggctttctttcctgcgccctgcggggtccggtggataccaggaggcagcagtgctcatccccttcccagggggcacaaatgccaccgtcccgaaatacaggatttttgccttaaaaatgactggcacctgcgccttcatctgcgccggcgttcccgtataaaccttgcgcccctttcaccgttcacctcggagcgggcttctccccaacagtgaatctggggatgatagtaggggacgcggagaagccaagttgggtgcccccaactctaggggcagacagacccgggagaaactgaactaggcgcccggaagctgatggggggcgggaaaaagtcccacccaccctcgccggcgtcctccatccttggcgcacgggtcttctgggctgggggagcccgggactgacggggtcccgcctgcccgcagggcacgcggccccgagccgcatcgtgtgggagcacacacgcggccgctactcgtgcatgcagtgcgccttctccacggcctcgcggcccgccatgaccctgcacctggaggaccaccgccccggcgcccccgcggcccccgcggccgggccgccgcgccccgacgcccccgcgggtaaggccgaggaatgcgcgggtggagaggggggcgggggcccaaggcgctgaggctcaggcgcccccctcctctgccccacccagatccggccccgcttgcacccaaggtgtcgccgctgctgtcagagggggagcttccagtgttctcgcagctctgaatcccgccgctttgggggtgggccatgggatgtgggtagttttgtcatttggagggggctgcagggaaggggggctggggtggacaataaagaaggcgccatgagccagcctatg

SEQ ID NO: 440671 - DNA, 1500 bp, Homo sapiens
  misc_feature (18)..(18): n is a, c, g, or t
  misc_feature (38)..(38): n is a, c, g, or t
aaaacctatacggggctntaagggttaagcgagggccncgggcggggtggttagaaagtcggccgagggaaaatggcgctgacgtgagcgcgaactcgcactgcccagagggtggccgccgcctaagctgcagccgccggagccgcagaaacaagaggccgagccgtgtcgaagatggaggagaaaccctcagggcccatcccagacatgctggccactgcagagcccagctccagtgagaccgacaaggaggtgttgtccccggctgtgccagctgcagccccttcctcctccatgtcggaggagccaggccctgagcaggcagccacaccgccagtgtgggaacgtggaggggctggagggatgcggcagggctcctccccagccccagacagctgccagcctggccccggacccagccctggcctgaccagcatagtctccgggaccagcgaggacctgcggcctcccagacgacgcccacctccagggaagcaaatcccttgctccagccctggctgctgcctcagttttcccagcgtccgtgacctggcacagcatctgcgaacccactgcccgcccacacagtccctggaaggcaagctcttccgctgctcagccctgagctgcaccgagaccttccccagcatgcaggagctggtggctcacagcaaactgcactacaaacccaatcgctacttcaagtgtgagaactgcctcctgcgcttccgcacgcaccgctcgctcttcaagcacctgcatgtttgcgcggagcatgcgcagagcccagccccgccgccacccccggccctggaccgagagccgcccgcgccggagcgccccccggaggttgaccccgcatcagcgccgggcctgccgttcccgctgctggaacccttcacgacccccgcccctgcccccaccggaccgttccgccccttcctggccgctgcacccgggccgccggcttccagcgccgccgtctggaaaaagagccaaggtgctggcagcagcccccgaagaccccagggcggctccgacgcgccctcagggcacgcggccccgagccgcatcgtgtgggagcacacacgcggccgctactcgtgcatgcagtgcgccttctccacggcctcgcggcccgccatgaccctgcacctggaggaccaccgccccggcgcccccgcggcccccgcggccgggccgccgcgccccgacgcccccgcgggtaaggccgaggaatgcgcgggtggagaggggggcgggggcccaaggcgctgaggctcaggcgcccccctcctctgccccacccagatccggccccgcttgcacccaaggtgtcgccgctgctgtcagagggggagcttccagtgttctcgcagctctgaatcccgccgctttgggggtgggccatgggatgtgggtagttttgtcatttggagggggctgcagggaaggggggctggggtggacaataaagaaggcgccatgagccagcctatg

SEQ ID NO: 440672 - DNA, 891 bp, Homo sapiens
ggtccccctggaggcccagcccagcccaggcctctgcccacctccaggtgtgagaactgcctcctgcgcttccgcacgcaccgctcgctcttcaagcacctgcatgtttgcgcggagcatgcgcagagcccagccccgccgccacccccggccctggaccgagagccgcccgcgccggagcgccccccggaggttgaccccgcatcagcgccgggcctgccgttcccgctgctggaacccttcacgacccccgcccctgcccccaccggaccgttcctgccctacttgaaccctgcgccctttggcctaagccccccgcgcctgcgccccttcctggccgctgcacccgggccgccggcttccagcgccgccgtctggaaaaagagccaaggtgctggcagcagcccccgaagaccccagggcggctccgacgcgccctcagggcacgcggccccgagccgcatcgtgtgggagcacacacgcggccgctactcgtgcatgcagtgcgccttctccacggcctcgcggcccgccatgaccctgcacctggaggaccaccgccccggcgcccccgcggcccccgcggccgggccgccgcgccccgacgcccccgcgggtaaggccgaggaatgcgcgggtggagaggggggcgggggcccaaggcgctgaggctcaggcgcccccctcctctgccccacccagatccggccccgcttgcacccaaggtgtcgccgctgctgtcagagggggagcttccagtgttctcgcagctctgaatcccgccgctttgggggtgggccatgggatgtgggtagttttgtcatttggagggggctgcagggaaggggggctggggtggacaataaagaaggcgccatgagccagcctatg

SEQ ID NO: 440673 - DNA, 1324 bp, Homo sapiens
  misc_feature (559)..(559): n is a, c, g, or t
aaaaagtaatggtaatacatgtttcttgtgaagggaaaataaacaaggtccagttttattttactagatagcaaataaaaaaaaaaagagggattagtgatttcagtcttttagaaatggttggcatctctctgccttagttcttacctcacttgtaaaggattgagttcttccttaatgttttctcctggtatgagaatgtggttatattctttcttaggtaattgatatgaatctaacctagtttttttttttgtttttttttagttactttaagttgaaatgtaaaggagcagttggttctgtacatttccaagcttctctgtaataattgatcattacaatgatgaccctaaagcatcaggaaaatactgtatactatatgctcagagatatatatatgtatatatatatatatatttgatggagtctcactgtcgaccaggctggagtgcagtggtgtagtctaggctcactgcaacttctgcctccccgggtttaagtgattctcctgcgtcaccctcttgagtagctgggactacaggtgtgcaccaccacncccagctaatttttgtgtttttagtagagatggggtttcaccatgttggccaggctggtcttgaactcctgacttcaagtgatccactggccttggcctcccaagtctgggatttcaggtgtgagtcactgcacccggcctatttttctaaaaaaaaaaaaaaaaagaaaaaaaaatctggaaagagggagctgccttacatttcagtctatatttattagactcctaatgtacatttctctctcactttctttattttgaaaaacaaagtactattcagtaaagagcctgaaactgcttcagtccaagctgattttgaatgcataaagatttacttgttggattcagtaaaaaaggaataagaaaaacttactatatagtaatttttcctaggtatatgacctcaaaattgtgcttagatgccattgaaatagatgttcatgttttccattccactcaacaaatatcacttaaaaacagtacagttggtgatttcttacagaaatcataaatatgtactgcggagtgaaaaaaccaactacttaactatgatgaaatgggaacttttggttaaatttgtagggataggccaggtgcagtggctcatgcgtgtaatcccagaactttgggaagccaaggcgggcagatcacctgaggtcaggctggtcttgaactcctgacttcaagtgatccactggccttggcctccctagtctgggatttcaggtgtgagtcactgcacccggcctatttttctaaaaaaag

SEQ ID NO: 440674 - DNA, 1444 bp, Homo sapiens
attgacctcaaaattgtgcttagatgccattgaaatagatgttcatgttttccattccactcaacaaatatcacttaaaaacagtacagttggtgatttcttacagaaatcataaatatgtactgcggagtgaaaaaaccaactacttaactatgatgaaatgggaacttttggttaaatttgtagggataggccaggtgcagtggctcatgcgtgtaatcccagaactttgggaagccaaggctggtcttgaactcctgacttcaagtgatccactggccttggcctcccaagtctgggatttcaggtgtgagtcactgcacccggcctatttttctaaaaaaaaaaaaaaaaagaaaaaaaaatctggaaagagggagctgccttacatttcagtctatatttattagactcctaatgtacatttctctctcactttctttattttgaaaaacaaagtactattcagtaaagagcctgaaactgcttcagtccaagctgattttgaatgcataaagatttacttgttggattcagtaaaaaaggaataagaaaaacttactatatagtaatttttcctaggtatatgacctcaaaattgtgcttagatgccattgaaatagatgttcatgttttccattccactcaacaaatatcacttaaaaacagtacagttggtgatttcttacagaaatcataaatatgtactgcggagtgaaaaaaccaactacttaactatgatgaaatgggaacttttggttaaatttgtagggataggccaggtgcagtggctcatgcgtgtaatcccagaactttgggaagccaaggcgggcagatcacctgaggtcaggagttcgacaccagcctggccaacatggtgaaacccggtctctactaaaaatacaaagataagctgggcatgatggcggatgcctgtaatcccagctgctcgggaggctgaggcaggagaatcccttgaacccgggaggcgaaggttgcagtgagccgagttcacgccactgcattccagcctgggcgacagaacaagactccatctcaaaaaaaaaaaaaaaaaaaaaattacagggataaatttgcagtggtaacattttacacatatgcaaaaagtgctgtatctcaaacagtttaggtggaaatgagtatgatttgctttcagaatgtgtgttaggtgactcagaaagtgacttcaatgataaggaatgcactggtttcgaatatatgcataaagattttgaatgaaggtgttttgtgaaacgttaagtaaggtaggagaaaaatcagtattttgaaattatgatttattattttaagcctcctaaattaatttgcatttcagaagtaaacatctggtgtttggtctatatctctaaaagtgtatagtcaagttggtcagaaaacattgtttttatgttcttattagaaa

SEQ ID NO: 440675 - DNA, 1047 bp, Homo sapiens
gcacaggagggcgggctaaagaggtcgcggtcgcacgcgcagttggtccttagtactgcggccgtgtgggtgagttggctgccggtgagttgggtgccggtggagtcgtgttggtcctcagaatccccgcgtagccgctgcctcctcctaccctcgccatgtttcttacccggtctgagtacgacaggggcgtgaatactttttctcccgaaggaagattatttcaagtggaatatgccattgaggctatcaagcttggttctacagccattgggatccagacatcagagggtgtgtgcctagctgtggagaagagaattacttccccactgatggagcccagcagcattgagaaaattgtagagattgatgctcacataggttgtgccatgagtgggctaattgctgatgctaagactttaattgataaagccagagtggagacacagaaccactggttcacctacaatgagacaatgacagtggagagtgtgacccaagctgtgtccaatctggctttgcagtttggagaagaagatgcagatccaggtgccatgtctcgtccctttggagtagcattattatttggaggagttgatgagaaaggaccccagctgtttcatatggacccatctgggacctttgtacagtgtgatgctcgagcaattggctctgcttcagagggtgcccagagctccttgcaagaagtttaccacaagtctatgactttgaaagaagccatcaagtcttcactcatcatcctcaaacaagtaatggaggagaagctgaatgcaacaaacattgagctagccacagtgcagcctggccagaatttccacatgttcacaaaggaagaacttgaagaggttatcaaggacatttaaggaatcctgatcctcagaacttctctgggacaatttcagttctaataatgtccttaaattttatttccagctcctgttccttggaaaatctccattgtatgtgcattttttaaatgatgtctgtacataaaggcagttctgaaataaagaaaattttaaaata

SEQ ID NO: 440676 - DNA, 821 bp, Homo sapiens
gcacaggagggcgggctaaagaggtcgcggtcgcacgcgcagttggtccttagtactgcggccgtgtgggtgagttggctgccggtgagttgggtgccggtggagtcgtgttggtcctcagaatccccgcgtagccgctgcctcctcctaccctcgccatgtttcttacccggtctgagtacgacaggggcgtgaatactttttctcccgaaggaagattatttcaagtggaatatgccattgaggctatcaagcttggttctacagccattgggatccagacatcagagggtgtgtgcctagctgtggagaagagaattacttccccactgatggagcccagcagcattgagaaaattgtagagattgatgctcacataggttgtgccatgagtgggctaattgctgatgctaagactttaattgataaagccagagtggagacacagaaccactggttcacctacaatgagacaatgacagtggagagtgtgacccaagctgtgtccaatctggctttgcagtttggagaagaagatgcagatccaggtgccatgtctcgtccctttggagtagcattattatttggaggagttgatgagaaaggaccccagctgtttcatatggacccatctgggacctttgtacagtgtgatgctcgagcaattggctctgcttcagagggtgcccagagctccttgcaagaagtttaccacaaggctttgattttgaaaaaagcctcaagggtttccttattattcctaaacagtaagggggggggctgatgcacctttgtgttaccccacgggagccggcctttc

SEQ ID NO: 440677 - DNA, 729 bp, Homo sapiens
  misc_feature (623)..(623): n is a, c, g, or t
gcacaggagggcgggctaaagaggtcgcggtcgcacgcgcagttggtccttagtactgcggccgtgtgggtgagttggctgccggtgagttgggtgccggtggagtcgtgttggtcctcagaatccccgcgtagccgctgcctcctcctaccctcgccatgtttcttacccggtctgagtacgacaggggcgtgaatactttttctcccgaaggaagattatttcaagtggaatatgccattgaggctatcaagcttggttctacagccattgggatccagacatcagagggtgtgtgcctagctgtggagaagagaattacttccccactgatggagcccagcagcattgagaaaattgtagagattgatgctcacataggttgtgccatgagtgggctaattgctgatgctaagactttaattgataaagccagagtggagacacaggtaaaattggcattatctcccttattagaaggttgtaccatgctttgctcttcttctagaaccactggttcacctacaatgagacaatgacagtggagagtgtgacccaagctgtgtccaatctggctttgcagtttggagaagaagatgcagatccaggtgccatgtctcggnccctttgagaggcatattattttgaggaggtgtgagagaagagcccactgtttcatatgggaccatcttggaacttttgcagtgggtgcttcagctggtcttgttt

SEQ ID NO: 440678 - DNA, 635 bp, Homo sapiens
cacacacaagctcaacttttaagtatttaaatatacttcaaatatatttctaaaggagtctttaacagaaaaaagtactgactccatgtactttgctgctgcttttgtgatccctgttgaagtgacttcaagaagtgacaatgatgccaggcatttggttaagtatgatgtggtgagttaaccttaaaatagaaaatttggtcaataagcatttttattttggagccagagagctattttagggacctgctgcctggaaaggatatccttgggacagcagatcccttagttcctaatgaatagctgcatcaccaacacagcttctcctgaccatggtagggccatcagcagggtaactcagcccagcttattaacccttctgttttctttccagctagccacagtgcagcctggccagaatttccacatgttcacaaaggaagaacttgaagaggttatcaaggacatttaaggaatcctgatcctcagaacttctctgggacaatttcagttctaataatgtccttaaattttatttccagctcctgttccttggaaaatctccattgtatgtgcattttttaaatgatgtctgtacataaaggcagttctgaaataaagaaaattttaaaata

SEQ ID NO: 440679 - DNA, 532 bp, Homo sapiens
gtttgggggttttttttcctgaaaaaatgtattctacttatttgccatttacttgagttctggagatacttgtaatgcaccatactaagtaagatgtttgacatacttgctaaatacttttttcagtgagataaagggaaaatcttgaaggaaggacggattgtgcataattaataggcatcttcttgccttctttgtttcaagtctatgactttgaaagaagccatcaagtcttcactcatcatcctcaaacaagtaatggaggagaagctgaatgcaacaaacattgagctagccacagtgcagcctggccagaatttccacatgttcacaaaggaagaacttgaagaggttatcaaggacatttaaggaatcctgatcctcagaacttctctgggacaatttcagttctaataatgtccttaaattttatttccagctcctgttccttggaaaatctccattgtatgtgcattttttaaatgatgtctgtacataaaggcagttctgaaataaagaaaattttaaaata

SEQ ID NO: 440680 - DNA, 555 bp, Homo sapiens
gtttgggggttttttttcctgaaaaaatgtattctacttatttgccatttacttgagttctggagatacttgtaatgcaccatactaagtaagatgtttgacatacttgctaaatacttttttcagtgagataaagggaaaatcttgaaggaaggacggattgtgcataattaataggcatcttcttgccttctttgtttcaagtctatgactttgaaagaagccatcaagtcttcactcatcatcctcaaacaagtaatggaggagaagctgaatgcaacaaacattgagctagccacagtgcagcctggccagaatttccacatgttcacaaaggaagaacttgaagaggttatcaaggacatttaaggaatcctgatcctcagaacttctctgggacaatttcagttctaataatgtccttaaattttatttccagctcctgttccttggaaaatctccattgtatgtgcattttttaaatgatgtctgtacataaaggcagttctgaaataaagaaaattttaaaataatatttgttaatagactgttctc

SEQ ID NO: 440681 - DNA, 408 bp, Homo sapiens
cacacacaagctcaacttttaagtatttaaatatacttcaaatatatttctaaaggagtctttaacagaaaaaagtactgactccatgtactttgctgctgcttttgtgatccctgttgaagtgacttcaagaagtgacaatgatgccaggcatttggttaagtatgctagccacagtgcagcctggccagaatttccacatgttcacaaaggaagaacttgaagaggttatcaaggacatttaaggaatcctgatcctcagaacttctctgggacaatttcagttctaataatgtccttaaattttatttccagctcctgttccttggaaaatctccattgtatgtgcattttttaaatgatgtctgtacataaaggcagttctgaaataaagaaaattttaaaata

SEQ ID NO: 440682 - DNA, 690 bp, Homo sapiens
tatgggaagaggataaggaaaaatgcacattttcttggaaattggctgatagttttgaggcatgaacttaccaaaggaactggtaagtctattcagaatggatccaagttgattcaggattgaggcagaaaagtcatttgctctcatttcatcaatttgggaagactttctgggagtgaggcagaagtgttctatatataggttccattgccttgagaaactgttaatgtacaaaaaaatgctacagattgttgtgggcgaagtagagaataatgacaatgtgcgtattctgtagctatctgagctagttgtcaaggaacttgaattcagtgtctacatggctagtttttatgagtataattaataatttttttttaaattataggggcgtgaatactttttctcccgaaggaagattatttcaagtggaatatgccattgaggctatcaaggtatagtagcaagtagcataggtcctgaaatttcatggctacctaacattttgctggcagaacacttggagtaaatgtggtttaaccattcctttagaaaatgttcttatatccctttaagcaaccactgttaaccatttttataacagtttcaatcctattcctaatatctattttaaaactttttgagcagtaactgcttcataattatctaaatagcttttctcactgtgggggt

SEQ ID NO: 440683 - DNA, 1417 bp, Homo sapiens
gcacaggagggcgggctaaagaggtcgcggtcgcacgcgcagttggtccttagtactgcggccgtgtgggtgagttggctgccggtgagttgggtgccggtggagtcgtgttggtcctcagaatccccgcgtagccgctgcctcctcctaccctcgccatgtttcttacccggtctgagtacgacaggggcgtgaatactttttctcccgaaggaagattatttcaagtggaatatgccattgaggctatcaagcttggttctacagccattgggatccagacatcagagggtgtgtgcctagctgtggagaagagaattacttccccactgatggagcccagcagcattgagaaaattgtagagattgatgctcacataggttgtgccatgagtgggctaattgctgatgctaagactttaattgataaagccagagtggagacacagaaccactggttcacctacaatgagacaatgacagtggagagtgtgacccaagctgtgtccaatctggctttgcagtttggagaagaagatgcagatccaggtgccatgtctcgtccctttggagtagcattattatttggaggagttgatgagaaaggaccccagctgtttcatatggacccatctgggacctttgtacagtgtgatgctcgagcaattggctctgcttcagagggtgcccagagctccttgcaagaagtttaccacaagtctatgactttgaaagaagccatcaagtcttcactcatcatcctcaaacaagtaatggaggagaagctgaatgcaacaaacattgagctagccacagtgcagcctggccagaatttccacatgttcacaaaggaagaacttgaagaggttatcaaggacatttaaggaatcctgatcctcagaacttctctgggacaatttcagttctaataatgtccttaaattttatttccagctcctgttccttggaaaatctccattgtatgtgcattttttaaatgatgtctgtacataaaggcagttctgaaataaagaaaattttaaaataaaaaaaaaaaaaaaaaaaaaaaaaaaaaacacttggttggggggccttgggcccttggaggaagggtttaaagacacaatcggatgggagagggggcccccacgtagggtgcacagtggagacacattgggcaaaagaggggtcccacaaggagaaactcgggggccaagggccaacggcgccggagatctcaccccaattaaaaaaagcccgagggaagaacaacccaagcgaggcgcatcagggaaaaaaaatctcaaaaagtgaggagcaccagaaaagcaccatacggggactctaccacacaacagggaggcacaaagagaagaacccccaatcgaccaataaaaacgcccgcgtccggggggga

SEQ ID NO: 440684 - DNA, 1100 bp, Homo sapiens
gcacaggagggcgggctaaagaggtcgcggtcgcacgcgcagttggtccttagtactgcggccgtgtgggtgagttggctgccggtgagttgggtgccggtggagtcgtgttggtcctcagaatccccgcgtagccgctgcctcctcctaccctcgccatgtttcttacccggtctgagtacgacaggggcgtgaatactttttctcccgaaggaagattatttcaagtggaatatgccattgaggctatcaagcttggttctacagccattgggatccagacatcagagggtgtgtgcctagctgtggagaagagaattacttccccactgatggagcccagcagcattgagaaaattgtagagattgatgctcacataggttgtgccatgagtgggctaattgctgatgctaagactttaattgataaagccagagtggagacacagaaccactggttcacctacaatgagacaatgacagtggagagtgtgacccaagctgtgtccaatctggctttgcagtttggagaagaagatgcagatccaggtgccatgtctcgtccctttggagtagcattattatttggaggagttgatgagaaaggaccccagctgtttcatatggacccatctgggacctttgtacagtgtgatgctcgagcaattggctctgcttcagagggtgcccagagctccttgcaagaagtttaccacaagtctatgactttgaaagaagccatcaagtcttcactcatcatcctcaaacaagtaatggaggagaagctgaatgcaacaaacattgagctagccacagtgcagcctggccagaatttccacatgttcacaaaggaagaacttgaagaggttatcaaggacatttaaggaatcctgatcctcagaacttctctgggacaatttcagttctaataatgtccttaaattttatttccagctcctgttccttggaaaatctccattgtatgtgcattttttaaatgatgtctgtacataaaggcagttctgaaataaagaaaattttaaaataaataaaaaaaagggtagcggcagctttcctctttttttacactaaatataaaa

SEQ ID NO: 440685 - DNA, 936 bp, Homo sapiens
gcacaggagggcgggctaaagaggtcgcggtcgcacgcgcagttggtccttagtactgcggccgtgtgggtgagttgggcgtgaatactttttctcccgaaggaagattatttcaagtggaatatgccattgaggctatcaagcttggttctacagccattgggatccagacatcagagggtgtgtgcctagctgtggagaagagaattacttccccactgatggagcccagcagcattgagaaaattgtagagattgatgctcacataggttgtgccatgagtgggctaattgctgatgctaagactttaattgataaagccagagtggagacacagaaccactggttcacctacaatgagacaatgacagtggagagtgtgacccaagctgtgtccaatctggctttgcagtttggagaagaagatgcagatccaggtgccatgtctcgtccctttggagtagcattattatttggaggagttgatgagaaaggaccccagctgtttcatatggacccatctgggacctttgtacagtgtgatgctcgagcaattggctctgcttcagagggtgcccagagctccttgcaagaagtttaccacaagtctatgactttgaaagaagccatcaagtcttcactcatcatcctcaaacaagtaatggaggagaagctgaatgcaacaaacattgagctagccacagtgcagcctggccagaatttccacatgttcacaaaggaagaacttgaagaggttatcaaggacatttaaggaatcctgatcctcagaacttctctgggacaatttcagttctaataatgtccttaaattttatttccagctcctgttccttggaaaatctccattgtatgtgcattttttaaatgatgtctgtacataaaggcagttctgaaataaagaaaattttaaaata

SEQ ID NO: 440686 - DNA, 993 bp, Homo sapiens
gcacaggagggcgggctaaagaggtcgcggtcgcacgcgcagttggtccttagtactgcggccgtgtgggtgagttggctgccggtgagttgggtgccggtggagtcgtgttggtcctcagaatccccgcgtagccgctgcctcctcctaccctcgccatgtttcttacccggtctgagtacgacaggggcgtgaatactttttctcccgaaggaagattatttcaagtggaatatgccattgaggctatcaagcttggttctacagccattgggatccagacatcagagggtgtgtgcctagctgtggagaagagaattacttccccactgatggagcccagcagcattgaggatgctaagactttaattgataaagccagagtggagacacagaaccactggttcacctacaatgagacaatgacagtggagagtgtgacccaagctgtgtccaatctggctttgcagtttggagaagaagatgcagatccaggtgccatgtctcgtccctttggagtagcattattatttggaggagttgatgagaaaggaccccagctgtttcatatggacccatctgggacctttgtacagtgtgatgctcgagcaattggctctgcttcagagggtgcccagagctccttgcaagaagtttaccacaagtctatgactttgaaagaagccatcaagtcttcactcatcatcctcaaacaagtaatggaggagaagctgaatgcaacaaacattgagctagccacagtgcagcctggccagaatttccacatgttcacaaaggaagaacttgaagaggttatcaaggacatttaaggaatcctgatcctcagaacttctctgggacaatttcagttctaataatgtccttaaattttatttccagctcctgttccttggaaaatctccattgtatgtgcattttttaaatgatgtctgtacataaaggcagttctgaaataaagaaaattttaaaata

SEQ ID NO: 440687 - DNA, 699 bp, Homo sapiens
ttcagttttcaatcccagtttaaagggatgtgcgtagtgagatggtgggctgctttaatgtccttattagaaggttgtaccatgctttgctcttcttctagaaccactggttcacctacaatgagacaatgacagtggagagtgtgacccaagctgtgtccaatctggctttgcagtttggagaagaagatgcagatccaggtgccatgtctcgtccctttggagtagcattattatttggaggagttgatgagaaaggaccccagctgtttcatatggacccatctgggacctttgtacagtgtgatgctcgagcaattggctctgcttcagagggtgcccagagctccttgcaagaagtttaccacaagtctatgactttgaaagaagccatcaagtcttcactcatcatcctcaaacaagtaatggaggagaagctgaatgcaacaaacattgagctagccacagtgcagcctggccagaatttccacatgttcacaaaggaagaacttgaagaggttatcaaggacatttaaggaatcctgatcctcagaacttctctgggacaatttcagttctaataatgtccttaaattttatttccagctcctgttccttggaaaatctccattgtatgtgcattttttaaatgatgtctgtacataaaggcagttctgaaataaagaaaattttaaaata

SEQ ID NO: 440688 - DNA, 487 bp, Homo sapiens
gcacaggagggcgggctaaagaggtcgcggtcgcacgcgcagttggtccttagtactgcggccgtgtgggtgagttggctgccggtgagttgggtgccggtggagtcgtgttggtcctcagaatccccgcgtagccgctgcctcctcctaccctcgccatgtttcttacccggtctgagtacgacaggggcgtgaatactttttctcccgaaggaagattatttcaagtggaatatgccattgaggctatcaagcttggttctacagccattgggatccagacatcagagggtgtgtgcctagctgtggagaagagaattacttccccactgatggagcccagcagcattgagaaaattgtagagattgatgctcacatagattatctttgtattccttgttgcctctgcccacttttttggtctttaattcccctgccttggcttctgacatcattgtataatagtattacagggtgagtaattct

SEQ ID NO: 440689 - DNA, 514 bp, Homo sapiens
ctctataggatcccccactactggccatggctaggtttatagatagatgtggtgagttaaccttaaaatagaaaatttggtcaataagcatttttattttggagccagagagctattttagggacctgctgcctggaaaggatatccttgggacagcagatcccttagttcctaatgaatagctgcatcaccaacacagcttctcctgaccatggtagggccatcagcagggtaactcagcccagcttattaacccttctgttttctttccagctagccacagtgcagcctggccagaatttccacatgttcacaaaggaagaacttgaagaggttatcaaggacatttaaggaatcctgatcctcagaacttctctgggacaatttcagttctaataatgtccttaaattttatttccagctcctgttccttggaaaatctccattgtatgtgcattttttaaatgatgtctgtacataaaggcagttctgaaataaagaaaattttaaaata

SEQ ID NO: 440690 - DNA, 581 bp, Homo sapiens
cacacacaagctcaacttttaagtatttaaatatacttcaaatatatttctaaaggagtctttaacagaaaaaagtactgactccatgtactttgctgctgcttttgtgatccctgttgaagtgacttcaagaagtgacaatgatgccaggcatttggttaagtatgatgtggtgagttaaccttaaaatagctgctgcctggaaaggatatccttgggacagcagatcccttagttcctaatgaatagctgcatcaccaacacagcttctcctgaccatggtagggccatcagcagggtaactcagcccagcttattaacccttctgttttctttccagctagccacagtgcagcctggccagaatttccacatgttcacaaaggaagaacttgaagaggttatcaaggacatttaaggaatcctgatcctcagaacttctctgggacaatttcagttctaataatgtccttaaattttatttccagctcctgttccttggaaaatctccattgtatgtgcattttttaaatgatgtctgtacataaaggcagttctgaaataaagaaaattttaaaata

SEQ ID NO: 440691 - DNA, 1142 bp, Homo sapiens
gcacaggagggcgggctaaagaggtcgcggtcgcacgcgcagttggtccttagtactgcggccgtgtgggtgagttggctgccggtgagttgggtgccggtggagtcgtgttggtcctcagaatccccgcgtagccgctgcctcctcctaccctcgccatgtttcttacccggtctgagtacgacaggggcgtgaatactttttctcccgaaggaagattatttcaagtggaatatgccattgaggctatcaagcttggttctacagccattgggatccagacatcagagggtgtgtgcctagctgtggagaagagaattacttccccactgatggagcccagcagcattgagaaaattgtagagattgatgctcacataggttgtgccatgagtgggctaattgctgatgctaagactttaattgataaagccagagtggagacacagaaccactggttcacctacaatgagacaatgacagtggagagtgtgacccaagctgtgtccaatctggctttgcagtttggagaagaagatgcagatccaggtgccatgtctcgtccctttggagtagcattattatttggaggagttgatgagaaaggaccccagctgtttcatatggacccatctgggacctttgtacagtgtgatgctcgagcaattggctctgcttcagagggtgcccagagctccttgcaagaagtttaccacaagtctatgactttgaaagaagccatcaagtcttcactcatcatcctcaaacaagtaatggaggagaagctgaatgcaacaaacattgagctagccacagtgcagcctggccagaatttccacatgttcacaaaggaagaacttgaagaggttatcaaggacatttaaggaatcctgatcctcagaacttctctgggacaatttcagttctaataatgtccttaaattttatttccagctcctgttccttggaaaatctccattgtatgtgcattttttaaatgatgtctgtacataaaggcagttctgaaataaagaaaattttaaaataaaaaaaaggggggggtaaaaatctgaggggcaatacgacccgtttggaaaaggccaagagagaaagaagagaggggtaatggggaagaatgcgtt

SEQ ID NO: 440692 - DNA, 813 bp, Homo sapiens
gcacaggagggcgggctaaagaggtcgcggtcgcacgcgcagttggtccttagtactgcggccgtgtgggtgagttggctgccggtgagttgggtgccggtggagtcgtgttggtcctcagaatccccgcgtagccgctgcctcctcctaccctcgccatgtttcttacccggtctgagtacgacaggggcgtgaatactttttctcccgaaggaagattatttcaagtggaatatgccattgaggctatcaagcttggttctacagccattgggatccagacatcagagggtgtgtgcctagctgtggagaagagaattacttccccactgatggagcccagcagcattgagaaaattgtagagattgatgctcacataggttgtgccatgagtgggctaattgctgatgctaagactttaattgataaagccagagtggagacacagaaccactggttcacctacaatgagacaatgacagtggagagtgtgacccaagctgtgtccaatctggctttgcagtttggagaagaagatgcagatccaggtgccatgtctcgtccctttggagtagcattattatttggaggagttgatgagaaaggaccccagcttgtttataagtgcccatttggacctctgtacagaggggtggtcgagcattgggctttgttcaaaggtggccaaaggtcttgcaggaagttacccaagtctatgcttttaagaaggctcagtttttatcttatcctaaacagtattgggggggtggtgcgattggtttgcccagggggccggccgatttcctgttcgg

SEQ ID NO: 440693 - DNA, 1117 bp, Homo sapiens
gcacaggagggcgggctaaagaggtcgcggtcgcacgcgcagttggtccttagtactgcggccgtgtgggtgagttggctgccggtgagttgggtgccggtggagtcgtgttggtcctcagaatccccgcgtagccgctgcctcctcctaccctcgccatgtttcttacccggtctgagtacgacaggggcgtgaatactttttctcccgaaggaagattatttcaagtggaatatgccattgaggctatcaagcttggttctacagccattgggatccagacatcagagggtgtgtgcctagctgtggagaagagaattacttccccactgatggagcccagcagcattgagaaaattgtagagattgatgctcacataggttgtgccatgagtgggctaattgctgatgctaagactttaattgataaagccagagtggagacacagaaccactggttcacctacaatgagacaatgacagtggagagtgtgacccaagctgtgtccaatctggctttgcagtttggagaagaagatgcagatccaggtgccatgtctcgtccctttggagtagcattattatttggaggagttgatgagaaaggaccccagctgtttcatatggacccatctgggacctttgtacagtgtgatgctcgagcaattggctctgcttcagagggtgcccagagctccttgcaagaagtttaccacaagtctatgactttgaaagaagccatcaagtcttcactcatcatcctcaaacaagtaatggaggagaagctgaatgcaacaaacattgagctagccacagtgcagcctggccagaatttccacatgttcacaaaggaagaacttgaagaggttatcaaggacatttaaggaatcctgatcctcagaacttctctgggacaatttcagttctaataatgtccttaaattttatttccagctcctgttccttggaaaatctccattgtatgtgcattttttaaatgatgtctgtacataaaggcagttctgaaataaagaaaattttaaaataacaaaaaaaaaaatggccgcgtttacaagtcgtgatgggaaaccctgcggtacccacttatcgcttgagc

SEQ ID NO: 440694 - DNA, 1070 bp, Homo sapiens
gcacaggagggcgggctaaagaggtcgcggtcgcacgcgcagttggtccttagtactgcggccgtgtgggtgagttggctgccggtgagttgggtgccggtggagtcgtgttggtcctcagaatccccgcgtagccgctgcctcctcctaccctcgccatgtttcttacccggtctgagtacgacaggggcgtgaatactttttctcccgaaggaagattatttcaagtggaatatgccattgaggctatcaagcttggttctacagccattgggatccagacatcagagggtgtgtgcctagctgtggagaagagaattacttccccactgatggagcccagcagcattgagaaaattgtagagattgatgctcacataggttgtgccatgagtgggctaattgctgatgctaagactttaattgataaagccagagtggagacacagaaccactggttcacctacaatgagacaatgacagtggagagtgtgacccaagctgtgtccaatctggctttgcagtttggagaagaagatgcagatccaggtgccatgtctcgtccctttggagtagcattattatttggaggagttgatgagaaaggaccccagctgtttcatatggacccatctgggacctttgtacagtgtgatgctcgagcaattggctctgcttcagagggtgcccagagctccttgcaagaagtttaccacaagtctatgactttgaaagaagccatcaagtcttcactcatcatcctcaaacaagtaatggaggagaagctgaatgcaacaaacattgagctagccacagtgcagcctggccagaatttccacatgttcacaaaggaagaacttgaagaggttatcaaggacatttaaggaatcctgatcctcagaacttctctgggacaatttcagttctaataatgtccttaaattttatttccagctcctgttccttggaaaatctccattgtatgtgcattttttaaatgatgtctgtacataaaggcagttctgaaataaagaaaattttaaaataatatttgttaatagactgttctc

SEQ ID NO: 440695 - DNA, 980 bp, Homo sapiens
gcacaggagggcgggctaaagaggtcgcggtcgcacgcgcagttggtccttagtactgcggccgtgtgggtgagttggctgccggtgagttgggtgccggtggagtcgtgttggtcctcagaatccccgcgtagccgctgcctcctcctaccctcgccatgtttcttacccggtctgagtacgacagcttggttctacagccattgggatccagacatcagagggtgtgtgcctagctgtggagaagagaattacttccccactgatggagcccagcagcattgagaaaattgtagagattgatgctcacataggttgtgccatgagtgggctaattgctgatgctaagactttaattgataaagccagagtggagacacagaaccactggttcacctacaatgagacaatgacagtggagagtgtgacccaagctgtgtccaatctggctttgcagtttggagaagaagatgcagatccaggtgccatgtctcgtccctttggagtagcattattatttggaggagttgatgagaaaggaccccagctgtttcatatggacccatctgggacctttgtacagtgtgatgctcgagcaattggctctgcttcagagggtgcccagagctccttgcaagaagtttaccacaagtctatgactttgaaagaagccatcaagtcttcactcatcatcctcaaacaagtaatggaggagaagctgaatgcaacaaacattgagctagccacagtgcagcctggccagaatttccacatgttcacaaaggaagaacttgaagaggttatcaaggacatttaaggaatcctgatcctcagaacttctctgggacaatttcagttctaataatgtccttaaattttatttccagctcctgttccttggaaaatctccattgtatgtgcattttttaaatgatgtctgtacataaaggcagttctgaaataaagaaaattttaaaata

SEQ ID NO: 440696 - DNA, 885 bp, Homo sapiens
gcacaggagggcgggctaaagaggtcgcggtcgcacgcgcagttggtccttagtactgcggccgtgtgggtgagttggctgccggtgagttgggtgccggtggagtcgtgttggtcctcagaatccccgcgtagccgctgcctcctcctaccctcgccatgtttcttacccggtctgagtacgacaggggcgtgaatactttttctcccgaaggaagattatttcaagtggaatatgccattgaggctatcaagcttggttctacagccattgggatccagacatcagagggtgtgtgcctagctgtggagaagagaattacttccccactgatggagcccagcagcattgagaaaattgtagagattgatgctcacataggttgtgccatgagtgggctaattgctgatgctaagactttaattgataaagccagagtggagacacagaaccactggttcacctacaatgagacaatgacagtggagagtgtgacccaagctgtgtccaatctggctttgcagtttggagaagaagatgcagatccaggtgccatgtctcgtccctttggagtagcattattatttggaggagttgatgagaaaggaccccagctgtttcatatggacccatctgggacctttgtacagtgtgatgctcgagcaattggctctgcttcagagggtgcccagagctccttgcaagaagtttaccacaagtctatgactttgaaagaagccatcaagtcttcactcatcatcctcaaacaagtaatggaggagaagctgaatgcaacaaacattgagagatggggtcttgctgtgttgcccagactggtcttaaactcctgggctcaaggcaattctcctgcctcagcctactgag

SEQ ID NO: 440697 - DNA, 715 bp, Homo sapiens
gcacaggagggcgggctaaagaggtcgcggtcgcacgcgcagttggtccttagtactgcggccgtgtgggtgagttggctgccggtgagttgggtgccggtggagtcgtgttggtcctcagaatccccgcgtagccgctgcctcctcctaccctcgccatgtttcttacccggtctgagtacgacaggtccgtgcagctgggggacgtcgggtgggaattatgggtgggcaggcccgggacctggccgcgcggcctgggttctgccgtgtcatggggctccccaggaacccgagactggccggacctggggatgttatgccctcctcaggcgcccgccgtccttccccaagctagaccacatcggcggcacttgtcctaccgctgagtcacccctgggtcctaactcggtgcggaagcgagaagctccggctggtgcttggtaaagaaggcgtgaggagccggaactcctaccttgaacccggagaaggccaagggtcactctttgctccgttcatcttttcgtgcctagtatgactgccttgaacaaacaaacaaaaagttaaacgtgcttcctggaagaaaaagcaactggtttgtagtagggcatgctgcggtgtatagtttcttcagaagcgcgaaggcagtcgtagctttggctggatatattgtctggagtctgattttataggaactggaatttagaatggttttcaa

SEQ ID NO: 440698 - DNA, 914 bp, Homo sapiens
agcaattctcctgttcctgcctcccgagtagctgggattacaggacttggatgttgtgggtgatggtatgcagtgtcctccttcacctttgctttttgatccttcactaacccttgaagatcatttagtcaaagaaattgctgaagacacagtggatattttgggccagatgcagatggctggagatgggtgcagatcccagggatctcgaaattctgagaaagcctctgcaccattgtctcagagtggattggctactgcaaatgggaagccagaacccacttctattagttgatagtttggggaaccattttactttggtggatttaaatttctcgttcttcaaagaagtatttctgatcatctctcacaaaacacaggcaacccagactaccttgtttttcttctggattgagtattatagtcaaacgtaaagccaaattttgaggacgtggaccgtgggtttcttcccactcagggcaaggaagagaaagagagataatccctatcaaagcttctgggattatttgggactatacctaaaaggaaagtgacatctttgtaatgggatttcccaagtcatggatagaaatccacttaagtagctaggtgggagctgtctttgtgagtggtgtctttgagatactgatggccctaatatcggttatctctatctgaagacctgcagtttagcttttcttcacctctacttaattgggcagtctttaacccctttccctggtgaactctggctttttatcctctgagaaaacagcccacaggactgggtcctccttatccgtcttgcttttaacctatgtaaatttctgtggttgctatcttatgtaaaatatagtaaaaatttattgtatatagtttctattaaatgttaaagaaaatgttatgaaaatatc

SEQ ID NO: 440699 - DNA, 2300 bp, Homo sapiens
tagagaagggcgagcggcgcggcagagtgcggcgcagcgcagctcctgaggttttggttatgaacaggattcggattcacgtcttgccaaccaatcgggggaggatcactccagtgcccaggtctcaggaacctctgtcttgtgcattcactcatcgtccatgctctcaccctcgtctggaggggcaggagttttgcattaagcatatccttgaagacaagaatgcacccttcaagcagtgtagttatatatcgacgaagaatggaaaaagatgtcccaatgctgccccaaagccagagaagaaagatggggtgtccttctgtgctgaacatgtccgtaggaatgccctggcacttcatgctcaaatgaagaagaccaacccagggcctgtgggtgaaacactcctgtgccagctgagctcatatgctaagacagagctggggtctcagactccagaaagtagtcgcagtgaagccagccgaatactagatgaagacagctggagtgatggggagcaggaacccattactgtggatcagacatggagaggtgaccctgacagtgaagctgatagcatagacagtgatcaagaagatcccctaaaacatgctggtgtctacacagcagaagaagtggccctgattatgcgtgaaaagctaattcgtttgcagtcgttgtatattgatcagtttaaacgacttcagcatctgctcaaggagaagaagcgccgatacttacataatcgcaaagtggaacatgaagctctaggcagtagtctcctgactggcccagagggacttttggccaaagaacgagagaacttaaagcgattaaaatgtctgcgacgataccgccagcgctatggagtggaagccttactgcataggcagttgaaggaacggagaatgctggccacagatggtgctgcccaacaggcccataccactcgttccagtcagaggtgcttggcctttgtggatgatgttcgttgttccaatcagtctcttccaatgaccagacactgccttacccatatttgtcaggatacgaatcaggttctcttcaagtgctgccagggatctgaagaggtaccctgcaacaaacctgttcctgtaagcctctctgaggatccctgctgcccactgcatttccagttgcctcctcagatgtataagcccgagcaggtactgtctgtgccagacgatctggaagccggccccatggatctgtacttgagtgctgctgagcttcagcccactgagagtttacctctggagttcagtgatgacttggatgttgtgggtgatggtatgcagtgtcctccttcacctttgctttttgatccttcactaacccttgaagatcatttagtcaaagaaattgctgaagacacagtggatattttgggccagatgcagatggctggagatgggtgcagatcccagggatctcgaaattctgagaaagcctctgcaccattgtctcagagtggattggctactgcaaatgggaagccagaacccacttctattagttgatagtttggggaaccattttactttggtggatttaaatttctcgttcttcaaagaagtatttctgatcatctctcacaaaacacaggcaacccagactaccttgtttttcttctggattgagtattatagtcaaacgtaaagccaaattttgaggacgtggaccgtgggtttcttcccactcagggcaaggaagagaaagagagataatccctatcaaagcttctgggattatttgggactatacctaaaaggaaagtgacatctttgtaatgggatttcccaagtcatggatagaaatccacttaagtagctaggtgggagctgtctttgtgagtggtgtctttgagatactgatggccctaatatcggttatctctatctgaagacctgcagtttagcttttcttcacctctacttaattgggcagtctttaacccctttccctggtgaactctggctttttatcctctgagaaaacagcccacaggactgggtcctccttatccgtcttgcttttaacctatgtaaatttctgtggttgctatcttatgtaaaatatagtaaaaatttattgtatatagtttctattaaatgttaaagaaaatgttatgaaaatatcaaacagtcacctgaattgaatgcatgttttgtttgagaatatagtttctttttcgcggttttggggacctgtctctgatgggaaagggaagttgggacagatgatacttccatcccaagaagtaaataaatcttcagtagctc

SEQ ID NO: 440700 - DNA, 2157 bp, Homo sapiens
tagagaagggcgagcggcgcggcagagtgcggcgcagcgcagctcctgaggttttggttatgaacaggattcggattcacgtcttgccaaccaatcgggggaggatcactccagtgcccaggtctcaggaacctctgtcttgtgcattcactcatcgtccatgctctcaccctcgtctggaggggcaggagttttgcattaagcatatccttgaagacaagaatgcacccttcaagcagtgtagttatatatcgacgaagaatggaaaaagatgtcccaatgctgccccaaagccagagaagaaagatggggtgtccttctgtgctgaacatgtccgtaggaatgccctggcacttcatgctcaaatgaagaagaccaacccagggcctgtgggtgaaacactcctgtgccagctgagctcatatgctaagacagagctggggtctcagactccagaaagtagtcgcagtgaagccagccgaatactagatgaagacagctggagtgatggggagcaggaacccattactgtggatcagacatggagaggtgaccctgacagtgaagctgatagcatagacagtgatcaagaagatcccctaaaacatgctggtgtctacacagcagaagaagtggccctgattatgcgtgaaaagctaattcgtttgcagtcgttgtatattgatcagtttaaacgacttcagcatctgctcaaggagaagaagcgccgatacttacataatcgcaaagtggaacatgaagctctaggcagtagtctcctgactggcccagagggacttttggccaaagaacgagagaacttaaagcgattaaaatgtctgcgacgataccgccagcgctatggagtggaagccttactgcataggcagttgaaggaacggagaatgctggccacagatggtgctgcccaacaggcccataccactcgttccagtcagaggtgcttggcctttgtggatgatgttcgttgttccaatcagtctcttccaatgaccagacactgccttacccatatttgtcaggatacgaatcaggttctcttcaagtgctgccagggatctgaagaggtaccctgcaacaaacctgttcctgtaagcctctctgaggatccctgctgcccactgcatttccagttgcctcctcagatgtataagcccgagcaggtactgtctgtgccagacgatctggaagccggccccatggatctgtacttgagtgctgctgagcttcagcccactgagagtttacctctggagttcagtgatgacttggatgttgtgggtgatggtatgcagtgtcctccttcacctttgctttttgatccttcactaacccttgaagatcatttagtcaaagaaattgctgaagacacagtggatattttgggccagatgcagatggctggagatgggtgcagatcccagggatctcgaaattctgagaaagcctctgcaccattgtctcagagtggattggctactgcaaatgggaagccagaacccacttctattagttgatagtttggggaaccattttactttggtggatttaaatttctcgttcttcaaagaagtatttctgatcatctctcacaaaacacaggcaacccagactaccttgtttttcttctggattgagtattatagtcaaacgtaaagccaaattttgaggacgtggaccgtgggtttcttcccactcagggcaaggaagagaaagagagataatccctatcaaagcttctgggattatttgggactatacctaaaaggaaagtgacatctttgtaatgggatttcccaagtcatggatagaaatccacttaagtagctaggtgggagctgtctttgtgagtggtgtctttgagatactgatggccctaatatcggttatctctatctgaagacctgcagtttagcttttcttcacctctacttaattgggcagtctttaacccctttccctggtgaactctggctttttatcctctgagaaaacagcccacaggactgggtcctccttatccgtcttgcttttaacctatgtaaatttctgtggttgctatcttatgtaaaatatagtaaaaatttattgtatatagtttctattaaatgttaaagaaaatgttatgaaaatatc

SEQ ID NO: 440701 - DNA, 2233 bp, Homo sapiens
aagcagtgtcagagtcagtctcgcttcctgaggcttccaggagccaggatctccggtgactggagccgtcggacaaaatggcgctcgcataggcttccgaggccaggcccagtcgtgcgctctgaggttttggttatgaacaggattcggattcacgtcttgccaaccaatcgggggaggatcactccagtgcccaggtctcaggaacctctgtcttgtgcattcactcatcgtccatgctctcaccctcgtctggaggggcaggagttttgcattaagcatatccttgaagacaagaatgcacccttcaagcagtgtagttatatatcgacgaagaatggaaaaagatgtcccaatgctgccccaaagccagagaagaaagatggggtgtccttctgtgctgaacatgtccgtaggaatgccctggcacttcatgctcaaatgaagaagaccaacccagggcctgtgggtgaaacactcctgtgccagctgagctcatatgctaagacagagctggggtctcagactccagaaagtagtcgcagtgaagccagccgaatactagatgaagacagctggagtgatggggagcaggaacccattactgtggatcagacatggagaggtgaccctgacagtgaagctgatagcatagacagtgatcaagaagatcccctaaaacatgctggtgtctacacagcagaagaagtggccctgattatgcgtgaaaagctaattcgtttgcagtcgttgtatattgatcagtttaaacgacttcagcatctgctcaaggagaagaagcgccgatacttacataatcgcaaagtggaacatgaagctctaggcagtagtctcctgactggcccagagggacttttggccaaagaacgagagaacttaaagcgattaaaatgtctgcgacgataccgccagcgctatggagtggaagccttactgcataggcagttgaaggaacggagaatgctggccacagatggtgctgcccaacaggcccataccactcgttccagtcagaggtgcttggcctttgtggatgatgttcgttgttccaatcagtctcttccaatgaccagacactgccttacccatatttgtcaggatacgaatcaggttctcttcaagtgctgccagggatctgaagaggtaccctgcaacaaacctgttcctgtaagcctctctgaggatccctgctgcccactgcatttccagttgcctcctcagatgtataagcccgagcaggtactgtctgtgccagacgatctggaagccggccccatggatctgtacttgagtgctgctgagcttcagcccactgagagtttacctctggagttcagtgatgacttggatgttgtgggtgatggtatgcagtgtcctccttcacctttgctttttgatccttcactaacccttgaagatcatttagtcaaagaaattgctgaagacacagtggatattttgggccagatgcagatggctggagatgggtgcagatcccagggatctcgaaattctgagaaagcctctgcaccattgtctcagagtggattggctactgcaaatgggaagccagaacccacttctattagttgatagtttggggaaccattttactttggtggatttaaatttctcgttcttcaaagaagtatttctgatcatctctcacaaaacacaggcaacccagactaccttgtttttcttctggattgagtattatagtcaaacgtaaagccaaattttgaggacgtggaccgtgggtttcttcccactcagggcaaggaagagaaagagagataatccctatcaaagcttctgggattatttgggactatacctaaaaggaaagtgacatctttgtaatgggatttcccaagtcatggatagaaatccacttaagtagctaggtgggagctgtctttgtgagtggtgtctttgagatactgatggccctaatatcggttatctctatctgaagacctgcagtttagcttttcttcacctctacttaattgggcagtctttaacccctttccctggtgaactctggctttttatcctctgagaaaacagcccacaggactgggtcctccttatccgtcttgcttttaacctatgtaaatttctgtggttgctatcttatgtaaaatatagtaaaaatttattgtatatagtttctattaaatgttaaagaaaatgttatgaaaatatc

SEQ ID NO: 440702 - DNA, 2198 bp, Homo sapiens
tagagaagggcgagcggcgcggcagagtgcggcgcagcgcagctcctgaggttttggttatgaacaggattcggattcacgtcttgccaaccaatcgggggaggatcactccagtgcccaggtctcaggaacctctgtcttgtgcattcactcatcgtccatgctctcaccctcgtctggaggggcaggagttttgcattaagcatatccttgaagacaagaatgcacccttcaagcagtgtagttatatatcgacgaagaatggaaaaagatgtcccaatgctgccccaaagccagagaagaaagatggggtgtccttctgtgctgaacatgtccgtaggaatgccctggcacttcatgctcaaatgaagaagaccaacccagggcctgtgggtgaaacactcctgtgccagctgagctcatatgctaagacagagctggggtctcagactccagaaagtagtcgcagtgaagccagccgaatactagatgaagacagctggagtgatggggagcaggaacccattactgtggatcagacatggagaggtgaccctgacagtgaagctgatagcatagacagtgatcaagaagatcccctaaaacatgctggtgtctacacagcagaagaagtggccctgattatgcgtgaaaagctaattcgtttgcagtcgttgtatattgatcagtttaaacgacttcagcatctgctcaaggagaagaagcgccgatacttacataatcgcaaagtggaacatgaagctctaggcagtagtctcctgactggcccagagggacttttggccaaagaacgagagaacttaaagcgattaaaatgtctgcgacgataccgccagcgctatggagtggaagccttactgcataggcagttgaaggaacggagaatgctggccacagatggtgctgcccaacaggcccataccactcgttccagtcagaggtgcttggcctttgtggatgatgttcgttgttccaatcagtctcttccaatgaccagacactgccttacccatatttgtcaggatacgaatcaggttctcttcaagtgctgccagggatctgaagaggtaccctgcaacaaacctgttcctgtaagcctctctgaggatccctgctgcccactgcatttccagttgcctcctcagatgtataagcccgagcaggacttggatgttgtgggtgatggtatgcagtgtcctccttcacctttgctttttgatccttcactaacccttgaagatcatttagtcaaagaaattgctgaagacacagtggatattttgggccagatgcagatggctggagatgggtgcagatcccagggatctcgaaattctgagaaagcctctgcaccattgtctcagagtggattggctactgcaaatgggaagccagaacccacttctattagttgatagtttggggaaccattttactttggtggatttaaatttctcgttcttcaaagaagtatttctgatcatctctcacaaaacacaggcaacccagactaccttgtttttcttctggattgagtattatagtcaaacgtaaagccaaattttgaggacgtggaccgtgggtttcttcccactcagggcaaggaagagaaagagagataatccctatcaaagcttctgggattatttgggactatacctaaaaggaaagtgacatctttgtaatgggatttcccaagtcatggatagaaatccacttaagtagctaggtgggagctgtctttgtgagtggtgtctttgagatactgatggccctaatatcggttatctctatctgaagacctgcagtttagcttttcttcacctctacttaattgggcagtctttaacccctttccctggtgaactctggctttttatcctctgagaaaacagcccacaggactgggtcctccttatccgtcttgcttttaacctatgtaaatttctgtggttgctatcttatgtaaaatatagtaaaaatttattgtatatagtttctattaaatgttaaagaaaatgttatgaaaatatcaaacagtcacctgaattgaatgcatgttttgtttgagaatatagtttctttttcgcggttttggggacctgtctctgatgggaaagggaagttgggacagatgatacttccatcccaagaagtaaataaatcttcagtagctc

SEQ ID NO: 440703 - DNA, 2111 bp, Homo sapiens
tagagaagggcgagcggcgcggcagagtgcggcgcagcgcagctcctgaggttttggttatgaacaggattcggattcacgtcttgccaaccaatcgggggaggatcactccagtgcccagggtgtccttctgtgctgaacatgtccgtaggaatgccctggcacttcatgctcaaatgaagaagaccaacccagggcctgtgggtgaaacactcctgtgccagctgagctcatatgctaagacagagctggggtctcagactccagaaagtagtcgcagtgaagccagccgaatactagatgaagacagctggagtgatggggagcaggaacccattactgtggatcagacatggagaggtgaccctgacagtgaagctgatagcatagacagtgatcaagaagatcccctaaaacatgctggtgtctacacagcagaagaagtggccctgattatgcgtgaaaagctaattcgtttgcagtcgttgtatattgatcagtttaaacgacttcagcatctgctcaaggagaagaagcgccgatacttacataatcgcaaagtggaacatgaagctctaggcagtagtctcctgactggcccagagggacttttggccaaagaacgagagaacttaaagcgattaaaatgtctgcgacgataccgccagcgctatggagtggaagccttactgcataggcagttgaaggaacggagaatgctggccacagatggtgctgcccaacaggcccataccactcgttccagtcagaggtgcttggcctttgtggatgatgttcgttgttccaatcagtctcttccaatgaccagacactgccttacccatatttgtcaggatacgaatcaggttctcttcaagtgctgccagggatctgaagaggtaccctgcaacaaacctgttcctgtaagcctctctgaggatccctgctgcccactgcatttccagttgcctcctcagatgtataagcccgagcaggtactgtctgtgccagacgatctggaagccggccccatggatctgtacttgagtgctgctgagcttcagcccactgagagtttacctctggagttcagtgatgacttggatgttgtgggtgatggtatgcagtgtcctccttcacctttgctttttgatccttcactaacccttgaagatcatttagtcaaagaaattgctgaagacacagtggatattttgggccagatgcagatggctggagatgggtgcagatcccagggatctcgaaattctgagaaagcctctgcaccattgtctcagagtggattggctactgcaaatgggaagccagaacccacttctattagttgatagtttggggaaccattttactttggtggatttaaatttctcgttcttcaaagaagtatttctgatcatctctcacaaaacacaggcaacccagactaccttgtttttcttctggattgagtattatagtcaaacgtaaagccaaattttgaggacgtggaccgtgggtttcttcccactcagggcaaggaagagaaagagagataatccctatcaaagcttctgggattatttgggactatacctaaaaggaaagtgacatctttgtaatgggatttcccaagtcatggatagaaatccacttaagtagctaggtgggagctgtctttgtgagtggtgtctttgagatactgatggccctaatatcggttatctctatctgaagacctgcagtttagcttttcttcacctctacttaattgggcagtctttaacccctttccctggtgaactctggctttttatcctctgagaaaacagcccacaggactgggtcctccttatccgtcttgcttttaacctatgtaaatttctgtggttgctatcttatgtaaaatatagtaaaaatttattgtatatagtttctattaaatgttaaagaaaatgttatgaaaatatcaaacagtcacctgaattgaatgcatgttttgtttgagaatatagtttctttttcgcggttttggggacctgtctctgatgggaaagggaagttgggacagatgatacttccatcccaagaagtaaataaatcttcagtagctc

SEQ ID NO: 440704 - DNA, 1442 bp, Homo sapiens
cacaaggaaaaacaaataggctaggaggccgggtgaatcggacgagggaatgctggcacagatggtgctgccaacaggcccataccactcgttccagtcagaggtgcttggcctttgtggatgatgttcgttgttccaatcagtctcttccaatgaccagacactgccttacccatatttgtcaggatacgaatcaggttctcttcaagtgctgccagggatctgaagaggtaccctgcaacaaacctgttcctgtaagcctctctgaggatccctgctgcccactgcatttccagttgcctcctcagatgtataagcccgagcaggtactgtctgtgccagacgatctggaagccggccccatggatctgtacttgagtgctgctgagcttcagcccactgagagtttacctctggagttcagtgatgacttggatgttgtgggtgatggtatgcagtgtcctccttcacctttgctttttgatccttcactaacccttgaagatcatttagtcaaagaaattgctgaagacacagtggatattttgggccagatgcagatggctggagatgggtgcagatcccagggatctcgaaattctgagaaagcctctgcaccattgtctcagagtggattggctactgcaaatgggaagccagaacccacttctattagttgatagtttggggaaccattttactttggtggatttaaatttctcgttcttcaaagaagtatttctgatcatctctcacaaaacacaggcaacccagactaccttgtttttcttctggattgagtattatagtcaaacgtaaagccaaattttgaggacgtggaccgtgggtttcttcccactcagggcaaggaagagaaagagagataatccctatcaaagcttctgggattatttgggactatacctaaaaggaaagtgacatctttgtaatgggatttcccaagtcatggatagaaatccacttaagtagctaggtgggagctgtctttgtgagtggtgtctttgagatactgatggccctaatatcggttatctctatctgaagacctgcagtttagcttttcttcacctctacttaattgggcagtctttaacccctttccctggtgaactctggctttttatcctctgagaaaacagcccacaggactgggtcctccttatccgtcttgcttttaacctatgtaaatttctgtggttgctatcttatgtaaaatatagtaaaaatttattgtatatagtttctattaaatgttaaagaaaatgttatgaaaatatcaaacagtcacctgaattgaatgcatgttttgtttgagaatatagtttctttttcgcggttttggggacctgtctctgatgggaaagggaagttgggacagatgatacttccatcccaagaagtaaataaatcttcagtagctc

SEQ ID NO: 440705 - DNA, 1057 bp, Homo sapiens
agcaattctcctgttcctgcctcccgagtagctgggattacaggacttggatgttgtgggtgatggtatgcagtgtcctccttcacctttgctttttgatccttcactaacccttgaagatcatttagtcaaagaaattgctgaagacacagtggatattttgggccagatgcagatggctggagatgggtgcagatcccagggatctcgaaattctgagaaagcctctgcaccattgtctcagagtggattggctactgcaaatgggaagccagaacccacttctattagttgatagtttggggaaccattttactttggtggatttaaatttctcgttcttcaaagaagtatttctgatcatctctcacaaaacacaggcaacccagactaccttgtttttcttctggattgagtattatagtcaaacgtaaagccaaattttgaggacgtggaccgtgggtttcttcccactcagggcaaggaagagaaagagagataatccctatcaaagcttctgggattatttgggactatacctaaaaggaaagtgacatctttgtaatgggatttcccaagtcatggatagaaatccacttaagtagctaggtgggagctgtctttgtgagtggtgtctttgagatactgatggccctaatatcggttatctctatctgaagacctgcagtttagcttttcttcacctctacttaattgggcagtctttaacccctttccctggtgaactctggctttttatcctctgagaaaacagcccacaggactgggtcctccttatccgtcttgcttttaacctatgtaaatttctgtggttgctatcttatgtaaaatatagtaaaaatttattgtatatagtttctattaaatgttaaagaaaatgttatgaaaatatcaaacagtcacctgaattgaatgcatgttttgtttgagaatatagtttctttttcgcggttttggggacctgtctctgatgggaaagggaagttgggacagatgatacttccatcccaagaagtaaataaatcttcagtagctc

SEQ ID NO: 440706 - DNA, 205 bp, Homo sapiens
agacagcactcgactgaaagtgaaggacccagactctagttgtaggttaaccattcccttctttttacctcttttgccccatctgaaaggaaagcgggtggaggatgatggggggagtccttttttaggatattgtggtattaaatacataagagacttgtgaaagtcctttgaattccaataaaaaaaagttcttggccaggcg

SEQ ID NO: 440707 - DNA, 2026 bp, Homo sapiens
tagagaagggcgagcggcgcggcagagtgcggcgcagcgcagctcctgaggttttggttatgaacaggattcggattcacgtcttgccaaccaatcgggggaggatcactccagtgcccaggtctcaggaacctctgtcttgtgcattcactcatcgtccatgctctcaccctcgtctggaggggcaggagttttgcattaagcatatccttgaagacaagaatgcacccttcaagcagtgtagttatatatcgacgaagaatggaaaaagatgtcccaatgctgccccaaagccagagaagaaagatggggtgtccttctgtgctgaacatgtccgtaggaatgccctggcacttcatgctcaaatgaagaagaccaacccagggcctgtgggtgaaacactcctgtgccagctgagctcatatgctaagacagagctggggtctcagactccagaaagtagtcgcagtgaagccagccgaatactagacatgctggtgtctacacagcagaagaagtggccctgattatgcgtgaaaagctaattcgtttgcagtcgttgtatattgatcagtttaaacgacttcagcatctgctcaaggagaagaagcgccgatacttacataatcgcaaagtggaacatgaagctctaggcagtagtctcctgactggcccagagggacttttggccaaagaacgagagaacttaaagcgattaaaatgtctgcgacgataccgccagcgctatggagtggaagccttactgcataggcagttgaaggaacggagaatgctggccacagatggtgctgcccaacaggcccataccactcgttccagtcagaggtgcttggcctttgtggatgatgttcgttgttccaatcagtctcttccaatgaccagacactgccttacccagaaagatgcgactgccattggtgacctgttaactctttactgtggtctaatggagacagcactcgactgaaagtgaaggacccagactctagttgacttggatgttgtgggtgatggtatgcagtgtcctccttcacctttgctttttgatccttcactaacccttgaagatcatttagtcaaagaaattgctgaagacacagtggatattttgggccagatgcagatggctggagatgggtgcagatcccagggatctcgaaattctgagaaagcctctgcaccattgtctcagagtggattggctactgcaaatgggaagccagaacccacttctattagttgatagtttggggaaccattttactttggtggatttaaatttctcgttcttcaaagaagtatttctgatcatctctcacaaaacacaggcaacccagactaccttgtttttcttctggattgagtattatagtcaaacgtaaagccaaattttgaggacgtggaccgtgggtttcttcccactcagggcaaggaagagaaagagagataatccctatcaaagcttctgggattatttgggactatacctaaaaggaaagtgacatctttgtaatgggatttcccaagtcatggatagaaatccacttaagtagctaggtgggagctgtctttgtgagtggtgtctttgagatactgatggccctaatatcggttatctctatctgaagacctgcagtttagcttttcttcacctctacttaattgggcagtctttaacccctttccctggtgaactctggctttttatcctctgagaaaacagcccacaggactgggtcctccttatccgtcttgcttttaacctatgtaaatttctgtggttgctatcttatgtaaaatatagtaaaaatttattgtatatagtttctattaaatgttaaagaaaatgttatgaaaatatcaaacagtcacctgaattgaatgcatgttttgtttgagaatatagtttctttttcgcggttttggggacctgtctctgatgggaaagggaagttgggacagatgatacttccatcccaagaagtaaataaatcttcagtagctc

SEQ ID NO: 440708 - DNA, 2347 bp, Homo sapiens
aagcagtgtcagagtcagtctcgcttcctgaggcttccaggagccaggatctccggtgactggagccgtcggacaaaatggcgctcgcataggcttccgaggccaggcccagtcgtgcgctctgaggcaggccgggacaaaggcggcgtgcggggaggcggcgtggccgccgcgtggggctggtgttgtcgcttcccttcgtgctgcagctgtgcgagtcctgaagatacattcagcgtggttttggttatgaacaggattcggattcacgtcttgccaaccaatcgggggaggatcactccagtgcccaggtctcaggaacctctgtcttgtgcattcactcatcgtccatgctctcaccctcgtctggaggggcaggagttttgcattaagcatatccttgaagacaagaatgcacccttcaagcagtgtagttatatatcgacgaagaatggaaaaagatgtcccaatgctgccccaaagccagagaagaaagatggggtgtccttctgtgctgaacatgtccgtaggaatgccctggcacttcatgctcaaatgaagaagaccaacccagggcctgtgggtgaaacactcctgtgccagctgagctcatatgctaagacagagctggggtctcagactccagaaagtagtcgcagtgaagccagccgaatactagatgaagacagctggagtgatggggagcaggaacccattactgtggatcagacatggagaggtgaccctgacagtgaagctgatagcatagacagtgatcaagaagatcccctaaaacatgctggtgtctacacagcagaagaagtggccctgattatgcgtgaaaagctaattcgtttgcagtcgttgtatattgatcagtttaaacgacttcagcatctgctcaaggagaagaagcgccgatacttacataatcgcaaagtggaacatgaagctctaggcagtagtctcctgactggcccagagggacttttggccaaagaacgagagaacttaaagcgattaaaatgtctgcgacgataccgccagcgctatggagtggaagccttactgcataggcagttgaaggaacggagaatgctggccacagatggtgctgcccaacaggcccataccactcgttccagtcagaggtgcttggcctttgtggatgatgttcgttgttccaatcagtctcttccaatgaccagacactgccttacccatatttgtcaggatacgaatcaggttctcttcaagtgctgccagggatctgaagaggtaccctgcaacaaacctgttcctgtaagcctctctgaggatccctgctgcccactgcatttccagttgcctcctcagatgtataagcccgagcaggtactgtctgtgccagacgatctggaagccggccccatggatctgtacttgagtgctgctgagcttcagcccactgagagtttacctctggagttcagtgatgacttggatgttgtgggtgatggtatgcagtgtcctccttcacctttgctttttgatccttcactaacccttgaagatcatttagtcaaagaaattgctgaagacacagtggatattttgggccagatgcagatggctggagatgggtgcagatcccagggatctcgaaattctgagaaagcctctgcaccattgtctcagagtggattggctactgcaaatgggaagccagaacccacttctattagttgatagtttggggaaccattttactttggtggatttaaatttctcgttcttcaaagaagtatttctgatcatctctcacaaaacacaggcaacccagactaccttgtttttcttctggattgagtattatagtcaaacgtaaagccaaattttgaggacgtggaccgtgggtttcttcccactcagggcaaggaagagaaagagagataatccctatcaaagcttctgggattatttgggactatacctaaaaggaaagtgacatctttgtaatgggatttcccaagtcatggatagaaatccacttaagtagctaggtgggagctgtctttgtgagtggtgtctttgagatactgatggccctaatatcggttatctctatctgaagacctgcagtttagcttttcttcacctctacttaattgggcagtctttaacccctttccctggtgaactctggctttttatcctctgagaaaacagcccacaggactgggtcctccttatccgtcttgcttttaacctatgtaaatttctgtggttgctatcttatgtaaaatatagtaaaaatttattgtatatagtttctattaaatgttaaagaaaatgttatgaaaatatc

SEQ ID NO: 440709 - DNA, 2395 bp, Homo sapiens
tagagaagggcgagcggcgcggcagagtgcggcgcagcgcagctcctgaggttttggttatgaacaggattcggattcacgtcttgccaaccaatcgggggaggatcactccagtgcccaggtctcaggaacctctgtcttgtgcattcactcatcgtccatgctctcaccctcgtctggaggggcaggagttttgcattaagcatatccttgaagacaagaatgcacccttcaagcagtgtagttatatatcgacgaagaatggaaaaagatgtcccaatgctgccccaaagccagagaagaaagatggggtgtccttctgtgctgaacatgtccgtaggaatgccctggcacttcatgctcaaatgaagaagaccaacccagggcctgtgggtgaaacactcctgtgccagctgagctcatatgctaagacagagctggggtctcagactccagaaagtagtcgcagtgaagccagccgaatactagatgaagacagctggagtgatggggagcaggaacccattactgtggatcagacatggagaggtgaccctgacagtgaagctgatagcatagacagtgatcaagaagatcccctaaaacatgctggtgtctacacagcagaagaagtggccctgattatgcgtgaaaagctaattcgtttgcagtcgttgtatattgatcagtttaaacgacttcagcatctgctcaaggagaagaagcgccgatacttacataatcgcaaagtggaacatgaagctctaggcagtagtctcctgactggcccagagggacttttggccaaagaacgagagaacttaaagcgattaaaatgtctgcgacgataccgccagcgctatggagtggaagccttactgcataggcagttgaaggaacggagaatgctggccacagatggtgctgcccaacaggcccataccactcgttccagtcagaggtgcttggcctttgtggatgatgttcgttgttccaatcagtctcttccaatgaccagacactgccttacccagaaagatgcgactgccattggtgacctgttaactctttactgtggtctaatggagacagcactcgactgaaagtgaaggacccagactctagttatatttgtcaggatacgaatcaggttctcttcaagtgctgccagggatctgaagaggtaccctgcaacaaacctgttcctgtaagcctctctgaggatccctgctgcccactgcatttccagttgcctcctcagatgtataagcccgagcaggtactgtctgtgccagacgatctggaagccggccccatggatctgtacttgagtgctgctgagcttcagcccactgagagtttacctctggagttcagtgatgacttggatgttgtgggtgatggtatgcagtgtcctccttcacctttgctttttgatccttcactaacccttgaagatcatttagtcaaagaaattgctgaagacacagtggatattttgggccagatgcagatggctggagatgggtgcagatcccagggatctcgaaattctgagaaagcctctgcaccattgtctcagagtggattggctactgcaaatgggaagccagaacccacttctattagttgatagtttggggaaccattttactttggtggatttaaatttctcgttcttcaaagaagtatttctgatcatctctcacaaaacacaggcaacccagactaccttgtttttcttctggattgagtattatagtcaaacgtaaagccaaattttgaggacgtggaccgtgggtttcttcccactcagggcaaggaagagaaagagagataatccctatcaaagcttctgggattatttgggactatacctaaaaggaaagtgacatctttgtaatgggatttcccaagtcatggatagaaatccacttaagtagctaggtgggagctgtctttgtgagtggtgtctttgagatactgatggccctaatatcggttatctctatctgaagacctgcagtttagcttttcttcacctctacttaattgggcagtctttaacccctttccctggtgaactctggctttttatcctctgagaaaacagcccacaggactgggtcctccttatccgtcttgcttttaacctatgtaaatttctgtggttgctatcttatgtaaaatatagtaaaaatttattgtatatagtttctattaaatgttaaagaaaatgttatgaaaatatcaaacagtcacctgaattgaatgcatgttttgtttgagaatatagtttctttttcgcggttttggggacctgtctctgatgggaaagggaagttgggacagatgatacttccatcccaagaagtaaataaatcttcagtagctc

SEQ ID NO: 440710 - DNA, 2242 bp, Homo sapiens
  misc_feature (16)..(16): n is a, c, g, or t
  misc_feature (46)..(46): n is a, c, g, or t
ggtgacctagaggatnccattgccacgctcggttatgtccagcganttttttaatcttctgtagagacggggtctcactgtattgcctgggttggtctccaactcctggcctcaagtgatcctcctcccgtgcctcccaaagtgctgggattacaagggtgaaccacttcatccgtcctgttatttccctttaataaagtcaaatgagttgaccttgggccagttaaattcctctgacttgcatttttagaaatgaatgtaacggtcattttaattccctaaaaatgatttaaagattagggactgtgaacattattgaacactttcaagaaggaacttataaaatattaatgttttgtcccttcagggtgtccttctgtgctgaacatgtccgtaggaatgccctggcacttcatgctcaaatgaagaagaccaacccagggcctgtgggtgaaacactcctgtgccagctgagctcatatgctaagacagagctggggtctcagactccagaaagtagtcgcagtgaagccagccgaatactagacatgctggtgtctacacagcagaagaagtggccctgattatgcgtgaaaagctaattcgtttgcagtcgttgtatattgatcagtttaaacgacttcagcatctgctcaaggagaagaagcgccgatacttacataatcgcaaagtggaacatgaagctctaggcagtagtctcctgactggcccagagggacttttggccaaagaacgagagaacttaaagcgattaaaatgtctgcgacgataccgccagcgctatggagtggaagccttactgcataggcagttgaaggaacggagaatgctggccacagatggtgctgcccaacaggcccataccactcgttccagtcagaggtgcttggcctttgtggatgatgttcgttgttccaatcagtctcttccaatgaccagacactgccttacccatatttgtcaggatacgaatcaggttctcttcaagtgctgccagggatctgaagaggtaccctgcaacaaacctgttcctgtaagcctctctgaggatccctgctgcccactgcatttccagttgcctcctcagatgtataagcccgagcaggtactgtctgtgccagacgatctggaagccggccccatggatctgtacttgagtgctgctgagcttcagcccactgagagtttacctctggagttcagtgatgacttggatgttgtgggtgatggtatgcagtgtcctccttcacctttgctttttgatccttcactaacccttgaagatcatttagtcaaagaaattgctgaagacacagtggatattttgggccagatgcagatggctggagatgggtgcagatcccagggatctcgaaattctgagaaagcctctgcaccattgtctcagagtggattggctactgcaaatgggaagccagaacccacttctattagttgatagtttggggaaccattttactttggtggatttaaatttctcgttcttcaaagaagtatttctgatcatctctcacaaaacacaggcaacccagactaccttgtttttcttctggattgagtattatagtcaaacgtaaagccaaattttgaggacgtggaccgtgggtttcttcccactcagggcaaggaagagaaagagagataatccctatcaaagcttctgggattatttgggactatacctaaaaggaaagtgacatctttgtaatgggatttcccaagtcatggatagaaatccacttaagtagctaggtgggagctgtctttgtgagtggtgtctttgagatactgatggccctaatatcggttatctctatctgaagacctgcagtttagcttttcttcacctctacttaattgggcagtctttaacccctttccctggtgaactctggctttttatcctctgagaaaacagcccacaggactgggtcctccttatccgtcttgcttttaacctatgtaaatttctgtggttgctatcttatgtaaaatatagtaaaaatttattgtatatagtttctattaaatgttaaagaaaatgttatgaaaatatcaaacagtcacctgaattgaatgcatgttttgtttgagaatatagtttctttttcgcggttttggggacctgtctctgatgggaaagggaagttgggacagatgatacttccatcccaagaagtaaataaatcttcagtagctc

SEQ ID NO: 440711 - DNA, 2473 bp, Homo sapiens
ctctcttgcctgccgccatgtgcctttcgccttctgccgtgattgtgaggcctccccagccatatggaagttcaggatgtctgcccgtggcccggctatcggcatcgacctgggcaccacctattcgtgcgtcggggtcttccaacatggcaaggtggagatcatcgccaacgaccagggcaatcgcaccacccccagctacgtggccttcacggacaccgagcgcctcatcggcgacgccgccaagaaccaggtggccatgaaccccaccaacaccatcttcgacgccaagaggctgattggacggaaattcgaggatgccacagtgcagtcggatatgaaacactggccgttccgggtggtgagcgagggaggcaagcccaaagtgcaagtagagtacaagggggagaccaagaccttcttcccagaggagatatcctccatggtcctcacgaagatgaaggagatcgcggaagcctacctggggggcaaggtgcacagcgcggtcataacggtcccggcctatttcaacgactcgcagcgccaggccaccaaggacgcaggcaccatcacggggctcaatgtgctgcgcatcatcaacgagcccacggcggcggccatcgcctacggcctggacaagaagggctgcgcgggcggcgagaagaacgtgctcatctttgacctgggcggtggcactttcgacgtgtccatcctgaccatcgaggatggcatcttcgaggtgaagtccacggccggggatacccacctgggcggtgaggacttcgacaaccgcatggtgagccacctggcggaggagttcaagcgcaagcacaagaaggacattgggcccaacaagcgcgccgtgaggcggctgcgcaccgcttgcgagcgcgccaagcgcaccctgagctcgtccacgcaggcgagcatcgagatcgactcgctctacgagggcgtggacttctatacgtccatcacgcgcgcccgcttcgaggagctcaatgccgacctctttcgcgggaccctggagccggtggagaaggcgctgcgcgacgccaagctggacaagggccagatccaggagatcgtgctggtgggcggctccactcgtatccccaagatccagaagctgctgcaggatttcttcaacggcaaggagctgaacaagagcatcaaccccgacgaggcggtggcctatggcgccgcggtgcaggcggccatcctcatcggcgacaaatcagagaatgtgcaggacctgctgctactcgacgtgaccccgttgtcgctgggcatcgagacagctggcggtgtcatgaccccactcatcaagaggaacaccacgatccccaccaagcagacgcagaccttcaccacctactcggacaaccagagcagcgtactggtgcaggtatacgagggcgaacgggccatgaccaaggacaataacctgctgggcaagttcgacctgaccgggattccccctgcgcctcgcggggtcccccaaatcgaggttaccttcgacattgacgccaatggcatccttaacgttaccgccgccgacaagagcaccggtaaggaaaacaaaatcaccatcaccaatgacaaaggtcgtctgagcaaggacgacattgaccggatggtgcaggaggcggagcggtacaaatcggaagatgaggcgaatcgcgaccgagtcgcggccaaaaacgccctggagtcctatacctacaacatcaagcagacggtggaagacgagaaactgaggggcaagattagcgagcaggacaaaaacaagatcctcgacaagtgtcaggaggtgatcaactggctcgaccgaaaccagatggcagagaaagatgagtatgaacacaagcagaaagagctcgaaagagtttgcaaccccatcatcagcaaactttaccaaggtggtcctggcggcggcagcggcggcggcggttcaggagcctccgggggacccaccatcgaagaagtggactaagcttgcactcaagtcagcgtaaacctctttgcctttctctctctctcttttttttttgtttgtttctttgaaatgtccttgtgccaagtacgagatctattgttggaagtctttggtatatgcaaatgaaaggagaggtgcaacaacttagtttaattataaaagttccaaagtttgttttttaaaaacattattcgaggtttctctttaatgcattttgcgtgtttgctgacttgagcatttttgattagttcgtgcatggagatttgtttgagatgagaaaccttaagtttgcacacctgttctgtagaagcttggaaacagtaaaatatataggagcttaaattgtttatttttatgtactactttaaaactaaactgaacattgcagtaatgttaaggacaggtatactttttgcaaacaaatgcataaatgcaaatgtaaagtaaagctgaaattgatctcaaaaaaaaaat

SEQ ID NO: 440712 - DNA, 2787 bp, Homo sapiens
tagcggagccagcagcaggaggcgcgcgaggcaccacggcctggcggccgagagtcagggaggaacctcatttacataacggccgcccctctgtctcctggcgggggccggagtcccgcccctcgtccaacttgaaatctgttgggtcacgggccagtcactccgacctaggcaagcctgtggtggagctggaagagtttgtgagggcggtcccgggagcggattgggtctgggagttcccagaggcggctataagaaccgggaactgggcgcggggagctgagttgctggtagtgcccgtggtgcttggttcgaggtggccgttagttgactccgcggagttcatctccctggttttcccgtcctaacgtcgctcgcctttcagtcaggatgtctgcccgtggcccggctatcggcatcgacctgggcaccacctattcgtgcgtcggggtcttccaacatggcaaggtggagatcatcgccaacgaccagggcaatcgcaccacccccagctacgtggccttcacggacaccgagcgcctcatcggcgacgccgccaagaaccaggtggccatgaaccccaccaacaccatcttcgacgccaagaggctgattggacggaaattcgaggatgccacagtgcagtcggatatgaaacactggccgttccgggtggtgagcgagggaggcaagcccaaagtgcaagtagagtacaagggggagaccaagaccttcttcccagaggagatatcctccatggtcctcacgaagatgaaggagatcgcggaagcctacctggggggcaaggtgcacagcgcggtcataacggtcccggcctatttcaacgactcgcagcgccaggccaccaaggacgcaggcaccatcacggggctcaatgtgctgcgcatcatcaacgagcccacggcggcggccatcgcctacggcctggacaagaagggctgcgcgggcggcgagaagaacgtgctcatctttgacctgggcggtggcactttcgacgtgtccatcctgaccatcgaggatggcatcttcgaggtgaagtccacggccggggatacccacctgggcggtgaggacttcgacaaccgcatggtgagccacctggcggaggagttcaagcgcaagcacaagaaggacattgggcccaacaagcgcgccgtgaggcggctgcgcaccgcttgcgagcgcgccaagcgcaccctgagctcgtccacgcaggcgagcatcgagatcgactcgctctacgagggcgtggacttctatacgtccatcacgcgcgcccgcttcgaggagctcaatgccgacctctttcgcgggaccctggagccggtggagaaggcgctgcgcgacgccaagctggacaagggccagatccaggagatcgtgctggtgggcggctccactcgtatccccaagatccagaagctgctgcaggatttcttcaacggcaaggagctgaacaagagcatcaaccccgacgaggcggtggcctatggcgccgcggtgcaggcggccatcctcatcggcgacaaatcagagaatgtgcaggacctgctgctactcgacgtgaccccgttgtcgctgggcatcgagacagctggcggtgtcatgaccccactcatcaagaggaacaccacgatccccaccaagcagacgcagaccttcaccacctactcggacaaccagagcagcgtactggtgcaggtatacgagggcgaacgggccatgaccaaggacaataacctgctgggcaagttcgacctgaccgggattccccctgcgcctcgcggggtcccccaaatcgaggttaccttcgacattgacgccaatggcatccttaacgttaccgccgccgacaagagcaccggtaaggaaaacaaaatcaccatcaccaatgacaaaggtcgtctgagcaaggacgacattgaccggatggtgcaggaggcggagcggtacaaatcggaagatgaggcgaatcgcgaccgagtcgcggccaaaaacgccctggagtcctatacctacaacatcaagcagacggtggaagacgagaaactgaggggcaagattagcgagcaggacaaaaacaagatcctcgacaagtgtcaggaggtgatcaactggctcgaccgaaaccagatggcagagaaagatgagtatgaacacaagcagaaagagctcgaaagagtttgcaaccccatcatcagcaaactttaccaaggtggtcctggcggcggcagcggcggcggcggttcaggagcctccgggggacccaccatcgaagaagtggactaagcttgcactcaagtcagcgtaaacctctttgcctttctctctctctcttttttttttgtttgtttctttgaaatgtccttgtgccaagtacgagatctattgttggaagtctttggtatatgcaaatgaaaggagaggtgcaacaacttagtttaattataaaagttccaaagtttgttttttaaaaacattattcgaggtttctctttaatgcattttgcgtgtttgctgacttgagcatttttgattagttcgtgcatggagatttgtttgagatgagaaaccttaagtttgcacacctgttctgtagaagcttggaaacagtaaaatatataggagcttaaattgtttatttttatgtactactttaaaactaaactgaacattgcagtaatgttaaggacaggtatactttttgcaaacaaatgcataaatgcaaatgtaaagtaaagctgaaattgatctcaaaaaaaaaat

SEQ ID NO: 440713 - DNA, 2708 bp, Homo sapiens
tagcggagccagcagcaggaggcgcgcgaggcaccacggcctggcggccgagagtcagggaggaacctcatttacataacggccgcccctctgtctcctggcgggggccggagtcccgcccctcgtccaacttgaaatctgttgggtcacgggccagtcactccgacctaggcaagcctgtggtggagctggaagagtttgtgagggcggtcccgggagcggattgggtctgggagttcccagaggcggctataagaaccgggaactgggcgcggggagctgagttgctggtagtgcccgtggtgcttggttcgaggtggccgttagttgactccgcggagttcatctccctggttttcccgtcctaacgtcgctcgcctttcagtcaggatgtctgcccgtggcccggctatcggcatcgacctgggcaccacctattcgtgcgtcggggtcttccaacatggcaaggtggagatcatcgccaacgaccagggcaatcgcaccacccccagctacgtggccttcacggacaccgagcgcctcatcggcgacgccgccaagaaccaggtggccatgaaccccaccaacaccatcttcgacgccaagaggctgattggacggaaattcgaggatgccacagtgcagtcggatatgaaacactggccgttccgggtggtgagcgagggaggcaagcccaaagtgcaagtagagtacaagggggagaccaagaccttcttcccagaggagatatcctccatggtcctcacgaagatgaaggagatcgcggaagcctacctggggggcaaggtgcacagcgcggtcataacggtcccggcctatttcaacgactcgcagcgccaggccaccaaggacgcaggcaccatcacggggctcaatgtgctgcgcatcatcaacgagcccacggtggcactttcgacgtgtccatcctgaccatcgaggatggcatcttcgaggtgaagtccacggccggggatacccacctgggcggtgaggacttcgacaaccgcatggtgagccacctggcggaggagttcaagcgcaagcacaagaaggacattgggcccaacaagcgcgccgtgaggcggctgcgcaccgcttgcgagcgcgccaagcgcaccctgagctcgtccacgcaggcgagcatcgagatcgactcgctctacgagggcgtggacttctatacgtccatcacgcgcgcccgcttcgaggagctcaatgccgacctctttcgcgggaccctggagccggtggagaaggcgctgcgcgacgccaagctggacaagggccagatccaggagatcgtgctggtgggcggctccactcgtatccccaagatccagaagctgctgcaggatttcttcaacggcaaggagctgaacaagagcatcaaccccgacgaggcggtggcctatggcgccgcggtgcaggcggccatcctcatcggcgacaaatcagagaatgtgcaggacctgctgctactcgacgtgaccccgttgtcgctgggcatcgagacagctggcggtgtcatgaccccactcatcaagaggaacaccacgatccccaccaagcagacgcagaccttcaccacctactcggacaaccagagcagcgtactggtgcaggtatacgagggcgaacgggccatgaccaaggacaataacctgctgggcaagttcgacctgaccgggattccccctgcgcctcgcggggtcccccaaatcgaggttaccttcgacattgacgccaatggcatccttaacgttaccgccgccgacaagagcaccggtaaggaaaacaaaatcaccatcaccaatgacaaaggtcgtctgagcaaggacgacattgaccggatggtgcaggaggcggagcggtacaaatcggaagatgaggcgaatcgcgaccgagtcgcggccaaaaacgccctggagtcctatacctacaacatcaagcagacggtggaagacgagaaactgaggggcaagattagcgagcaggacaaaaacaagatcctcgacaagtgtcaggaggtgatcaactggctcgaccgaaaccagatggcagagaaagatgagtatgaacacaagcagaaagagctcgaaagagtttgcaaccccatcatcagcaaactttaccaaggtggtcctggcggcggcagcggcggcggcggttcaggagcctccgggggacccaccatcgaagaagtggactaagcttgcactcaagtcagcgtaaacctctttgcctttctctctctctcttttttttttgtttgtttctttgaaatgtccttgtgccaagtacgagatctattgttggaagtctttggtatatgcaaatgaaaggagaggtgcaacaacttagtttaattataaaagttccaaagtttgttttttaaaaacattattcgaggtttctctttaatgcattttgcgtgtttgctgacttgagcatttttgattagttcgtgcatggagatttgtttgagatgagaaaccttaagtttgcacacctgttctgtagaagcttggaaacagtaaaatatataggagcttaaattgtttatttttatgtactactttaaaactaaactgaacattgcagtaatgttaaggacaggtatactttttgcaaacaaatgcataaatgcaaatgtaaagtaaagctgaaattgatctcaaaaaaaaaat

SEQ ID NO: 440714 - DNA, 478 bp, Homo sapiens
  misc_feature (56)..(56): n is a, c, g, or t
  misc_feature (154)..(154): n is a, c, g, or t
ttatggaggcttccagaacccaggtgaaggcctcgggaggcgagtcttgctggagntggagacaaagtctctgaaactggaacattcctgatctctccccacaccagaggccagcagacctctttcctgaggactttctgtttaaaggaggacngaggaggaggttggtgacagtcaggcctgggaggagcccacaaactggagcacagagacatggaacctagctacttcctgggaggtggggcggggactacggagaaggtgcagccaggctgtggcaaagggccccagtcacagccttggctgggaaggagggacgacagctgaaggtcgactaaaacaaagtctgttttcatgaaaaaaaaaatttaaaactaaactgaacattgcagtaatgttaaggacaggtatactttttgcaaacaaatgcataaatgcaaatgtaaagtaaagctgaaattgatctcaaaaaaaaaat

SEQ ID NO: 440715 - DNA, 2425 bp, Homo sapiens
ggaacgttcacggactgtcttggccccggtgtgcccccgggcttaatccgtgcctatcgacctgggcaccacctattcgtgcgtcggggtcttccaacatggcaaggtggagatcatcgccaacgaccagggcaatcgcaccacccccagctacgtggccttcacggacaccgagcgcctcatcggcgacgccgccaagaaccaggtggccatgaaccccaccaacaccatcttcgacgccaagaggctgattggacggaaattcgaggatgccacagtgcagtcggatatgaaacactggccgttccgggtggtgagcgagggaggcaagcccaaagtgcaagtagagtacaagggggagaccaagaccttcttcccagaggagatatcctccatggtcctcacgaagatgaaggagatcgcggaagcctacctggggggcaaggtgcacagcgcggtcataacggtcccggcctatttcaacgactcgcagcgccaggccaccaaggacgcaggcaccatcacggggctcaatgtgctgcgcatcatcaacgagcccacggcggcggccatcgcctacggcctggacaagaagggctgcgcgggcggcgagaagaacgtgctcatctttgacctgggcggtggcactttcgacgtgtccatcctgaccatcgaggatggcatcttcgaggtgaagtccacggccggggatacccacctgggcggtgaggacttcgacaaccgcatggtgagccacctggcggaggagttcaagcgcaagcacaagaaggacattgggcccaacaagcgcgccgtgaggcggctgcgcaccgcttgcgagcgcgccaagcgcaccctgagctcgtccacgcaggcgagcatcgagatcgactcgctctacgagggcgtggacttctatacgtccatcacgcgcgcccgcttcgaggagctcaatgccgacctctttcgcgggaccctggagccggtggagaaggcgctgcgcgacgccaagctggacaagggccagatccaggagatcgtgctggtgggcggctccactcgtatccccaagatccagaagctgctgcaggatttcttcaacggcaaggagctgaacaagagcatcaaccccgacgaggcggtggcctatggcgccgcggtgcaggcggccatcctcatcggcgacaaatcagagaatgtgcaggacctgctgctactcgacgtgaccccgttgtcgctgggcatcgagacagctggcggtgtcatgaccccactcatcaagaggaacaccacgatccccaccaagcagacgcagaccttcaccacctactcggacaaccagagcagcgtactggtgcaggtatacgagggcgaacgggccatgaccaaggacaataacctgctgggcaagttcgacctgaccgggattccccctgcgcctcgcggggtcccccaaatcgaggttaccttcgacattgacgccaatggcatccttaacgttaccgccgccgacaagagcaccggtaaggaaaacaaaatcaccatcaccaatgacaaaggtcgtctgagcaaggacgacattgaccggatggtgcaggaggcggagcggtacaaatcggaagatgaggcgaatcgcgaccgagtcgcggccaaaaacgccctggagtcctatacctacaacatcaagcagacggtggaagacgagaaactgaggggcaagattagcgagcaggacaaaaacaagatcctcgacaagtgtcaggaggtgatcaactggctcgaccgaaaccagatggcagagaaagatgagtatgaacacaagcagaaagagctcgaaagagtttgcaaccccatcatcagcaaactttaccaaggtggtcctggcggcggcagcggcggcggcggttcaggagcctccgggggacccaccatcgaagaagtggactaagcttgcactcaagtcagcgtaaacctctttgcctttctctctctctcttttttttttgtttgtttctttgaaatgtccttgtgccaagtacgagatctattgttggaagtctttggtatatgcaaatgaaaggagaggtgcaacaacttagtttaattataaaagttccaaagtttgttttttaaaaacattattcgaggtttctctttaatgcattttgcgtgtttgctgacttgagcatttttgattagttcgtgcatggagatttgtttgagatgagaaaccttaagtttgcacacctgttctgtagaagcttggaaacagtaaaatatataggagcttaaattgtttatttttatgtactactttaaaactaaactgaacattgcagtaatgttaaggacaggtatactttttgcaaacaaatgcataaatgcaaatgtaaagtaaagctgaaattgatctcaaaaaaaaaat

SEQ ID NO: 440716 - DNA, 538 bp, Homo sapiens
ccctgtctcactcccccacggagactcaatttactttccatgtccacatccccagtgcttgcggaagatatcccgctaagagagagacatgtcaaaggggctgctgctgttgctgctgctgagcatgggcgggacatgggcatccaaggagccgcttcggccacggtgccgccccatcaatgccaccctggctgtggagaaggagggctgccccgtgtgcatcaccgtcaacaccaccatctgtgccggctactgccccaccatgacccgcgtgctgcagggggtcctgccggccctgcctcaggtggtgtgcaactaccgcgatgtgcgcttcgagtccatccggctccctggctgcccgcgcggcgtgaaccccgtggtctcctacgccgtggctctcagctgtcaatgtgcactctgccgccgcagcaccactgactgcgggggtcccaaggaccaccccttgacctgtgatgacccccgcttccaggcctcctcttcctcaaaggcccctccccccagccttccaagcccatcc

SEQ ID NO: 440717 - DNA, 889 bp, Homo sapiens
ggcttcaatccagcactttgctcgggtcacggcctcctcctggctcccaggaccccaccataggcagaggcaggccttcctacaccctactccctgtgcctccaggctcgactagtccctagcactcgacgactgagtctctgagatcacttcaccgtggtctccgcctcacccttggcgctggaccagtgagaggagagggctggggcgctccgctgagccactcctgcgcccccctggccttgtctacctcttgccccccgaaggtttagtgtcgagctcaccccagcatcctacaacctcctggtggccttgccgcccccacaaccccgaggtataaagccaggtacacgaggcaggggacgcaccaaggatggagatgttccaggggctgctgctgttgctgctgctgagcatgggcggggacatgggcatccaaggagccgcttcggccacggtgccgccccatcaatgccaccctggctgtggagaaggagggctgccccgtgtgcatcaccgtcaacaccaccatctgtgccggctactgccccaccatgacccgcgtgctgcagggggtcctgccggccctgcctcaggtggtgtgcaactaccgcgatgtgcgcttcgagtccatccggctccctggctgcccgcgcggcgtgaaccccgtggtctcctacgccgtggctctcagctgtcaatgtgcactctgccgccgcagcaccactgactgcgggggtcccaaggaccaccccttgacctgtgatgacccccgcttccaggactcctcttcctcaaaggcccctccccccagccttccaagtccatcccgactcccggggccctcggacaccccgatcctcccacaataaaggcttctcaatccgca

SEQ ID NO: 440718 - DNA, 951 bp, Homo sapiens
  misc_feature (844)..(844): n is a, c, g, or t
  misc_feature (852)..(852): n is a, c, g, or t
  misc_feature (856)..(856): n is a, c, g, or t
  misc_feature (863)..(863): n is a, c, g, or t
  misc_feature (866)..(866): n is a, c, g, or t
  misc_feature (872)..(872): n is a, c, g, or t
ggcttcaatccagcactttgctcgggtcacggcctcctcctggctcccaggaccccaccataggcagaggcaggccttcctacaccctactccctgtgcctccaggctcgactagtccctagcactcgacgactgagtctctgagatcacttcaccgtggtctccgcctcacccttggcgctggaccagtgagaggagagggctggggcgctccgctgagccactcctgcgcccccctggccttgtctacctcttgccccccgaaggtttagtgtcgagctcaccccagcatcctacaacctcctggtggccttgccgcccccacaaccccgaggtataaagccaggtacacgaggcaggggacgcaccaaggatggagatgttccaggggctgctgctgttgctgctgctgagcatgggcggggacatgggcatccaaggagccgcttcggccacggtgccgccccatcaatgccaccctggctgtggagaaggagggctgccccgtgtgcatcaccgtcaacaccaccatctgtgccggctactgccccaccatgacccgcgtgctgcagggggtcctgccggccctgcctcaggtggtgtgcaactaccgcgatgtgcgcttcgagtccatccggctccctggctgcccgcgcggcgtgaaccccgtggtctcctacgccgtggctctcagctgtcaatgtgcactctgccgccgcagcaccactgactgcgggggtcccaaggaccaccccttgacctgtgatgacccccgcttccaggactcctcttcctcaaaggcccctccccccagccttccaagtccatcccgactcccgggctngaaccganctcnaataagnttncatcgnaaaaaaaaaaccgaggaataatcgtgcgacaaggaaaaaggaagggaataaatcacacaactttgaaagggaagcgacc

SEQ ID NO: 440719 - DNA, 681 bp, Homo sapiens
attttaaaaaaagcgactcgtgtagagctcctagaacatagcaggaatatcggcattgtggtgacagcaattgagacgttcaaaagcagcttccagagctcccagccgggagataccctggggctcttggtccgaggcttgaagcgggaggacttgcggcggggcctggtcatggtcaagccaggttccatcaagccccaccagaaggtggaggcccaggtttacatcctcagcaaggaggaaggtggccgccacaagccctttgtgtcccacttcatgcctgtcatgttctccctgacttgggacatggcctgtcggattatcctgcccccagagaaggagcttgccatgcccggggaggacctgaagttcaacctaatcttgcggcagccaatgatcttagagaaaggccagcgtttcaccctgcgagatggcaaccggactattggcaccggtctagtcaccaacacgctggccatgactgaggaggagaagaatatcaaatggggttgagtgtgcagatctctgctcagcttcccttgcgtttaaggcctgccctagccagggctccctcctgcttccagtaccctctcatggcataggctgcaacccagcagagggcagctagatggacatttcccctgctcggaagaacagcccgcgtgctggagcatacttttg

SEQ ID NO: 440720 - DNA, 1424 bp, Homo sapiens
attttaaaaaaagcgactcgtgtagagctcctagaacatagcaggaatatcggcattgtggtgacagcaattgagacgttcaaaagcagcttccagagctcccagccgggagataccctggggctcttggtccgaggcttgaagcgggaggacttgcggcggggcctggtcatggtcaagccaggttccatcaagccccaccagaaggtggaggcccaggtttacatcctcagcaaggaggaaggtggccgccacaagccctttgtgtcccacttcatgcctgtcatgttctccctgacttgggacatggcctgtcggattatcctgcccccagagaaggagcttgccatgcccggggaggacctgaagttcaacctaatcttgcggcagccaatgatcttagagaaaggccagcgtttcaccctgcgagatggcaaccggactattggcaccggtctagtcaccaacacgctggccatgactgaggaggagaagaatatcaaatggggttgagtgtgcagatctctgctcagcttcccttgcgtttaaggcctgccctagccagggctccctcctgcttccagtaccctctcatggcataggctgcaacccagcagagggcagctagatggacatttcccctgctcggaagggttggcctgcctggctggggaggtcagtaaactttgaatagtaagccaaaaaaaaaacacacacacccaaacaacacacacaaccgcgggggccctctcatccgcgggacgccgcacacaaacagggcgtctatcgaaacactgtgcgccaacctgtgggtccacatcacgcgtgtcacgtgtacaccgagagttttgttgctaaccaaagggctggaaacactagagccggtaccacaatataggacacccgatctaacatcccgcatacgcgccgactaacccgtgctatgattctgcaagtcacacgcaccaacaatcacaagaccacacacaccacccccgagccgccacgccatccacctagagcgaaacacacaccagcccgtaccagacccacacatcaacacaagaaggaacgcaaccgaacccgcacagcagagacacacaccccagagacacaacaccaactgatccccgaacacaaccaaacaacccaaccagacaaagagggaagccacgcagcctccgagagaacgtcacaggcgcagctggcgccagaagcggtgctaacgctgtcaccgaaaccagcagacgaccgacacaaggagaggcatgacagtacagcagagtctcggcccaccgacgccagcgagaagccacagcccgggcagggagcagcgagagcagcgctagcacggcccgcgccggcaacagtgtctgcaacagaagagcagcgggcagcccgcgccgcgaccgcggtacgtatca

SEQ ID NO: 440721 - DNA, 1833 bp, Homo sapiens
ggctgcctcctggtggtagcagccaatgacagccccatgccctagacccgagagcacttattactggccaaatagattggggtggagcatgtggtggtgtatgtgaacaaggctgatgctgtccaggactctgagatggtggagctggtggaactggagattcaggagctgttcactgagtttggctataaaggggaggagaccccagtcattgtaggctctactgtctgcccttgagggtcgggaccctgagttaggcctgaagtctgtgcagaagctactggatgctgtggacacttacatcccagtgcctgcccgggacctggagaagcctttcctgctgcctgtggaggcagtgtactccatgtctggccatggcaccatggtgacaggtatgctagagcatgacattttaaagaaaggagacaagcgtgagctcctaggacataataagaacatctgcactgtgctgacaggcattgagatgttccacaagagcctggagagggccgaggctggagataacctcggggccctggtccgaggcttgaagcgggaggacttgcggcggggcctggtcatggtcaagccaggttccatcaagccccaccagaaggtggaggcccaggtttacatcctcagcaaggaggaaggtggccgccacaagccctttgtgtcccacttcatgcctgtcatgttctccctgacttgggacatggcctgtcggattatcctgcccccagagaaggagcttgccatgcccggggaggacctgaagttcaacctaatcttgcggcagccaatgatcttagagaaaggccagcgtttcaccctgcgagatggcaaccggactattggcaccggtctagtcaccaacacgctggccatgactgaggaggagaagaatatcaaatggggttgagtgtgcagatctctgctcagcttcccttgcgtttaaggcctgccctagccagggctccctcctgcttccagtaccctctcatggcataggctgcaacccagcagagggcagctagatggacatttcccctgctcggaagggttggcctgcctggctggggaggtcagtaaactttgaatagtaagccaaaaaaaaaacacacacacccaaacaacacacacaaccgcgggggccctctcatccgcgggacgccgcacacaaacagggcgtctatcgaaacactgtgcgccaacctgtgggtccacatcacgcgtgtcacgtgtacaccgagagttttgttgctaaccaaagggctggaaacactagagccggtaccacaatataggacacccgatctaacatcccgcatacgcgccgactaacccgtgctatgattctgcaagtcacacgcaccaacaatcacaagaccacacacaccacccccgagccgccacgccatccacctagagcgaaacacacaccagcccgtaccagacccacacatcaacacaagaaggaacgcaaccgaacccgcacagcagagacacacaccccagagacacaacaccaactgatccccgaacacaaccaaacaacccaaccagacaaagagggaagccacgcagcctccgagagaacgtcacaggcgcagctggcgccagaagcggtgctaacgctgtcaccgaaaccagcagacgaccgacacaaggagaggcatgacagtacagcagagtctcggcccaccgacgccagcgagaagccacagcccgggcagggagcagcgagagcagcgctagcacggcccgcgccggcaacagtgtctgcaacagaagagcagcgggcagcccgcgccgcgaccgcggtacgtatca

SEQ ID NO: 440722 - DNA, 1819 bp, Homo sapiens
ccgcgttccgggcctcggagccgccttgaggaggatgagtccctggagctggttcctgctgcagaccctctgcctcctgcccacgggcgcagcttcgcggcgcggggcgcccggcaccgccaactgcgagctcaagccccaacaaagcgagctgaattccttcttgtggaccattaagcgagacccaccatcttacttctttggcacaatccatgtcccgtacacccgagtttgggacttcatccccgacaactctaaggaggctttcctgcagagcagcattgtgtactttgagttggatctcacagacccctataccatctcagctctcaccagctgtcagatgctgccacagggcgagaacctccaagatgtgctccccagggacatctactgccgcctcaagcgccacctggagtatgtcaagctcatgatgcccttgtggatgaccccagaccagcgcggcaaggggctctacgcagactacctcttcaatgctattgccggaaactgggagcgcaagaggcctgtctgggtgatgctcatggtcaactccctgactgaagtggacattaagtcccgtggagtgcctgtcttagacctgttccttgcccaggaggctgagcggctgaggaaacagactggggcagtggaaaaggtggaagagcagtgccatccattgaatgggttgaacttttcacaggtcatctttgctttgaaccagaccctcctgcagcaggaaagcctgcgagcaggcagtcttcagatcccctacacgacggaggatctcatcaaacactataactgcggggacctcagctccgtcatcctcagccatgacagctcccaggttcccaattttattaatgccacgctaccacctcaggagcgcatcactgctcaggagattgacagctacttacgccgggagctgatctacaagcggaatgagagaatagggaagcgggtgaaggcccttttggaggagttccctgacaaaggcttcttctttgcctttggagctggtcatttcatgggcaacaacacagtgctggatgttttgcggcgtgaaggctatgaggtagaacacgcccctgctggacgacccatccacaaagggaagagtaaaaagacctccacacggcccactctgtccaccatctttgctccaaaagtccctaccctggaagtaccggcaccagaagccgtatcctcagggcactcaacgctgcctccccttgtgtcccggcctggaagtgccgacacgcccagtgaggccgaacagaggttccggaagaagcggaggcggtcacagcggaggccgcgactccggcaattcagcgatctgtgggtccgcctggaggagagtgacatagtcccgcaactccaggtccctgtcctggacaggcacatctccactgaactgcggctccctcgccgtgggcattcccaccacagccagatggtggccagcagtgcctgcctgtctctctggactcctgtgttctgggtgctggtgctggctttccaaacagagacacccctcctgtaacgactggaagcaccaggctaagaacctgacccctcggacttgaagaatggccattcctgtactccacattctggtctagccttgttgggcccaatccagaagagactgctcttgaaaaagcggcccagtgttgattcttctctttccaaggaatgtgactttgggttatccaactttgggggcaggtgtacagttttgtaacatagtgagttgtgtgaaaataaattataaatgagttgtatgaaaataaatacctttttttgtata

SEQ ID NO: 440723 - DNA, 1497 bp, Homo sapiens
ccgcgttccgggcctcggagccgccttgaggaggatgagtccctggagctggttcctgctgcagaccctctgcctcctgcccacgggcgcagcttcgcggcgcggggcgcccggcaccgccaactgcgagctcaagccccaacaaagcgagctgaattccttcttgtggaccattaagcgagacccaccatcttacttctttggcacaatccatgtcccgtacacccgagtttgggacttcatccccgacaactctaaggaggctttcctgcagagcagcattgtgtactttgagttggatctcacagacccctataccatctcagctctcaccagctgtcagatgctgccacagggcgagaacctccaagatgtgctccccagggacatctactgccgcctcaagcgccacctggagtatgtcaagctcatgatgcccttgtggatgaccccagaccagcgcggcaaggggctctacgcagactacctcttcaatgctattgccggaaactgggagcgcaagaggcctgtctgggtgatgctcatggtcaactccctgactgaagtggacattaagtcccgtggagtgcctgtcttagacctgttccttgcccaggaggctgagcggctgaggaaacagactggggcagtggaaaaggtggaagagcagtgccatccattgaatgggttgaacttttcacaggtcatttcatgggcaacaacacagtgctggatgttttgcggcgtgaaggctatgaggtagaacacgcccctgctggacgacccatccacaaagggaagagtaaaaagacctccacacggcccactctgtccaccatctttgctccaaaagtccctaccctggaagtaccggcaccagaagccgtatcctcagggcactcaacgctgcctccccttgtgtcccggcctggaagtgccgacacgcccagtgaggccgaacagaggttccggaagaagcggaggcggtcacagcggaggccgcgactccggcaattcagcgatctgtgggtccgcctggaggagagtgacatagtcccgcaactccaggtccctgtcctggacaggcacatctccactgaactgcggctccctcgccgtgggcattcccaccacagccagatggtggccagcagtgcctgcctgtctctctggactcctgtgttctgggtgctggtgctggctttccaaacagagacacccctcctgtaacgactggaagcaccaggctaagaacctgacccctcggacttgaagaatggccattcctgtactccacattctggtctagccttgttgggcccaatccagaagagactgctcttgaaaaagcggcccagtgttgattcttctctttccaaggaatgtgactttgggttatccaactttgggggcaggtgtacagttttgtaacatagtgagttgtgtgaaaataaattataaatgagttgtatgaaaataaatacctttttttgtata

SEQ ID NO: 440724 - DNA, 2914 bp, Homo sapiens
ccgcgttccgggcctcggagccgccttgaggaggatgagtccctggagctggttcctgctgcagaccctctgcctcctgcccacgggcgcagcttcgcggcgcggggcgcccggcaccgccaactgcgagctcaagccccaacaaagcgagctgaattccttcttgtggaccattaagcgagacccaccatcttacttctttggcacaatccatgtcccgtacacccgagtttgggacttcatccccgacaactctaaggaggctttcctgcagagcagcattgtgtactttgagttggatctcacagacccctataccatctcagctctcaccagctgtcagatgctgccacagggcgagaacctccaagatgtgctccccagggacatctactgccgcctcaagcgccacctggagtatgtcaagctcatgatgcccttgtggatgaccccagaccagcgcggcaaggggctctacgcagactacctcttcaatgctattgccggaaactgggagcgcaagaggcctgtctgggtgatgctcatggtcaactccctgactgaagtggacattaagtcccgtggagtgcctgtcttagacctgttccttgcccaggaggctgagcggctgaggaaacagactggggcagtggaaaaggtggaagagcagtgccatccattgaatgggttgaacttttcacaggtcatctttgctttgaaccagaccctcctgcagcaggaaagcctgcgagcaggcagtcttcagatcccctacacgacggaggatctcatcaaacactataactgcggggacctcagctccgtcatcctcagccatgacagctcccaggttcccaattttattaatgccacgctaccacctcaggagcgcatcactgctcaggagattgacagctacttacgccgggagctgatctacaagcggaatgagagaatagggaagcgggtgaaggcccttttggaggagttccctgacaaaggcttcttctttgcctttggagctgcttcacagtagccttgaaaatcaggagccttgaactacagtagctgtgaaaactgtttgcctaatggttactggaggggacagaatgggttcaaagttcctccaaagctccatccttaaagaatcatcactatttgacatgtccaatagttccctgaaatttccattcccaagcttgtcttcatttgacctgactcagagcttgctctgtgtgaatagccctattcttagggtgtgtgttgaaaacaatcagtagcagctgtttaacatcatagttgctggaaatagcaatattaattgaagcttacaaggggctgcccaaaaaacttaaaagcaaaatcccatagggggtatagaaaagctctaaaatattcctagagagtcacatgcatgagaagagctgtgcacatgcccaggaaagacctgagaaggtcctaatctctcacctctggctgatcttgaggctctgtgtaagcagagtgtgaaagctaaggcaaagtcataaattgcctgttgaagcatcaaatacatgcccccaaactcacacagcccctctgcaaaggttgggaaacttgcaaggaatttaaggaaatctctgttcagtcattagccagccactaaactaactgagcagatccttcagtgatcacacacaacaaagaatacagactttacagacttagtcctagaaaatcactacacaaacagcaacaacaatgcacctgggactaagggagaggagatgagttccagagttggtatattatttaaatgtctagttttcaataaaaacaattataagacacagagcaaaactagaaagtatggcccatacccagggaaaaacaagcaaccaatagaagctgtccttgaggaagttaatatcttggacttactagaaaatgactttaacactagttattataaatatgttcaaaaaactaaaagaggccaggtgcggaggctcacgcctataatcccagcactttgggaggctgaagcaggtgggtcacctgaggtcaggagtttgagaccagcctgaccaatatggcaaaaccctatctctactaataatacaaaaattagccaggcgttgtggcgcacacctgtaatcccagctacttgggaggctgaagcaggagaactgcttgaaactgggaggaagaggttgcagtaagctgagatcacaccactgtactccagcctgggccacaagagtgaaactccatctccaaaaaaaaaaaaaaaaaaaaaaaccctaaaattaaccatatctaaagaattaaaggaaagtttgagaacaatatctcaccaatacagaatatcaataaaaatataaaaattattttaaaagaaccaaataggaattctggaatttaaagtgtaggaactgaaatgaaaaattcactacgggggctgaacagtagatttgaactggcagaagaagaatcaacatacatgaagataggttgattgagatgattcagtatgagaaagagaaaggaaaaggaatgaagaaaaatgaatagatcttcagatacctgtgagacaccctcaagtgtgccaatgtatacctaacgggagtcccagaagacaggagagaaaaaaagaaagaaataaaaagaatatttgaatttaaaattgcttgaaaatgtctcaaatttgatgaaaaatattactctgcacattcaacccatgaactataagttgtataaaatcaaaaagtttcacaccaaggcgtgtcatagccaaactgtcaaaagccaaagacacagaatcttgaaagcagtgagagcaaagcagacaagggatccccaataggattaacagcagatttctcatcagaagccatgcaagccagaaggctatgggagacatactcaaaatgct

SEQ ID NO: 440725 - DNA, 2356 bp, Homo sapiens
ggattaaggccctaataaaagaggtgtcatgcagccattcagttagcttgcccttctgtcttcttccatgtgaggatgcagcaagaaggccctcaccagaccaaaggccagtgccttgatctcggacttcccagcctccagaatggtcatctttgctttgaaccagaccctcctgcagcaggaaagcctgcgagcaggcagtcttcagatcccctacacgacggaggatctcatcaaacactataactgcggggacctcagctccgtcatcctcagccatgacagctcccaggttcccaattttattaatgccacgctaccacctcaggagcgcatcactgctcaggagattgacagctacttacgccgggagctgatctacaagcggaatgagagaatagggaagcgggtgaaggcccttttggaggagttccctgacaaaggcttcttctttgcctttggagctgcttcacagtagccttgaaaatcaggagccttgaactacagtagctgtgaaaactgtttgcctaatggttactggaggggacagaatgggttcaaagttcctccaaagctccatccttaaagaatcatcactatttgacatgtccaatagttccctgaaatttccattcccaagcttgtcttcatttgacctgactcagagcttgctctgtgtgaatagccctattcttagggtgtgtgttgaaaacaatcagtagcagctgtttaacatcatagttgctggaaatagcaatattaattgaagcttacaaggggctgcccaaaaaacttaaaagcaaaatcccatagggggtatagaaaagctctaaaatattcctagagagtcacatgcatgagaagagctgtgcacatgcccaggaaagacctgagaaggtcctaatctctcacctctggctgatcttgaggctctgtgtaagcagagtgtgaaagctaaggcaaagtcataaattgcctgttgaagcatcaaatacatgcccccaaactcacacagcccctctgcaaaggttgggaaacttgcaaggaatttaaggaaatctctgttcagtcattagccagccactaaactaactgagcagatccttcagtgatcacacacaacaaagaatacagactttacagacttagtcctagaaaatcactacacaaacagcaacaacaatgcacctgggactaagggagaggagatgagttccagagttggtatattatttaaatgtctagttttcaataaaaacaattataagacacagagcaaaactagaaagtatggcccatacccagggaaaaacaagcaaccaatagaagctgtccttgaggaagttaatatcttggacttactagaaaatgactttaacactagttattataaatatgttcaaaaaactaaaagaggccaggtgcggaggctcacgcctataatcccagcactttgggaggctgaagcaggtgggtcacctgaggtcaggagtttgagaccagcctgaccaatatggcaaaaccctatctctactaataatacaaaaattagccaggcgttgtggcgcacacctgtaatcccagctacttgggaggctgaagcaggagaactgcttgaaactgggaggaagaggttgcagtaagctgagatcacaccactgtactccagcctgggccacaagagtgaaactccatctccaaaaaaaaaaaaaaaaaaaaaaaccctaaaattaaccatatctaaagaattaaaggaaagtttgagaacaatatctcaccaatacagaatatcaataaaaatataaaaattattttaaaagaaccaaataggaattctggaatttaaagtgtaggaactgaaatgaaaaattcactacgggggctgaacagtagatttgaactggcagaagaagaatcaacatacatgaagataggttgattgagatgattcagtatgagaaagagaaaggaaaaggaatgaagaaaaatgaatagatcttcagatacctgtgagacaccctcaagtgtgccaatgtatacctaacgggagtcccagaagacaggagagaaaaaaagaaagaaataaaaagaatatttgaatttaaaattgcttgaaaatgtctcaaatttgatgaaaaatattactctgcacattcaacccatgaactataagttgtataaaatcaaaaagtttcacaccaaggcgtgtcatagccaaactgtcaaaagccaaagacacagaatcttgaaagcagtgagagcaaagcagacaagggatccccaataggattaacagcagatttctcatcagaagccatgcaagccagaaggctatgggagacatactcaaaatgct

SEQ ID NO: 440726 - DNA, 2306 bp, Homo sapiens
cggagtgactctgacacagaattctttgcagcctcaggaaatgaggatagaaatgccagaggctggacagtatgcagaaagatcatttgctgggctgggctttgtttcatatttttctgctaacttcataaacttaaacaagtcatgtcactcagtttctttaccagtaagatagggggttggagagaagcaattctgaaatggtggagtgagggcctccaaaaacctgttcttccatagcagcgataagaacactggaaaaaatggtcaaaatcaacttttccacagctctggaaattaattaaaggcttgcaacaatcctagaagtgtttatttaagaaaactggatgaattttgatagaagcagtgggctttgtggcattttaacttgttctgtttttatctcccttttcccagcttcacagtagccttgaaaatcaggagccttgaactacagtagctgtgaaaactgtttgcctaatggttactggaggggacagaatgggttcaaagttcctccaaagctccatccttaaagaatcatcactatttgacatgtccaatagttccctgaaatttccattcccaagcttgtcttcatttgacctgactcagagcttgctctgtgtgaatagccctattcttagggtgtgtgttgaaaacaatcagtagcagctgtttaacatcatagttgctggaaatagcaatattaattgaagcttacaaggggctgcccaaaaaacttaaaagcaaaatcccatagggggtatagaaaagctctaaaatattcctagagagtcacatgcatgagaagagctgtgcacatgcccaggaaagacctgagaaggtcctaatctctcacctctggctgatcttgaggctctgtgtaagcagagtgtgaaagctaaggcaaagtcataaattgcctgttgaagcatcaaatacatgcccccaaactcacacagcccctctgcaaaggttgggaaacttgcaaggaatttaaggaaatctctgttcagtcattagccagccactaaactaactgagcagatccttcagtgatcacacacaacaaagaatacagactttacagacttagtcctagaaaatcactacacaaacagcaacaacaatgcacctgggactaagggagaggagatgagttccagagttggtatattatttaaatgtctagttttcaataaaaacaattataagacacagagcaaaactagaaagtatggcccatacccagggaaaaacaagcaaccaatagaagctgtccttgaggaagttaatatcttggacttactagaaaatgactttaacactagttattataaatatgttcaaaaaactaaaagaggccaggtgcggaggctcacgcctataatcccagcactttgggaggctgaagcaggtgggtcacctgaggtcaggagtttgagaccagcctgaccaatatggcaaaaccctatctctactaataatacaaaaattagccaggcgttgtggcgcacacctgtaatcccagctacttgggaggctgaagcaggagaactgcttgaaactgggaggaagaggttgcagtaagctgagatcacaccactgtactccagcctgggccacaagagtgaaactccatctccaaaaaaaaaaaaaaaaaaaaaaaccctaaaattaaccatatctaaagaattaaaggaaagtttgagaacaatatctcaccaatacagaatatcaataaaaatataaaaattattttaaaagaaccaaataggaattctggaatttaaagtgtaggaactgaaatgaaaaattcactacgggggctgaacagtagatttgaactggcagaagaagaatcaacatacatgaagataggttgattgagatgattcagtatgagaaagagaaaggaaaaggaatgaagaaaaatgaatagatcttcagatacctgtgagacaccctcaagtgtgccaatgtatacctaacgggagtcccagaagacaggagagaaaaaaagaaagaaataaaaagaatatttgaatttaaaattgcttgaaaatgtctcaaatttgatgaaaaatattactctgcacattcaacccatgaactataagttgtataaaatcaaaaagtttcacaccaaggcgtgtcatagccaaactgtcaaaagccaaagacacagaatcttgaaagcagtgagagcaaagcagacaagggatccccaataggattaacagcagatttctcatcagaagccatgcaagccagaaggctatgggagacatactcaaaatgct

SEQ ID NO: 440727 - DNA, 893 bp, Homo sapiens
gcttggcagggtaatttcttggttctagggtgtgtgtttggggagtatgtttggtggtcctgagagctgcagcatttcaggttgtttttctcactgcaggtcatttcatgggcaacaacacagtgctggatgttttgcggcgtgaaggctatgaggtagaacacgcccctgctggacgacccatccacaaagggaagagtaaaaagacctccacacggcccactctgtccaccatctttgctccaaaagtccctaccctggaagtaccggcaccagaagccgtatcctcagggcactcaacgctgcctccccttgtgtcccggcctggaagtgccgacacgcccagtgaggccgaacagaggttccggaagaagcggaggcggtcacagcggaggccgcgactccggcaattcagcgatctgtgggtccgcctggaggagagtgacatagtcccgcaactccaggtccctgtcctggacaggcacatctccactgaactgcggctccctcgccgtgggcattcccaccacagccagatggtggccagcagtgcctgcctgtctctctggactcctgtgttctgggtgctggtgctggctttccaaacagagacacccctcctgtaacgactggaagcaccaggctaagaacctgacccctcggacttgaagaatggccattcctgtactccacattctggtctagccttgttgggcccaatccagaagagactgctcttgaaaaagcggcccagtgttgattcttctctttccaaggaatgtgactttgggttatccaactttgggggcaggtgtacagttttgtaacatagtgagttgtgtgaaaataaattataaatgagttgtatgaaaataaatacctttttttgtata

SEQ ID NO: 440728 - DNA, 789 bp, Homo sapiens
ccgcgttccgggcctcggagccgccttgaggaggatgagtccctggagctggttcctgctgcagaccctctgcctcctgcccacgggcgcagcttcgcggcgcggggcgcccggcaccgccaactgcgagctcaagccccaacaaagcgagctgaattccttcttgtggaccattaagcgagacccaccatcttacttctttggcacaatccatgtcccgtacacccgagtttgggacttcatccccgacaactctaaggaggctttcctgcagagcagcattgtgtactttgagttggatctcacagacccctataccatctcagctctcaccagctgtcagatgctgccacagggcgagaacctccaagatgtgctccccagggacatctactgccgcctcaagcgccacctggagtatgtcaagctcatgatgcccttgtggatgaccccagaccagcgcggcaaggggctctacgcagactacctcttcaatgctattgccggaaactgggagcgcaagaggcctgtctgggtgatgctcatggtcaactccctgactgaagtggacattaagtcccgtggagtgcctgtcttagacctgttccttgcccaggaggctgagcggctgaggaaacagactggggcagtggaaaaggtggaagagcagtgccatccattgaatgggttgaacttttcacagcatctttgctttgaaccacgaccctcctgccgcaggacaactccgcccagctctcttcagaacaccttcgggtacctctgaacgct

SEQ ID NO: 440729 - DNA, 2353 bp, Homo sapiens
tctgtttccaggtctggcggggggccgggctgcggtggcggcagcggtgggagatgccggggcggccggcggaggtccatgtggcgctctaggtgggatgccagcgtcctgaaggcggaggccctggccctcctcccctgcggcctgggcatggcattctcccagtcccacgtgatggccgctcggcggcaccagcacagccggctcatcatcgaggtggacgagtacagctccaaccccacccaggccttcaccttctacaacatcaaccagggccgcttccagccaccgcatgtgcagatggtggacccggtgcctcacgatgcccccaaacctccaggctacacccgcttcgtctgcgtctctgatacccactcgaggacggaccccatccagatgccgtacggcgacgtgctgatccacgctggggacttcactgagctggggctcccgagcgaggtgaagaagttcaacgagtggctgggcagcctgccctacgagtacaagatcgtgatcgcaggcaaccacgagctgacctttgaccaggagttcatggccgacctcatcaagcaggacttttactacttcccatctgtgtcgaagctgaagccggagaactatgagaatgtgcagtcgctgctgaccaactgcatctaccttcaggactcggaggtcaccgtgcggggcttccggatctatggctccccatggcagccctggttctacggctggggcttcaacctcccgcgaggccaagccctgctggagaaatggaacctcattcccgaaggcgtagacatcctgataacccatggaccaccactgggcttcctggactgggtccccaagaagatgcagcgggtgggctgtgtggagctgctcaacacggtgcagaggcgcgtccagccgcggttacatgtctttggccacatccacgaagggtatggtgtcatggcagatgggacgaccacctatgtgaatgcgtccgtatgcactgtgaactaccagcccgtgaacccgcccatagtcatcgacctccccacaccccggaactcctgactgctccccactgcccctgccctgcccgcccgtgtcagctccacaggcctggcccggccactgttccttccatgctgagttgcctggacgacccatctggctgcggggactggcctagcaggcaggtcagggccttggaacgactctttagccttctgtcacctggagttgggaccctgcgcatccccatcaggggttctgtgctcatttactttttctgcgtgtacatcctgcgtgtacctcgttaaaggacctactaagctcatggccctgtcatgtttgggaaatgactaaatcttcattcttctcccttggacgccctcctggtttgggaagctgctgctcttgaatgggttttggaagttacacaaaatctccctctaaccacgggtctgtgtggcggcatgcccctgggttggggtgggtgggaggattcgtgagctgcacacagacagtccctttctctcctcccaagtgagggaggagacaggcccaagggggaggccctccgagggagcatttagggacatctcaggaattcagaccgcacctggccaggcccacagctgtttgcctggcattgttcccccctttttcttcccataggcatttttgtttacttgaacaatgacctgagtgtcctaggcattcactcggagcctggatgatgggggctggttctacagaatgagccactggcattcgtgcccaggaccagtgagagcgttcccagtcatggggggatgacccttggtcccacggggaacacactgctctgtagaatgcggtagcctggatggagggtctgcaggcttaggctgcagcaggcctgccatgggtgtgaacccatgtccaggcacgcaccgacacacatgcacgcacgcacccctcttaattgaaccaagtgggtcctgtgtttctcttttctgccccgtagtgaggttctgttccttggatgcggcttcccttgcaccgttaggattctgtctggcatgcctgcagccgaggaagcccaggaccagccggccctgtgaattggagggtggcacagggaccgagcgggccccaggctccagcagccccaccttggacagcttctttttcttctttgaattaggactggagggggtggggccagggcggtggtgggaaccggtagggcctagatgaggggcaggcagtcaggcagaaatgggcaagttcagggtcagattctgtcgttatttaatattttgttcatcatggactttttctgcatttattttgatttttaacgttgccctcgtgccgaatt

SEQ ID NO: 440730 - DNA, 1149 bp, Homo sapiens
tctgtttccaggtctggcggggggccgggctgcggtggcggcagcggtgggagatgccggggcggccggcggaggtccatgtggcgctctaggtgggatgccagcgtcctgaaggcggaggccctggccctcctcccctgcggcctgggcatggcattctcccagtcccacgtgatggccgctcggcggcaccagcacagccggctcatcatcgaggtggacgagtacagctccaaccccacccaggccttcaccttctacaacatcaaccagggccgcttccagccaccgcatgtgcagatggtggacccggtgcctcacgatgcccccaaacctccaggctacacccgcttcgtctgcgtctctgatacccactcgaggacggaccccatccagatgccgtacggcgacgtgctgatccacgctggggacttcactgagctggggctcccgagcgaggtgaagaagttcaacgagtggctgggcagcctgccctacgagtacaagatcgtgatcgcaggcaaccacgagctgacctttgaccaggagttcatggccgacctcatcaagcaggacttttactacttcccatctgtgtcgaagctgaagccggagaactatgagaatgtgcagtcgctgctgaccaactgcatctaccttcaggactcggaggtcaccgtgcggggcttccggatctatggctccccatggcagcagcactgtatcgggttggctgaagctgagcgccgtggggtgcagggctccaggaatcccgtttggctgaaggggttcctgtagccagggatgtttatgaggtctctctgatgccccaggcgcaggacatgtgtgcgggtggagaaaagcaggccctttcagtgccagctccactcaatttctatgtggaccaagaacgataaacttaaaaaattttttttcctaaggtatcttcagaatatggtgtatttttatgtggaaaagaaaagttatgaaggcagctgttactttaagagaaaattcattaaaagtcctcgaggtatgaagatgacggcgtgcttctcaatcattttggcataacttgattgtggctgtaatttttttttttttttgtcaagcatgtcagacaataaagtctttgtaaaaagaaaaaaa

SEQ ID NO: 440731 - DNA, 4451 bp, Homo sapiens
cccgcggtttgtccgcgcctctgctaccccctgcgcaggcgctcaaggagctcttggactccaggttcccgcggctgggagaaaaggaggcggggatccgaagggggaaatgactctgaggcgcccggacgtcgctcggaagccaatcagagagcgtgacgtcagtttggcgcggagtttggcggccggggcttacagtggcgggagttggaggcgataacgatttgtgttgtgagaggcgcaagctgcgatttctgctgaacttggaggcatttctacgacttttctctcagctgaggcttttcctccgaccctgatgctcttcaattcggtgctccgccagccccagcttggcgtcctgagaaatggatggtcttcacaataccctcttcaatcccttctgactggttatcagtgcagtggtaatgatgaacacacttcttatggagaaacaggagtcccagttcctccttttggatgtaccttctcttctgctcccaatatggaacatgtactagcagttgccaatgaagaaggctttgttcgattgtataacacagaatcacaaagtttcagaaagaagtgcttcaaagaatggatggctcactggaatgccgtctttgacctggcctgggttcctggtgaacttaaacttgttacagcagcaggtgatcaaacagccaaattttgggacgtaaaagctggtgagctgattggaacatgcaaaggtcatcaatgcagcctcaagtcagttgccttttctaagtttgagaaagctgtattctgtacgggtggaagagatggcaacattatggtctgggataccaggtgcaacaaaaaagatgggttttataggcaagtgaatcaaatcagtggagctcacaatacctcagacaagcaaaccccttcaaaacccaagaagaaacagaattcaaaaggacttgctccttctgtggatttccagcaaagtgttactgtggtcctctttcaagacgagaataccttagtctcagcaggagctgtggatgggataatcaaagtatgggatttacgtaagaattatactgcttatcgacaagaacccatagcatccaagtctttcctgtacccaggtagcagcactcgaaaacttggatattcaagtctgattttggattccactggctctactttatttgctaattgcacagacgataacatctacatgtttaatatgactgggttgaagacttctccagtggctattttcaatggacaccagaactctaccttttatgtaaaatccagccttagtccagatgaccagtttttagtcagtggctcaagtgatgaagctgcctacatatggaaggtctccacaccctggcaacctcctactgtgctcctgggtcattctcaagaggtcacgtctgtgtgctggtgtccatctgacttcacaaagattgctacctgttctgatgacaatacactaaaaatctggcgcttgaatagaggcttagaggagaaaccaggaggtgataaactttccacggtgggttgggcctctcagaagaaaaaagagtcaagacctggcctagtaacagtaacgagtagccagagtactcctgccaaagcccccagggtaaagtgcaatccatccaattcttccccgtcatccgcagcttgtgccccaagctgtgctggagacctccctcttccttcaaatactcctacgttctctattaaaacctctcctgccaaggcccggtctcccatcaacagaagaggctctgtctcctccgtctctcccaagccaccttcatctttcaagatgtcgattagaaactgggtgacccgaacaccttcctcatcaccacccatcactccacctgcttcggagaccaagatcatgtctccgagaaaagcccttattcctgtgagccagaagtcatcccaagcagaggcttgctctgagtctagaaatagagtaaagaggaggctagactcaagctgtctggagagtgtgaaacaaaagtgtgtgaagagttgtaactgtgtgactgagcttgatggccaagttgaaaatcttcatttggatctgtgctgccttgctggtaaccaggaagaccttagtaaggactctctaggtcctaccaaatcaagcaaaattgaaggagctggtaccagtatctcagagcctccgtctcctatcagtccgtatgcttcagaaagctgtggaacgctacctcttcctttgagaccttgtggagaagggtctgaaatggtaggcaaagagaatagttccccagagaataaaaactggttgttggccatggcagccaaacggaaggctgagaatccatctccacgaagtccgtcatcccagacacccaattccaggagacagagcggaaagacattgccaagcccggtcaccatcacgcccagctccatgaggaaaatctgcacatacttccatagaaagtcccaggaggacttctgtggtcctgaacactcaacagaattatagattctaatctgagtgagttactgagctttggtccactaaaacaagctgagctttggtccactaaaacaagatgaaaaatacaagagtgactctataactctggtctttaagaaagctgccttttcatttttagacaaaatcttttcaacgctgaaatgtacctaatctggttctactaccataatgtatatgcagcttcccgaggatgaatgctgtgtttaaatttcataaagtaaatttgtcactctagcattttgaatgaatagtcttcactttttaaattattcatcttctctataataatgacatcccagttcatggaggcaaaaaacaagtttcttgttatcctgaaactttctatgctcagtggaaagtatctgccagccacagcatgaggcctgtgaaggctgactgagaaatcctctgctgaagacccctggttctgttctgcctccaacatgtataattttatttgaaatacataatcttttcactatgcttttgtggggttttttttaagtatgtgtaaaaatgtgatgctcagataagtacatttatatcagttcagtgttaaaatgcagtctcttgagttaaagtcatctttattttaaatgcagtgataaatgtcaactcttcggagaaactaggagaacaacaacagaaagctgtgtttgtcttttttctctcaaatatatctcccgtatgagatttcaggtccccatgttttcaccaagcaatctgctatgtcagccaacccaacatcactttctacaggaggttatgatttttgccatttactagaggaagatgttttatgaaatcaatttggggtttgaattcaggtgcagtcatcagttctttaggggctgcaatgttttaaaaaaaataagtcatcagattttaagaaaaaagtgatgatttcttattgatatttttgtaacagaatatagctcttaactgaaaatccagaaccagaaacataaatcttgagtttcttttcatgtacataaaaagcaatagccttttagtatagatagccctgagccaaaaagtaatagaattttctctagatatttaatacagagagtgtatagactgactctaagttaataatgtgcaaaatatcttaaacatccctccccttattcaacaattatgtatcagtgatcttgaaccattgttttatatttttcacctttgtaacctcatggaaagaggctttacatactttctatgtactatttacttagaagggagcccccttccagtcatgaaacttcatttgttttatccatatcctgaggactgtgtagacttatgactgtgtagactttatgtcagttctgtgtagactttatgtcagtttttgtcattatttgaaaatctattctgacaactttttaattcctttgatcttataagttaaagctgtaacaactgaaattgcatggatcaagtaagcatagttttatccagggagaaaaataaaaggaagccatagaattgctctggtcaaaaccaagcacaccatagccttaactgaatatttaggaaatctgcctaatctgcttatatttggtgtttgttttttgactgttgggctttgggaagatgttatttatgaccaatatctgccagtaacgctgtttatctcacttgctttgaaagccaatgggggaaaaaaatccatgaaaaaaaaaagattgataaagtagatgattttgtttgtatccctacccatctcctggcagccctactgagtgaaattgggatacatttggctgtcagaaattataccgagtctactgggtataacatgtctcacttggaaagctagtacttttaaatgggtgccaaaggtcaactgtaatgagataattatccctgcctgtgtccatgtcagactttgagctgatcctgaataataaagccttttacctta

SEQ ID NO: 440732 - DNA, 4389 bp, Homo sapiens
cccgcggtttgtccgcgcctctgctaccccctgcgcaggcgctcaaggagctcttggactccaggttcccgcggctgggagaaaaggaggcggggatccgaagggggaaatgactctgaggcgcccggacgtcgctcggaagccaatcagagagcgtgacgtcagtttggcgcggagtttggcggccggggcttacagtggcgggagttggaggcgataacgatttgtgttgtgagaggcgcaagctgcgatttctgctgaacttggaggcatttctacgacttttctctcagctgaggcttttcctccgaccctgatgctcttcaattcggtgctccgccagccccagcttggcgtcctgagaaatggatggtcttcacaataccctcttcaatcccttctgactggttatcagtgcagtggtaatgatgaacacacttcttatggagaaacaggagtcccagttcctccttttggatgtaccttctcttctgctcccaatatggaacatgtactagcagttgccaatgaagaaggctttgttcgattgtataacacagaatcacaaagtttcagaaagaagtgcttcaaagaatggatggctcactggaatgccgtctttgacctggcctgggttcctggtgaacttaaacttgttacagcagcaggtgatcaaacagccaaattttgggacgtaaaagctggtgagctgattggaacatgcaaaggtcatcaatgcagcctcaagtcagttgccttttctaagtttgagaaagctgtattctgtacgggtggaagagatggcaacattatggtctgggataccaggtgcaacaaaaaagatgggttttataggcaagtgaatcaaatcagtggagctcacaatacctcagacaagcaaaccccttcaaaacccaagaagaaacagaattcaaaaggacttgctccttctgtggatttccagcaaagtgttactgtggtcctctttcaagacgagaataccttagtctcagcaggagctgtggatgggataatcaaagtatgggatttacgtaagaattatactgcttatcgacaagaacccatagcatccaagtctttcctgtacccaggtagcagcactcgaaaacttggatattcaagtctgattttggattccactggctctactttatttgctaattgcacagacgataacatctacatgtttaatatgactgggttgaagacttctccagtggctattttcaatggacaccagaactctaccttttatgtaaaatccagccttagtccagatgaccagtttttagtcagtggctcaagtgatgaagctgcctacatatggaaggtctccacaccctggcaacctcctactgtgctcctgggtcattctcaagaggtcacgtctgtgtgctggtgtccatctgacttcacaaagattgctacctgttctgatgacaatacactaaaaatctggcgcttgaatagaggcttagaggagaaaccaggaggtgataaactttccacggtgggttgggcctctcagaagaaaaaagagtcaagacctggcctagtaacagtaacgagtagccagagtactcctgccaaagcccccagggtaaagtgcaatccatccaattcttccccgtcatccgcagcttgtgccccaagctgtgctggagacctccctcttccttcaaatactcctacgttctctattaaaacctctcctgccaaggcccggtctcccatcaacagaagaggctctgtctcctccgtctctcccaagccaccttcatctttcaagatgtcgattagaaactgggtgacccgaacaccttcctcatcaccacccatcactccacctgcttcggagaccaagatcatgtctccgagaaaagcccttattcctgtgagccagaagtcatcccaagcagaggcttgctctgagtctagaaatagagtaaagaggaggctagactcaagctgtctggagagtgtgaaacaaaagtgtgtgaagagttgtaactgtgtgactgagcttgatggccaagttgaaaatcttcatttggatctgtgctgccttgctggtaaccaggaagaccttagtaaggactctctaggtcctaccaaatcaagcaaaattgaaggagctggtaccagtatctcagagcctccgtctcctatcagtccgtatgcttcagaaagctgtggaacgctacctcttcctttgagaccttgtggagaagggtctgaaatggtaggcaaagagaatagttccccagagaataaaaactggttgttggccatggcagccaaacggaaggctgagaatccatctccacgaagtccgtcatcccagacacccaattccaggagacagagcggaaagacattgccaagcccggtcaccatcacgcccagctccatgaggaaaatctgcacatacttccatagaaagtcccaggaggacttctgtggtcctgaacactcaacagaattatagattctaatctgagtgagttactgagctttggtccactaaaacaagctgagctttggtccactaaaacaagatgaaaaatacaagagtgactctataactctggtctttaagaaagctgccttttcatttttagacaaaatcttttcaacgctgaaatgtacctaatctggttctactaccataatgtatatgcagcttcccgaggatgaatgctgtgtttaaatttcataaagtaaatttgtcactctagcattttgaatgaatagtcttcactttttaaattattcatcttctctataataatgacatcccagttcatggaggcaaaaaacaagtttcttgttatcctgaaactttctatgctcagtggaaagtatctgccagccacagcatgaggcctgtgaaggctgactgagaaatcctctgctgaagacccctggttctgttctgcctccaacatgtataattttatttgaaatacataatcttttcactatgcttttgtggggttttttttaagtatgtgtaaaaatgtgatgctcagataagtacatttatatcagttcagtgttaaaatgcagtctcttgagttaaagtcatctttattttaaatgcagtgataaatgtcaactcttcggagaaactaggagaacaacaacagaaagctgtgtttgtcttttttctctcaaatatatctcccgtatgagatttcaggtccccatgttttcaccaagcaatctgctatgtcagccaacccaacatcactttctacaggaggttatgatttttgccatttactagaggaagatgttttatgaaatcaatttggggtttgaattcaggtgcagtcatcagttctttaggggctgcaatgttttaaaaaaaataagtcatcagattttaagaaaaaagtgatgatttcttattgatatttttgtaacagaatatagctcttaactgaaaatccagaaccagaaacataaatcttgagtttcttttcatgtacataaaaagcaatagccttttagtatagatagccctgagccaaaaagtaatagaattttctctagatatttaatacagagagtgtatagactgactctaagttaataatgtgcaaaatatcttaaacatccctccccttattcaacaattatgtatcagtgatcttgaaccattgttttatatttttcacctttgtaacctcatggaaagaggctttacatactttctatgtactatttacttagaagggagcccccttccagtcatgaaacttcatttgttttatccatatcctgaggactgtgtagacttatgatctattctgacaactttttaattcctttgatcttataagttaaagctgtaacaactgaaattgcatggatcaagtaagcatagttttatccagggagaaaaataaaaggaagccatagaattgctctggtcaaaaccaagcacaccatagccttaactgaatatttaggaaatctgcctaatctgcttatatttggtgtttgttttttgactgttgggctttgggaagatgttatttatgaccaatatctgccagtaacgctgtttatctcacttgctttgaaagccaatgggggaaaaaaatccatgaaaaaaaaaagattgataaagtagatgattttgtttgtatccctacccatctcctggcagccctactgagtgaaattgggatacatttggctgtcagaaattataccgagtctactgggtataacatgtctcacttggaaagctagtacttttaaatgggtgccaaaggtcaactgtaatgagataattatccctgcctgtgtccatgtcagactttgagctgatcctgaataataaagccttttacctta

SEQ ID NO: 440733 - DNA, 4592 bp, Homo sapiens
cccgcggtttgtccgcgcctctgctaccccctgcgcaggcgctcaaggagctcttggactccaggttcccgcggctgggagaaaaggaggcggggatccgaagggggaaatgactctgaggcgcccggacgtcgctcggaagccaatcagagagcgtgacgtcagtttggcgcggagtttggcggccggggcttacagtggcgggagttggaggcgataacgatttgtgttgtgagaggcgcaagctgcgatttctgctgaacttggaggcatttctacgacttttctctcagctgaggcttttcctccgaccctgatgctcttcaattcggtgctccgccagccccagcttggcgtcctgagaaatggatggtcttcacaataccctcttcaatcccttctgactggttatcagtgcagtggtaatgatgaacacacttcttatggagaaacaggagtcccagttcctccttttggatgtaccttctcttctgctcccaatatggaacatgtactagcagttgccaatgaagaaggctttgttcgattgtataacacagaatcacaaagtttcagaaagaagtgcttcaaagaatggatggctcactggaatgccgtctttgacctggcctgggttcctggtgaacttaaacttgttacagcagcaggtgatcaaacagccaaattttgggacgtaaaagctggtgagctgattggaacatgcaaaggtcatcaatgcagcctcaagtcagttgccttttctaagtttgagaaagctgtattctgtacgggtggaagagatggcaacattatggtctgggataccaggtgcaacaaaaaagatgggttttataggcaagtgaatcaaatcagtggagctcacaatacctcagacaagcaaaccccttcaaaacccaagaagaaacagaattcaaaaggacttgctccttctgtggatttccagcaaagtgttactgtggtcctctttcaagacgagaataccttagtctcagcaggagctgtggatgggataatcaaagtatgggatttacgtaagaattatactgcttatcgacaagaacccatagcatccaagtctttcctgtacccaggtagcagcactcgaaaacttggatattcaagtctgattttggattccactggctctactttatttgctaattgcacagacgataacatctacatgtttaatatgactgggttgaagacttctccagtggctattttcaatggacaccagaactctaccttttatgtaaaatccagccttagtccagatgaccagtttttagtcagtggctcaagtgatgaagctgcctacatatggaaggtctccacaccctggcaacctcctactgtgctcctgggtcattctcaagaggtcacgtctgtgtgctggtgtccatctgacttcacaaagattgctacctgttctgatgacaatacactaaaaatctggcgcttgaatagaggcttagaggagaaaccaggaggtgataaactttccacggtgggttgggcctctcagaagaaaaaagagtcaagacctggcctagtaacagtaacgagtagccagagtactcctgccaaagcccccagggtaaagtgcaatccatccaattcttccccgtcatccgcagcttgtgccccaagctgtgctggagacctccctcttccttcaaatactcctacgttctctattaaaacctctcctgccaaggcccggtctcccatcaacagaagaggctctgtctcctccgtctctcccaagccaccttcatctttcaagatgtcgattagaaactgggtgacccgaacaccttcctcatcaccacccatcactccacctgcttcggagaccaagatcatgtctccgagaaaagcccttattcctgtgagccagaagtcatcccaagcagaggcttgctctgagtctagaaatagagtaaagaggaggctagactcaagctgtctggagagtgtgaaacaaaagtgtgtgaagagttgtaactgtgtgactgagcttgatggccaagttgaaaatcttcatttggatctgtgctgccttgctggtaaccaggaagaccttagtaaggactctctaggtcctaccaaatcaagcaaaattgaaggagctggtaccagtatctcagagcctccgtctcctatcagtccgtatgcttcagaaagctgtggaacgctacctcttcctttgagaccttgtggagaagggtctgaaatggtaggcaaagagaatagttccccagagaataaaaactggttgttggccatggcagccaaacggaaggctgagaatccatctccacgaagtccgtcatcccagacacccaattccaggagacagagcggaaagacattgccaagcccggtcaccatcacgcccagctccatgaggaaaatctgcacatacttccatagaaagtcccaggaggacttctgtggtcctgaacactcaacagaattatagattctaatctgagtgagttactgagctttggtccactaaaacaagctgagctttggtccactaaaacaagatgaaaaatacaagagtgactctataactctggtctttaagaaagctgccttttcatttttagacaaaatcttttcaacgctgaaatgtacctaatctggttctactaccataatgtatatgcagcttcccgaggatgaatgctgtgtttaaatttcataaagtaaatttgtcactctagcattttgaatgaatagtcttcactttttaaattattcatcttctctataataatgacatcccagttcatggaggcaaaaaacaagtttcttgttatcctgaaactttctatgctcagtggaaagtatctgccagccacagcatgaggcctgtgaaggctgactgagaaatcctctgctgaagacccctggttctgttctgcctccaacatgtataattttatttgaaatacataatcttttcactatgcttttgtggggttttttttaagtatgtgtaaaaatgtgatgctcagataagtacatttatatcagttcagtgttaaaatgcagtctcttgagttaaagtcatctttattttaaatgcagtgataaatgtcaactcttcggagaaactaggagaacaacaacagaaagctgtgtttgtcttttttctctcaaatatatctcccgtatgagatttcaggtccccatgttttcaccaagcaatctgctatgtcagccaacccaacatcactttctacaggaggttatgatttttgccatttactagaggaagatgttttatgaaatcaatttggggtttgaattcaggtgcagtcatcagttctttaggggctgcaatgttttaaaaaaaataagtcatcagattttaagaaaaaagtgatgatttcttattgatatttttgtaacagaatatagctcttaactgaaaatccagaaccagaaacataaatcttgagtttcttttcatgtacataaaaagcaatagccttttagtatagatagccctgagccaaaaagtaatagaattttctctagatatttaatacagagagtgtatagactgactctaagttaataatgtgcaaaatatcttaaacatccctccccttattcaacaattatgtatcagtgatcttgaaccattgttttatatttttcacctttgtaacctcatggaaagaggctttacatactttctatgtactatttacttagaagggagcccccttccagtcatgaaacttcatttgttttatccatatcctgaggactgtgtagacttatgactgtgtagactttatgtcagtttttgtcattatttgaaaatctattctgacaactttttaattcctttgatcttataagttaaagctgtaacaactgaaattgcatggatcaagtaagcatagttttatccagggagaaaaataaaaggaagccatagaattgctctggtcaaaaccaagcacaccatagccttaactgaatatttaggaaatctgcctaatctgcttatatttggtgtttgttttttgactgttgggctttgggaagatgttatttatgaccaatatctgccagtaacgctgtttatctcacttgctttgaaagccaatgggggaaaaaaatccatgaaaaaaaaaagattgataaagtagatgattttgtttgtatccctacccatctcctggcagccctactgagtgaaattgggatacatttggctgtcagaaattataccgagtctactgggtataacatgtctcacttggaaagctagtacttttaaatgggtgccaaaggtcaactgtaatgagataattatccctgcctgtgtccatgtcagactttgagctgatcctgaataataaagccttttaccttatctgatgtccttttctgagctttttgcattacctagaagcagtctacaaaaaagaactatagtagtcaagaatcccttctacttgttcattaaaatgtttattcccaaagttataatctatttcaagctgaaagagcttttaataaaaaacatcttgcttgga

SEQ ID NO: 440734 - DNA, 3580 bp, Homo sapiens
ggtctatacattatcatctgttacgttctgtcagaattataagcctgatattggagacaacagtataagatactttaattgtttcccaatgaaatatccttactgtacctagttaatgtgccagaggagtgagattaaaagtcatttcacatgtagtgtagttgaagtagtttggggttggaagaaggtctataaaatatttatttgccatggttattaggataatcaaagtatgggatttacgtaagaattatactgcttatcgacaagaacccatagcatccaagtctttcctgtacccaggtagcagcactcgaaaacttggatattcaagtctgattttggattccactggctctactttatttgctaattgcacagacgataacatctacatgtttaatatgactgggttgaagacttctccagtggctattttcaatggacaccagaactctaccttttatgtaaaatccagccttagtccagatgaccagtttttagtcagtggctcaagtgatgaagctgcctacatatggaaggtctccacaccctggcaacctcctactgtgctcctgggtcattctcaagaggtcacgtctgtgtgctggtgtccatctgacttcacaaagattgctacctgttctgatgacaatacactaaaaatctggcgcttgaatagaggcttagaggagaaaccaggaggtgataaactttccacggtgggttgggcctctcagaagaaaaaagagtcaagacctggcctagtaacagtaacgagtagccagagtactcctgccaaagcccccagggtaaagtgcaatccatccaattcttccccgtcatccgcagcttgtgccccaagctgtgctggagacctccctcttccttcaaatactcctacgttctctattaaaacctctcctgccaaggcccggtctcccatcaacagaagaggctctgtctcctccgtctctcccaagccaccttcatctttcaagatgtcgattagaaactgggtgacccgaacaccttcctcatcaccacccatcactccacctgcttcggagaccaagatcatgtctccgagaaaagcccttattcctgtgagccagaagtcatcccaagcagaggcttgctctgagtctagaaatagagtaaagaggaggctagactcaagctgtctggagagtgtgaaacaaaagtgtgtgaagagttgtaactgtgtgactgagcttgatggccaagttgaaaatcttcatttggatctgtgctgccttgctggtaaccaggaagaccttagtaaggactctctaggtcctaccaaatcaagcaaaattgaaggagctggtaccagtatctcagagcctccgtctcctatcagtccgtatgcttcagaaagctgtggaacgctacctcttcctttgagaccttgtggagaagggtctgaaatggtaggcaaagagaatagttccccagagaataaaaactggttgttggccatggcagccaaacggaaggctgagaatccatctccacgaagtccgtcatcccagacacccaattccaggagacagagcggaaagacattgccaagcccggtcaccatcacgcccagctccatgaggaaaatctgcacatacttccatagaaagtcccaggaggacttctgtggtcctgaacactcaacagaattatagattctaatctgagtgagttactgagctttggtccactaaaacaagctgagctttggtccactaaaacaagatgaaaaatacaagagtgactctataactctggtctttaagaaagctgccttttcatttttagacaaaatcttttcaacgctgaaatgtacctaatctggttctactaccataatgtatatgcagcttcccgaggatgaatgctgtgtttaaatttcataaagtaaatttgtcactctagcattttgaatgaatagtcttcactttttaaattattcatcttctctataataatgacatcccagttcatggaggcaaaaaacaagtttcttgttatcctgaaactttctatgctcagtggaaagtatctgccagccacagcatgaggcctgtgaaggctgactgagaaatcctctgctgaagacccctggttctgttctgcctccaacatgtataattttatttgaaatacataatcttttcactatgcttttgtggggttttttttaagtatgtgtaaaaatgtgatgctcagataagtacatttatatcagttcagtgttaaaatgcagtctcttgagttaaagtcatctttattttaaatgcagtgataaatgtcaactcttcggagaaactaggagaacaacaacagaaagctgtgtttgtcttttttctctcaaatatatctcccgtatgagatttcaggtccccatgttttcaccaagcaatctgctatgtcagccaacccaacatcactttctacaggaggttatgatttttgccatttactagaggaagatgttttatgaaatcaatttggggtttgaattcaggtgcagtcatcagttctttaggggctgcaatgttttaaaaaaaataagtcatcagattttaagaaaaaagtgatgatttcttattgatatttttgtaacagaatatagctcttaactgaaaatccagaaccagaaacataaatcttgagtttcttttcatgtacataaaaagcaatagccttttagtatagatagccctgagccaaaaagtaatagaattttctctagatatttaatacagagagtgtatagactgactctaagttaataatgtgcaaaatatcttaaacatccctccccttattcaacaattatgtatcagtgatcttgaaccattgttttatatttttcacctttgtaacctcatggaaagaggctttacatactttctatgtactatttacttagaagggagcccccttccagtcatgaaacttcatttgttttatccatatcctgaggactgtgtagacttatgatctattctgacaactttttaattcctttgatcttataagttaaagctgtaacaactgaaattgcatggatcaagtaagcatagttttatccagggagaaaaataaaaggaagccatagaattgctctggtcaaaaccaagcacaccatagccttaactgaatatttaggaaatctgcctaatctgcttatatttggtgtttgttttttgactgttgggctttgggaagatgttatttatgaccaatatctgccagtaacgctgtttatctcacttgctttgaaagccaatgggggaaaaaaatccatgaaaaaaaaaagattgataaagtagatgattttgtttgtatccctacccatctcctggcagccctactgagtgaaattgggatacatttggctgtcagaaattataccgagtctactgggtataacatgtctcacttggaaagctagtacttttaaatgggtgccaaaggtcaactgtaatgagataattatccctgcctgtgtccatgtcagactttgagctgatcctgaataataaagccttttacctta

SEQ ID NO: 440735 - DNA, 3437 bp, Homo sapiens
cccgcggtttgtccgcgcctctgctaccccctgcgcaggcgctcaaggagctcttggactccaggttcccgcggctgggagaaaaggaggcggggatccgaagggggaaatgactctgaggcgcccggacgtcgctcggaagccaatcagagagcgtgacgtcagtttggcgcggagtttggcggccggggcttacagtggcgggagttggaggcgataacgatttgtgttgtgagaggcgcaagctgcgatttctgctgaacttggaggcatttctacgacttttctctcagctgaggcttttcctccgaccctgatgctcttcaattcggtgctccgccagccccagcttggcgtcctgagaaatggatggtcttcacaataccctcttcaatcccttctgactggttatcagtgcagtggtaatgatgaacacacttcttatggagaaacaggagtcccagttcctccttttggatgtaccttctcttctgctcccaatatggaacatgtactagcagttgccaatgaagaaggctttgttcgattgtataacacagaatcacaaagtttcagaaagaagtgcttcaaagaatggatggctcactggaatgccgtctttgacctggcctgggttcctggtgaacttaaacttgttacagcagcaggtgatcaaacagccaaattttgggacgtaaaagctggtgagctgattggaacatgcaaaggtcatcaatgcagcctcaagtcagttgccttttctaagtttgagaaagctgtattctgtacgggtggaagagatggcaacattatggtctgggataccaggtgcaacaaaaaagatgggttttataggcaagtgaatcaaatcagtggagctcacaatacctcagacaagcaaaccccttcaaaacccaagaagaaacagaattcaaaaggacttgctccttctgtggatttccagcaaagtgttactgtggtcctctttcaagacgagaataccttagtctcagcaggagctgtggatgggataatcaaagtatgggatttacgtaagaattatactgcttatcgacaagaacccatagcatccaagtctttcctgtacccaggtagcagcactcgaaaacttggatattcaagtctgattttggattccactggctctactttatttgctaattgcacagacgataacatctacatgtttaatatgactgggttgaagacttctccagtggctattttcaatggacaccagaactctaccttttatgtaaaatccagccttagtccagatgaccagtttttagtcagtggctcaagtgatgaagctgcctacatatggaaggtctccacaccctggcaacctcctactgtgctcctgggtcattctcaagaggtcacgtctgtgtgctggtgtccatctgacttcacaaagattgctacctgttctgatgacaatacactaaaaatctggcgcttgaatagaggcttagaggagaaaccaggaggtgataaactttccacggtgggttgggcctctcagaagaaaaaagagtcaagacctggcctagtaacagtaacgagtagccagagtactcctgccaaagcccccagggtaaagtgcaatccatccaattcttccccgtcatccgcagcttgtgccccaagctgtgctggagacctccctcttccttcaaatactcctacgttctctattaaaacctctcctgccaaggcccggtctcccatcaacagaagaggctctgtctcctccgtctctcccaagccaccttcatctttcaagatgtcgattagaaactgggtgacccgaacaccttcctcatcaccacccatcactccacctgcttcggagaccaagatcatgtctccgagaaaagcccttattcctgtgagccagaagtcatcccaagcagaggcttgctctgagtctagaaatagagtaaagaggaggctagactcaagctgtctggagagtgtgaaacaaaagtgtgtgaagagttgtaactgtgtgactgagcttgatggccaagttgaaaatcttcatttggatctgtgctgccttgctggtaaccaggaagaccttagtaaggactctctaggtcctaccaaatcaagcaaaattgaaggagctggtaccagtatctcagagcctccgtctcctatcagtccgtatgcttcagaaagctgtggaacgctacctcttcctttgagaccttgtggagaagggtctgaaatggtaggcaaagagaatagttccccagagaataaaaactggttgttggccatggcagccaaacggaaggctgagaatccatctccacgaagtccgtcatcccagacacccaattccaggagacagagcggaaagacattgccaagcccggtcaccatcacgcccagctccatgaggaaaatctgcacatacttccatagaaagtcccaggaggacttctgtggtcctgaacactcaacagaattatagattctaatctgagtgagttactgagctttggtccactaaaacaagctgagctttggtccactaaaacaagatgaaaaatacaagagtgactctataactctggtctttaagaaagctgccttttcatttttagacaaaatcttttcaacgctgaaatgtacctaatctggttctactaccataatgtatatgcagcttcccgaggatgaatgctgtgtttaaatttcataaagtaaatttgtcactctagcattttgaatgaatagtcttcactttttaaattattcatcttctctataataatgacatcccagttcatggaggcaaaaaacaagtttcttgttatcctgaaactttctatgctcagtggaaagtatctgccagccacagcatgaggcctgtgaaggctgactgagaaatcctctgctgaagacccctggttctgttctgcctccaacatgtataattttatttgaaatacataatcttttcactaaaaaaaaaaaaaaaaaaaaaaaagaaacaaaagaaaacaaagcaaggcaacgacgaaaagaaaggcaagaagacgcgcaggagcagcaccagagcggcgaggagcagaacccggcggggggcggcgggagagggggcacagcggagagcgtctcatcgccgctgcacccaaacttctatccctatccacggaccacagccaccacacacagcgcacgacacacaacaacaagcgcgatcagcccgccgacacgcacgctgagaaccacaccgactacatgacatgagaaaacgcctcatccgcggcacacaccacacactcgctcatcagcgtggaacaccacagacccaacacaacaaagcatcaaaagagcacacaacgcaaggaagcggtagcgagatgatcctgagcacgacgtgcacaacaacacaa

SEQ ID NO: 440736 - DNA, 3076 bp, Homo sapiens
cccgcggtttgtccgcgcctctgctaccccctgcgcaggcgctcaaggagctcttggactccaggttcccgcggctgggagaaaaggaggcggggatccgaagggggaaatgactctgaggcgcccggacgtcgctcggaagccaatcagagagcgtgacgtcagtttggcgcggagtttggcggccggggcttacagtggcgggagttggaggcgataacgatttgtgttgtgagaggcgcaagctgcgatttctgctgaacttggaggcatttctacgacttttctctcagctgaggcttttcctccgaccctgatgctcttcaattcgttccccgtcatccgcagcttgtgccccaagctgtgctggagacctccctcttccttcaaatactcctacgttctctattaaaacctctcctgccaaggcccggtctcccatcaacagaagaggctctgtctcctccgtctctcccaagccaccttcatctttcaagatgtcgattagaaactgggtgacccgaacaccttcctcatcaccacccatcactccacctgcttcggagaccaagatcatgtctccgagaaaagcccttattcctgtgagccagaagtcatcccaagcagaggcttgctctgagtctagaaatagagtaaagaggaggctagactcaagctgtctggagagtgtgaaacaaaagtgtgtgaagagttgtaactgtgtgactgagcttgatggccaagttgaaaatcttcatttggatctgtgctgccttgctggtaaccaggaagaccttagtaaggactctctaggtcctaccaaatcaagcaaaattgaaggagctggtaccagtatctcagagcctccgtctcctatcagtccgtatgcttcagaaagctgtggaacgctacctcttcctttgagaccttgtggagaagggtctgaaatggtaggcaaagagaatagttccccagagaataaaaactggttgttggccatggcagccaaacggaaggctgagaatccatctccacgaagtccgtcatcccagacacccaattccaggagacagagcggaaagacattgccaagcccggtcaccatcacgcccagctccatgaggaaaatctgcacatacttccatagaaagtcccaggaggacttctgtggtcctgaacactcaacagaattatagattctaatctgagtgagttactgagctttggtccactaaaacaagctgagctttggtccactaaaacaagatgaaaaatacaagagtgactctataactctggtctttaagaaagctgccttttcatttttagacaaaatcttttcaacgctgaaatgtacctaatctggttctactaccataatgtatatgcagcttcccgaggatgaatgctgtgtttaaatttcataaagtaaatttgtcactctagcattttgaatgaatagtcttcactttttaaattattcatcttctctataataatgacatcccagttcatggaggcaaaaaacaagtttcttgttatcctgaaactttctatgctcagtggaaagtatctgccagccacagcatgaggcctgtgaaggctgactgagaaatcctctgctgaagacccctggttctgttctgcctccaacatgtataattttatttgaaatacataatcttttcactatgcttttgtggggttttttttaagtatgtgtaaaaatgtgatgctcagataagtacatttatatcagttcagtgttaaaatgcagtctcttgagttaaagtcatctttattttaaatgcagtgataaatgtcaactcttcggagaaactaggagaacaacaacagaaagctgtgtttgtcttttttctctcaaatatatctcccgtatgagatttcaggtccccatgttttcaccaagcaatctgctatgtcagccaacccaacatcactttctacaggaggttatgatttttgccatttactagaggaagatgttttatgaaatcaatttggggtttgaattcaggtgcagtcatcagttctttaggggctgcaatgttttaaaaaaaataagtcatcagattttaagaaaaaagtgatgatttcttattgatatttttgtaacagaatatagctcttaactgaaaatccagaaccagaaacataaatcttgagtttcttttcatgtacataaaaagcaatagccttttagtatagatagccctgagccaaaaagtaatagaattttctctagatatttaatacagagagtgtatagactgactctaagttaataatgtgcaaaatatcttaaacatccctccccttattcaacaattatgtatcagtgatcttgaaccattgttttatatttttcacctttgtaacctcatggaaagaggctttacatactttctatgtactatttacttagaagggagcccccttccagtcatgaaacttcatttgttttatccatatcctgaggactgtgtagacttatgatctattctgacaactttttaattcctttgatcttataagttaaagctgtaacaactgaaattgcatggatcaagtaagcatagttttatccagggagaaaaataaaaggaagccatagaattgctctggtcaaaaccaagcacaccatagccttaactgaatatttaggaaatctgcctaatctgcttatatttggtgtttgttttttgactgttgggctttgggaagatgttatttatgaccaatatctgccagtaacgctgtttatctcacttgctttgaaagccaatgggggaaaaaaatccatgaaaaaaaaaagattgataaagtagatgattttgtttgtatccctacccatctcctggcagccctactgagtgaaattgggatacatttggctgtcagaaattataccgagtctactgggtataacatgtctcacttggaaagctagtacttttaaatgggtgccaaaggtcaactgtaatgagataattatccctgcctgtgtccatgtcagactttgagctgatcctgaataataaagccttttacctta

SEQ ID NO: 440737 - DNA, 1824 bp, Homo sapiens
aaaagaccagagttatagagtcactcttgtatttttcatcttgttttagtggaccaaagctcagcttgttttagtggacaaaatcttttcaacgctgaaatgtacctaatctggttctactaccataatgtatatgcagcttcccgaggatgaatgctgtgtttaaatttcataaagtaaatttgtcactctagcattttgaatgaatagtcttcactttttaaattattcatcttctctataataatgacatcccagttcatggaggcaaaaaacaagtttcttgttatcctgaaactttctatgctcagtggaaagtatctgccagccacagcatgaggcctgtgaaggctgactgagaaatcctctgctgaagacccctggttctgttctgcctccaacatgtataattttatttgaaatacataatcttttcactatgcttttgtggggttttttttaagtatgtgtaaaaatgtgatgctcagataagtacatttatatcagttcagtgttaaaatgcagtctcttgagttaaagtcatctttattttaaatgcagtgataaatgtcaactcttcggagaaactaggagaacaacaacagaaagctgtgtttgtcttttttctctcaaatatatctcccgtatgagatttcaggtccccatgttttcaccaagcaatctgctatgtcagccaacccaacatcactttctacaggaggttatgatttttgccatttactagaggaagatgttttatgaaatcaatttggggtttgaattcaggtgcagtcatcagttctttaggggctgcaatgttttaaaaaaaataagtcatcagattttaagaaaaaagtgatgatttcttattgatatttttgtaacagaatatagctcttaactgaaaatccagaaccagaaacataaatcttgagtttcttttcatgtacataaaaagcaatagccttttagtatagatagccctgagccaaaaagtaatagaattttctctagatatttaatacagagagtgtatagactgactctaagttaataatgtgcaaaatatcttaaacatccctccccttattcaacaattatgtatcagtgatcttgaaccattgttttatatttttcacctttgtaacctcatggaaagaggctttacatactttctatgtactatttacttagaagggagcccccttccagtcatgaaacttcatttgttttatccatatcctgaggactgtgtagacttatgatctattctgacaactttttaattcctttgatcttataagttaaagctgtaacaactgaaattgcatggatcaagtaagcatagttttatccagggagaaaaataaaaggaagccatagaattgctctggtcaaaaccaagcacaccatagccttaactgaatatttaggaaatctgcctaatctgcttatatttggtgtttgttttttgactgttgggctttgggaagatgttatttatgaccaatatctgccagtaacgctgtttatctcacttgctttgaaagccaatgggggaaaaaaatccatgaaaaaaaaaagattgataaagtagatgattttgtttgtatccctacccatctcctggcagccctactgagtgaaattgggatacatttggctgtcagaaattataccgagtctactgggtataacatgtctcacttggaaagctagtacttttaaatgggtgccaaaggtcaactgtaatgagataattatccctgcctgtgtccatgtcagactttgagctgatcctgaataataaagccttttacctta

SEQ ID NO: 440738 - DNA, 793 bp, Homo sapiens
ggcgaggggatggagttttgctcgttactcaggctggagtgcaatggcgcgatctcagctcaccacaacctccgcctcctaagttcaagtgattctcctttctcagcctccccttccagtcatgaaacttcatttgttttatccatatcctgaggactgtgtagacttatgacagttctgtgtagactttatgcctgtgtagactttatgtcagtttttgtcattatttgaaaatctattctgacaactttttaattcctttgatcttataagttaaagctgtaacaactgaaattgcatggatcaagtaagcatagttttatccagggagaaaaataaaaggaagccatagaattgctctggtcaaaaccaagcacaccatagccttaactgaatatttaggaaatctgcctaatctgcttatatttggtgtttgttttttgactgttgggctttgggaagatgttatttatgaccaatatctgccagtaacgctgtttatctcacttgctttgaaagccaatgggggaaaaaaatccatgaaaaaaaaaagattgataaagtagatgattttgtttgtatccctacccatctcctggcagccctactgagtgaaattgggatacatttggctgtcagaaattataccgagtctactgggtataacatgtctcacttggaaagctagtacttttaaatgggtgccaaaggtcaactgtaatgagataattatccctgcctgtgtccatgtcagactttgagctgatcctgaataataaagccttttacctta

SEQ ID NO: 440739 - DNA, 619 bp, Homo sapiens
cccgcggtttgtccgcgcctctgctaccccctgcgcaggcgctcaaggagctcttggactccaggttcccgcggctgggagaaaaggaggcggggatccgaagggggaaatgactctgaggcgcccggacgtcgctcggaagccaatcagagagcgtgacgtcagtttggcgcggagtttggcggccggggcttacagtggcgggagttggaggcgataacgatttgtgttgtgagaggcgcaagctgcgatttctgctgaacttggaggcatttctacgacttttctctcagctgaggcttttcctccgaccctgatgctcttcaattcggtgctccgccagccccagcttggcgtcctgagaaatggttgggccctaatgccttcttgtctggattgtaagaagtctcccagatggcctcctagtttgtctgtcttcggtttattctccacattgctgctaatgatccttctaaaatggaaatctgattactcttctgtgtatttttaaattgatatctaaaagtttttattataaacttaaacaaatgcaaagaatataatttctgaccatattgggaatattgacattttaaaaataaaaatgctatatcactca

SEQ ID NO: 440740 - DNA, 4552 bp, Homo sapiens
cccgcggtttgtccgcgcctctgctaccccctgcgcaggcgctcaaggagctcttggactccaggttcccgcggctgggagaaaaggaggcggggatccgaagggggaaatgactctgaggcgcccggacgtcgctcggaagccaatcagagagcgtgacgtcagtttggcgcggagtttggcggccggggcttacagtggcgggagttggaggcgataacgatttgtgttgtgagaggcgcaagctgcgatttctgctgaacttggaggcatttctacgacttttctctcagctgaggcttttcctccgaccctgatgctcttcaattcggtgctccgccagccccagcttggcgtcctgagaaatggatggtcttcacaataccctcttcaatcccttctgactggttatcagtgcagtggtaatgatgaacacacttcttatggagaaacaggagtcccagttcctccttttggatgtaccttctcttctgctcccaatatggaacatgtactagcagttgccaatgaagaaggctttgttcgattgtataacacagaatcacaaagtttcagaaagaagtgcttcaaagaatggatggctcactggaatgccgtctttgacctggcctgggttcctggtgaacttaaacttgttacagcagcaggtgatcaaacagccaaattttgggacgtaaaagctggtgagctgattggaacatgcaaaggtcatcaatgcagcctcaagtcagttgccttttctaagtttgagaaagctgtattctgtacgggtggaagagatggcaacattatggtctgggataccaggtgcaacaaaaaagatgggttttataggcaagtgaatcaaatcagtggagctcacaatacctcagacaagcaaaccccttcaaaacccaagaagaaacagaattcaaaaggacttgctccttctgtggatttccagcaaagtgttactgtggtcctctttcaagacgagaataccttagtctcagcaggagctgtggatgggataatcaaagtatgggatttacgtaagaattatactgcttatcgacaagaacccatagcatccaagtctttcctgtacccaggtagcagcactcgaaaacttggatattcaagtctgattttggattccactggctctactttatttgctaattgcacagacgataacatctacatgtttaatatgactgggttgaagacttctccagtggctattttcaatggacaccagaactctaccttttatgtaaaatccagccttagtccagatgaccagtttttagtcagtggctcaagtgatgaagctgcctacatatggaaggtctccacaccctggcaacctcctactgtgctcctgggtcattctcaagaggtcacgtctgtgtgctggtgtccatctgacttcacaaagattgctacctgttctgatgacaatacactaaaaatctggcgcttgaatagaggcttagaggagaaaccaggaggtgataaactttccacggtgggttgggcctctcagaagaaaaaagagtcaagacctggcctagtaacagtaacgagtagccagagtactcctgccaaagcccccagggtaaagtgcaatccatccaattcttccccgtcatccgcagcttgtgccccaagctgtgctggagacctccctcttccttcaaatactcctacgttctctattaaaacctctcctgccaaggcccggtctcccatcaacagaagaggctctgtctcctccgtctctcccaagccaccttcatctttcaagatgtcgattagaaactgggtgacccgaacaccttcctcatcaccacccatcactccacctgcttcggagaccaagatcatgtctccgagaaaagcccttattcctgtgagccagaagtcatcccaagcagaggcttgctctgagtctagaaatagagtaaagaggaggctagactcaagctgtctggagagtgtgaaacaaaagtgtgtgaagagttgtaactgtgtgactgagcttgatggccaagttgaaaatcttcatttggatctgtgctgccttgctggtaaccaggaagaccttagtaaggactctctaggtcctaccaaatcaagcaaaattgaaggagctggtaccagtatctcagagcctccgtctcctatcagtccgtatgcttcagaaagctgtggaacgctacctcttcctttgagaccttgtggagaagggtctgaaatggtaggcaaagagaatagttccccagagaataaaaactggttgttggccatggcagccaaacggaaggctgagaatccatctccacgaagtccgtcatcccagacacccaattccaggagacagagcggaaagacattgccaagcccggtcaccatcacgcccagctccatgaggaaaatctgcacatacttccatagaaagtcccaggaggacttctgtggtcctgaacactcaacagaattatagattctaatctgagtgagttactgagctttggtccactaaaacaagctgagctttggtccactaaaacaagatgaaaaatacaagagtgactctataactctggtctttaagaaagctgccttttcatttttagacaaaatcttttcaacgctgaaatgtacctaatctggttctactaccataatgtatatgcagcttcccgaggatgaatgctgtgtttaaatttcataaagtaaatttgtcactctagcattttgaatgaatagtcttcactttttaaattattcatcttctctataataatgacatcccagttcatggaggcaaaaaacaagtttcttgttatcctgaaactttctatgctcagtggaaagtatctgccagccacagcatgaggcctgtgaaggctgactgagaaatcctctgctgaagacccctggttctgttctgcctccaacatgtataattttatttgaaatacataatcttttcactatgcttttgtggggttttttttaagtatgtgtaaaaatgtgatgctcagataagtacatttatatcagttcagtgttaaaatgcagtctcttgagttaaagtcatctttattttaaatgcagtgataaatgtcaactcttcggagaaactaggagaacaacaacagaaagctgtgtttgtcttttttctctcaaatatatctcccgtatgagatttcaggtccccatgttttcaccaagcaatctgctatgtcagccaacccaacatcactttctacaggaggttatgatttttgccatttactagaggaagatgttttatgaaatcaatttggggtttgaattcaggtgcagtcatcagttctttaggggctgcaatgttttaaaaaaaataagtcatcagattttaagaaaaaagtgatgatttcttattgatatttttgtaacagaatatagctcttaactgaaaatccagaaccagaaacataaatcttgagtttcttttcatgtacataaaaagcaatagccttttagtatagatagccctgagccaaaaagtaatagaattttctctagatatttaatacagagagtgtatagactgactctaagttaataatgtgcaaaatatcttaaacatccctccccttattcaacaattatgtatcagtgatcttgaaccattgttttatatttttcacctttgtaacctcatggaaagaggctttacatactttctatgtactatttacttagaagggagcccccttccagtcatgaaacttcatttgttttatccatatcctgaggactgtgtagacttatgatctattctgacaactttttaattcctttgatcttataagttaaagctgtaacaactgaaattgcatggatcaagtaagcatagttttatccagggagaaaaataaaaggaagccatagaattgctctggtcaaaaccaagcacaccatagccttaactgaatatttaggaaatctgcctaatctgcttatatttggtgtttgttttttgactgttgggctttgggaagatgttatttatgaccaatatctgccagtaacgctgtttatctcacttgctttgaaagccaatgggggaaaaaaatccatgaaaaaaaaaagattgataaagtagatgattttgtttgtatccctacccatctcctggcagccctactgagtgaaattgggatacatttggctgtcagaaattataccgagtctactgggtataacatgtctcacttggaaagctagtacttttaaatgggtgccaaaggtcaactgtaatgagataattatccctgcctgtgtccatgtcagactttgagctgatcctgaataataaagccttttaccttatctgatgtccttttctgagctttttgcattacctagaagcagtctacaaaaaagaactatagtagtcaagaatcccttctacttgttcattaaaatgtttattcccaaagttataatctatttcaagctgaaagagcttttaataaaaaacatcttgcttgga

SEQ ID NO: 440741 - DNA, 4221 bp, Homo sapiens
cccgcggtttgtccgcgcctctgctaccccctgcgcaggcgctcaaggagctcttggactccaggttcccgcggctgggagaaaaggaggcggggatccgaagggggaaatgactctgaggcgcccggacgtcgctcggaagccaatcagagagcgtgacgtcagtttggcgcggagtttggcggccggggcttacagtggcgggagttggaggcgataacgatttgtgttgtgagaggcgcaagctgcgatttctgctgaacttggaggcatttctacgacttttctctcagctgaggcttttcctccgaccctgatgctcttcaattcggtgctccgccagccccagcttggcgtcctgagaaatgctcccaatatggaacatgtactagcagttgccaatgaagaaggctttgttcgattgtataacacagaatcacaaagtttcagaaagaagtgcttcaaagaatggatggctcactggaatgccgtctttgacctggcctgggttcctggtgaacttaaacttgttacagcagcaggtgatcaaacagccaaattttgggacgtaaaagctggtgagctgattggaacatgcaaaggtcatcaatgcagcctcaagtcagttgccttttctaagtttgagaaagctgtattctgtacgggtggaagagatggcaacattatggtctgggataccaggtgcaacaaaaaagatgggttttataggcaagtgaatcaaatcagtggagctcacaatacctcagacaagcaaaccccttcaaaacccaagaagaaacagaattcaaaaggacttgctccttctgtggatttccagcaaagtgttactgtggtcctctttcaagacgagaataccttagtctcagcaggagctgtggatgggatattcaagtctgattttggattccactggctctactttatttgctaattgcacagacgataacatctacatgtttaatatgactgggttgaagacttctccagtggctattttcaatggacaccagaactctaccttttatgtaaaatccagccttagtccagatgaccagtttttagtcagtggctcaagtgatgaagctgcctacatatggaaggtctccacaccctggcaacctcctactgtgctcctgggtcattctcaagaggtcacgtctgtgtgctggtgtccatctgacttcacaaagattgctacctgttctgatgacaatacactaaaaatctggcgcttgaatagaggcttagaggagaaaccaggaggtgataaactttccacggtgggttgggcctctcagaagaaaaaagagtcaagacctggcctagtaacagtaacgagtagccagagtactcctgccaaagcccccagggtaaagtgcaatccatccaattcttccccgtcatccgcagcttgtgccccaagctgtgctggagacctccctcttccttcaaatactcctacgttctctattaaaacctctcctgccaaggcccggtctcccatcaacagaagaggctctgtctcctccgtctctcccaagccaccttcatctttcaagatgtcgattagaaactgggtgacccgaacaccttcctcatcaccacccatcactccacctgcttcggagaccaagatcatgtctccgagaaaagcccttattcctgtgagccagaagtcatcccaagcagaggcttgctctgagtctagaaatagagtaaagaggaggctagactcaagctgtctggagagtgtgaaacaaaagtgtgtgaagagttgtaactgtgtgactgagcttgatggccaagttgaaaatcttcatttggatctgtgctgccttgctggtaaccaggaagaccttagtaaggactctctaggtcctaccaaatcaagcaaaattgaaggagctggtaccagtatctcagagcctccgtctcctatcagtccgtatgcttcagaaagctgtggaacgctacctcttcctttgagaccttgtggagaagggtctgaaatggtaggcaaagagaatagttccccagagaataaaaactggttgttggccatggcagccaaacggaaggctgagaatccatctccacgaagtccgtcatcccagacacccaattccaggagacagagcggaaagacattgccaagcccggtcaccatcacgcccagctccatgaggaaaatctgcacatacttccatagaaagtcccaggaggacttctgtggtcctgaacactcaacagaattatagattctaatctgagtgagttactgagctttggtccactaaaacaagctgagctttggtccactaaaacaagatgaaaaatacaagagtgactctataactctggtctttaagaaagctgccttttcatttttagacaaaatcttttcaacgctgaaatgtacctaatctggttctactaccataatgtatatgcagcttcccgaggatgaatgctgtgtttaaatttcataaagtaaatttgtcactctagcattttgaatgaatagtcttcactttttaaattattcatcttctctataataatgacatcccagttcatggaggcaaaaaacaagtttcttgttatcctgaaactttctatgctcagtggaaagtatctgccagccacagcatgaggcctgtgaaggctgactgagaaatcctctgctgaagacccctggttctgttctgcctccaacatgtataattttatttgaaatacataatcttttcactatgcttttgtggggttttttttaagtatgtgtaaaaatgtgatgctcagataagtacatttatatcagttcagtgttaaaatgcagtctcttgagttaaagtcatctttattttaaatgcagtgataaatgtcaactcttcggagaaactaggagaacaacaacagaaagctgtgtttgtcttttttctctcaaatatatctcccgtatgagatttcaggtccccatgttttcaccaagcaatctgctatgtcagccaacccaacatcactttctacaggaggttatgatttttgccatttactagaggaagatgttttatgaaatcaatttggggtttgaattcaggtgcagtcatcagttctttaggggctgcaatgttttaaaaaaaataagtcatcagattttaagaaaaaagtgatgatttcttattgatatttttgtaacagaatatagctcttaactgaaaatccagaaccagaaacataaatcttgagtttcttttcatgtacataaaaagcaatagccttttagtatagatagccctgagccaaaaagtaatagaattttctctagatatttaatacagagagtgtatagactgactctaagttaataatgtgcaaaatatcttaaacatccctccccttattcaacaattatgtatcagtgatcttgaaccattgttttatatttttcacctttgtaacctcatggaaagaggctttacatactttctatgtactatttacttagaagggagcccccttccagtcatgaaacttcatttgttttatccatatcctgaggactgtgtagacttatgactgtgtagactttatgtcagttctgtgtagactttatgtcagtttttgtcattatttgaaaatctattctgacaactttttaattcctttgatcttataagttaaagctgtaacaactgaaattgcatggatcaagtaagcatagttttatccagggagaaaaataaaaggaagccatagaattgctctggtcaaaaccaagcacaccatagccttaactgaatatttaggaaatctgcctaatctgcttatatttggtgtttgttttttgactgttgggctttgggaagatgttatttatgaccaatatctgccagtaacgctgtttatctcacttgctttgaaagccaatgggggaaaaaaatccatgaaaaaaaaaagattgataaagtagatgattttgtttgtatccctacccatctcctggcagccctactgagtgaaattgggatacatttggctgtcagaaattataccgagtctactgggtataacatgtctcacttggaaagctagtacttttaaatgggtgccaaaggtcaactgtaatgagataattatccctgcctgtgtccatgtcagactttgagctgatcctgaataataaagccttttacctta

SEQ ID NO: 440742 - DNA, 3050 bp, Homo sapiens
cccgcggtttgtccgcgcctctgctaccccctgcgcaggcgctcaaggagctcttggactccaggttcccgcggctgggagaaaaggaggcggggatccgaagggggaaatgactctgaggcgcccggacgtcgctcggaagccaatcagagagcgtgacgtcagtttggcgcggagtttggcggccggggcttacagtggcgggagttgaagaaaaaagagtcaagacctggcctagtaacagtaacgagtagccagagtactcctgccaaagcccccagggtaaagtgcaatccatccaattcttccccgtcatccgcagcttgtgccccaagctgtgctggagacctccctcttccttcaaatactcctacgttctctattaaaacctctcctgccaaggcccggtctcccatcaacagaagaggctctgtctcctccgtctctcccaagccaccttcatctttcaagatgtcgattagaaactgggtgacccgaacaccttcctcatcaccacccatcactccacctgcttcggagaccaagatcatgtctccgagaaaagcccttattcctgtgagccagaagtcatcccaagcagaggcttgctctgagtctagaaatagagtaaagaggaggctagactcaagctgtctggagagtgtgaaacaaaagtgtgtgaagagttgtaactgtgtgactgagcttgatggccaagttgaaaatcttcatttggatctgtgctgccttgctggtaaccaggaagaccttagtaaggactctctaggtcctaccaaatcaagcaaaattgaaggagctggtaccagtatctcagagcctccgtctcctatcagtccgtatgcttcagaaagctgtggaacgctacctcttcctttgagaccttgtggagaagggtctgaaatggtaggcaaagagaatagttccccagagaataaaaactggttgttggccatggcagccaaacggaaggctgagaatccatctccacgaagtccgtcatcccagacacccaattccaggagacagagcggaaagacattgccaagcccggtcaccatcacgcccagctccatgaggaaaatctgcacatacttccatagaaagtcccaggaggacttctgtggtcctgaacactcaacagaattatagattctaatctgagtgagttactgagctttggtccactaaaacaagctgagctttggtccactaaaacaagatgaaaaatacaagagtgactctataactctggtctttaagaaagctgccttttcatttttagacaaaatcttttcaacgctgaaatgtacctaatctggttctactaccataatgtatatgcagcttcccgaggatgaatgctgtgtttaaatttcataaagtaaatttgtcactctagcattttgaatgaatagtcttcactttttaaattattcatcttctctataataatgacatcccagttcatggaggcaaaaaacaagtttcttgttatcctgaaactttctatgctcagtggaaagtatctgccagccacagcatgaggcctgtgaaggctgactgagaaatcctctgctgaagacccctggttctgttctgcctccaacatgtataattttatttgaaatacataatcttttcactatgcttttgtggggttttttttaagtatgtgtaaaaatgtgatgctcagataagtacatttatatcagttcagtgttaaaatgcagtctcttgagttaaagtcatctttattttaaatgcagtgataaatgtcaactcttcggagaaactaggagaacaacaacagaaagctgtgtttgtcttttttctctcaaatatatctcccgtatgagatttcaggtccccatgttttcaccaagcaatctgctatgtcagccaacccaacatcactttctacaggaggttatgatttttgccatttactagaggaagatgttttatgaaatcaatttggggtttgaattcaggtgcagtcatcagttctttaggggctgcaatgttttaaaaaaaataagtcatcagattttaagaaaaaagtgatgatttcttattgatatttttgtaacagaatatagctcttaactgaaaatccagaaccagaaacataaatcttgagtttcttttcatgtacataaaaagcaatagccttttagtatagatagccctgagccaaaaagtaatagaattttctctagatatttaatacagagagtgtatagactgactctaagttaataatgtgcaaaatatcttaaacatccctccccttattcaacaattatgtatcagtgatcttgaaccattgttttatatttttcacctttgtaacctcatggaaagaggctttacatactttctatgtactatttacttagaagggagcccccttccagtcatgaaacttcatttgttttatccatatcctgaggactgtgtagacttatgatctattctgacaactttttaattcctttgatcttataagttaaagctgtaacaactgaaattgcatggatcaagtaagcatagttttatccagggagaaaaataaaaggaagccatagaattgctctggtcaaaaccaagcacaccatagccttaactgaatatttaggaaatctgcctaatctgcttatatttggtgtttgttttttgactgttgggctttgggaagatgttatttatgaccaatatctgccagtaacgctgtttatctcacttgctttgaaagccaatgggggaaaaaaatccatgaaaaaaaaaagattgataaagtagatgattttgtttgtatccctacccatctcctggcagccctactgagtgaaattgggatacatttggctgtcagaaattataccgagtctactgggtataacatgtctcacttggaaagctagtacttttaaatgggtgccaaaggtcaactgtaatgagataattatccctgcctgtgtccatgtcagactttgagctgatcctgaataataaagccttttacctta

SEQ ID NO: 440743 - DNA, 2456 bp, Homo sapiens
cccgcggtttgtccgcgcctctgctaccccctgcgcaggcgctcaaggagctcttggactccaggttcccgcggctgggagaaaaggaggcggggatccgaagggggaaatgactctgaggcgcccggacgtcgctcggaagccaatcagagagcgtgacgtcagtttggcgcggagtttggcggccggggcttacagtggcgggagttggaggcgataacgatttgtgttgtgagaggcgcaagctgcgatttctgctgaacttggaggcatttctacgacttttctctcagctgaggcttttcctccgaccctgatgctcttcaattcggtgctccgccagccccagcttggcgtcctgagaaatggatggtcttcacaataccctcttcaatcccttctgactggttatcagtgcagtggtaatgatgaacacacttcttatggagaaacaggagtcccagttcctccttttggatgtaccttctcttctgctcccaatatggaacatgtactagcagttgccaatgaagaaggctttgttcgattgtataacacagaatcacaaagtttcagaaagaagtgcttcaaagaatggatggctcactggaatgccgtctttgacctggcctgggttcctggtgaacttaaacttgttacagcagcaggtgatcaaacagccaaattttgggacgtaaaagctggtgagctgattggaacatgcaaaggtcatcaatgcagcctcaagtcagttgccttttctaagtttgagaaagctgtattctgtacgggtggaagagatggcaacattatggtctgggataccaggtgcaacaaaaaagatgggttttataggcaagtgaatcaaatcagtggagctcacaatacctcagacaagcaaaccccttcaaaacccaagaagaaacagaattcaaaaggacttgctccttctgtggatttccagcaaagtgttactgtggtcctctttcaagacgagaataccttagtctcagcaggagctgtggatgggataatcaaagtatgggatttacgtaagaattatactgcttatcgacaagaacccatagcatccaagtctttcctgtacccaggtagcagcactcgaaaacttggatattcaagtctgattttggattccactggctctactttatttgctaattgcacagacgataacatctacatgtttaatatgactgggttgaagacttctccagtggctattttcaatggacaccagaactctaccttttatgtaaaatccagccttagtccagatgaccagtttttagtcagtggctcaagtgatgaagctgcctacatatggaaggtctccacaccctggcaacctcctactgtgctcctgggtcattctcaagaggtcacgtctgtgtgctggtgtccatctgacttcacaaagattgctacctgttctgatgacaatacactaaaaatctggcgcttgaatagaggcttagaggagaaaccaggaggtgataaactttccacggtgggttgggcctctcagaagaaaaaagagtcaagacctggcctagtaacagtaacgagtagccagagtactcctgccaaagcccccagggtaaagtgcaatccatccaattcttccccgtcatccgcagcttgtgccccaagctgtgctggagacctccctcttccttcaaatactcctacgttctctattaaaacctctcctgccaaggcccggtctcccatcaacagaagaggctctgtctcctccgtctctcccaagccaccttcatctttcaagatgtcgattagaaactgggtgacccgaacaccttcctcatcaccacccatcactccacctgcttcggagaccaagatcatgtctccgagaaaagcccttattcctgtgagccagaagtcatcccaagcagaggcttgctctgagtctagaaatagagtaaagaggaggctagactcaagctgtctggagagtgtgaaacaaaagtgtgtgaagagttgtaactgtgtgactgagcttgatggccaagttgaaaatcttcatttggatctgtgctgccttgctggtaaccaggaagaccttagtaaggactctctaggtcctaccaaatcaagcaaaattgaaggagctggtaccagtatctcagagcctccgtctcctatcagtccgtatgcttcagaaagctgtggaacgctacctcttcctttgagaccttgtggagaagggtctgaaatggtaggcaaagagaatagttccccagagaataaaaactggttgttggccatggcagccaaacggaaggctgagaatccatctccacgaagtccgtcatcccagacacccaattccaggagacagagcggaaagacattgccaagcccgctgcagtctgcaaaggtcttcacaaatcagaatcaactggtaatta

SEQ ID NO: 440744 - DNA, 219 bp, Homo sapiens
actaaacatagcactgagaattctcctctttttacaaaaatgacagacttaagagagggcatggaacagattaagagaattaacatggagaggagagcagaggtataaaaggtatccaagaaaagtaaaacatacaaaggcaattcaaatcaaagtgagcactgcctatatacagacagaaagcgagtcctctatgaaaccatacttggcagaaagtac

SEQ ID NO: 440745 - DNA, 5420 bp, Homo sapiens
ccagtgcattaatcagtagaattaatcagtgcatgttcctagtctgtaactaaactctgtggaagattcccctgctttcctatagtaaaggtttacgactttttcttctatctttattaagcttgtcattttcttctttttgcatggttcttacaaattatttggtcaatttcattttcagaatgttgaaacacagaatgtgcttctctcctctgactcaattagctgtttttgtttttctacagatgattcttttattaggccagtaactttttggattgttggggattttgatagcccttctggacggcagttactgtatgatgccatcaaacatcagaaatccagtaacaatgttagaataagcatgatcaataatcctgccaaagagataagctatgagaacactcagatctccagagcaatctgggcagctctccaaactcagacttccaacgctgctaagaacttcatcaccaaaatggccaaggagggggctgcagaggccctggctgcaggagctgacattgcggagttctctgttgggggaatggatttcagtctttttaaagaggtctttgagtcttccaaaatggatttcattttgtctcatgccgtgtactgcagggatgttctgaagctgaagaagggacagagggcagtgatcagcaatggaaggatcattgggccactggaggatagtgagctctttaatcaagacgatttccacctcctcgaaaatatcatcttaaaaacctcaggacagaaaataaaatctcatattcaacagcttcgggtagaagaagatgtggcaagcgacttggtaatgaaggtggatgctcttctgtcagcgcaaccaaaaggagatccaagaatcgagtaccagttttttgaagacagacacagtgcaatcaaactgaggccgaaggaaggggagacatactttgatgttgtggctgtcgttgaccctgtcaccagagaagcacagagacttgctcctttgctcttggttttggctcagctgataaacatgaatctgagagtatttatgaactgccaatccaaactttctgacatgcctttaaaaagcttttaccgttatgtcttagaaccagagatttctttcacttcagacaatagttttgctaagggtccaatcgcaaaatttttggatatgcctcagtctccactgttcactctgaatttgaacacacctgagagctggatggtagaatctgtcagaacaccatatgatcttgataatatttatttagaagaggtggacagtgtagtggctgctgagtatgagctggaatacctgttactggaaggtcattgctacgacatcaccacaggccagcctccacggggactacagtttaccttaggaacttcagccaacccggtcattgtggacaccattgttatggccaatctgggctactttcagctgaaagccaacccaggagcttggatcctcagacttaggaagggacgctctgaagatatttatagaatttacagccacgatggcaccgattctccccctgatgctgatgaggtggttatcgtcctcaacaacttcaaaagcaaaattattaaagtgaaggttcagaagaaggcagatatggtgaacgaagacttgctgagtgatggaacgagtgagaatgaatctggattttgggattccttcaaatggggctttacaggacagaagactgaggaagtgaagcaagataaagatgacataattaatattttctccgttgcatctggtcatctctacgaaagatttcttcgcataatgatgctatccgtgctgaagaataccaagactcctgtgaaattctggttcttgaagaattacttgtcccccacatttaaggagtttataccttacatggcaaatgaatacaatttccagtatgagcttgttcagtacaaatggccccggtggcttcatcaacaaactgaaaaacagcgtatcatctggggttacaagatcctcttcctggatgtacttttcccactagttgttgacaagttcctgtttgtggatgctgatcagattgtacgaacagatctgaaagagttaagagatttcaatttggatggtgctccttatggttacactcctttctgtgacagccgaagagaaatggacggctacaggttctggaagtcagggtactgggccagtcatttagccgggcgaaagtatcatatcagtgcactatatgttgtggatctgaagaagtttaggaaaatagctgctggtgacagactcaggggacagtaccaaggtctgagtcaggaccctaacagcctttcaaatcttgatcaagatctgcccaataacatgattcatcaggtgccaattaaatccctccctcaagaatggctttggtgtgaaacgtggtgtgatgacgcctctaagaaaagggcaaaaaccattgatttgtgtaataatccgatgaccaaagagccgaaactggaagcagctgtgcggattgtcccggagtggcaggactacgaccaagagatcaaacagctacagatccgctttcagaaggagaaagaaacgggagcactgtacaaagagaagacaaaagaaccaagccgagaaggtcctcagaaacgtgaagaattatgatctctggagaaggacaggaaatcaccccatttgaaaaacagtttttataataaatgctagttttttctgatctgtctatacaactgctgataagccggctgggcaggagtgccacaccttttgattctgagcatttgattctgacttctgtactctggtggccactggatctttgggattaaagctctgttggatttgtacctcagaggaagaccaagtggctgatcctttggactctgtaaagagcattcttctagtcagagggtggaatggcagcagcaactggaagaaaatgagttttttggtgcccacacccaagagcacacacatgctgcactgtctcggaaagcagggccagctagagccaccatgttcttccttacctcagtttacctgcggcctgcgctgcactgcagatgcccaccctgccctgggtctggccggcggaagctctgtccaaggtccacacacctccaggtttacgccaacatccttgtgccctccccaccttctcttccaacgcattaggtgcattgtttaattgaaatccaaccaacaattgtgtgtcaaggctggtttggtgcagtggctgggcaaattaattttgggccaggatgggggtgggttgcagtgagggtagggaaaatgtcaggagtaggaaggttcgggggttaagggaagggaaggaagaccagaactggccatcctcttttataatccattagtagcaccatggctcatttgaaatgaaaatattacacttattccccacccaaccgcagtgaactttctaggtaattgttttgaaaacaatttttgtatctgtgaaagtctttgctttttctttccaccttctagaaaagtctgctaccagtttccttactgaatacagccatactcagcccctctcgcatccagcccgtcagggtcagggtcagggtcaggctccctcaagacgagcaccgcattgtctgccctcttttgcgtaggatttttctctcagacccaggggacattgccttggacttttctctacaaatgccctcagatgtaagaccagaaatgattctgcttgtggaactcgtggctttctgtcctattttccttttatgtgagccctgcaggttgcctttggcgcccacaccagttctgtcttcatgtcgctgcatcgtgaagccccatttgcctttagtccctgctttgtgtgtcttcacttccacagccagtgttgcccctcagggcatactttgctggtgaacgggctgtagagtcttgagtatgttattggcctaagtgggcatgaggccccagcatccgactccatctgccaggctgcagggcacagcagcactggcatagacaggcacgctctgtcttccaacgtgcaccagccttttcttacatattttgcctgtttttaaaaaatacgaggagagggtgcagatggatactgtgccctcaccctcctaagccaggtaatatattgatgtgcagacttttaagaaatcttagtcttatcacaaatatcaagtaatttattttttccattttcaaatgcaaaagttagcctaggaagcctcccagtcatcctgaaggaccttttgactttgcttttataattctgttaaaaattgaggaggggattaatgagtacaatgaaaacaaaacaaaacaaaaaattaagaagaggaaagctcaaaagaggataagagactgaaaaggcacctcagaatggctgctgtgggcagagtctgtgacatgactttccccgccctgcccctctgttcagagcagctggaaagatgggatcagtaagattaaaaaacttttgttcggccaggcgtggtggctcacacctgtaatcccagcactttgggaggctgaggcggacggatcatgaggtcaggagttcaagaccagcctggccaatatggtgaaaccccgtctctactaaaaatacaaaaattagccgggtgttgtggctcaccctctattcccagctactcgggaggcagagacaggagaatcgcctgaacccaggaggcagaggttgcagtgagctgagatcgtgccactgcactccagcctgggtgacagagcgagactccatctcagaaaacaaacaaacaaaaagaaacttttgttcaagctgcatcttcacattgaatgaaagcattcagacgggtgactgctgctgtccacaactgtgggcggaagtgtgccttttcccagtttctcgtccaggaggttgcatagcaaatactcaagtcactgggatatatgctttccaaatgctggcccccatagcacctttccccatgtctttctaccaagcctcttatgtttaatctgtgcagggaagacaagagtagaccatattctctgtgtgctgtgcatgtcctggtgtcactcattgcctcttatctgtcgccattctaatataagtcagcttaatagttgactctgaataatgcaaaacccagcttgcttccagaatggcctaggaccctcctcctcctgccagttttttttttttttttggttcatgtggcataatcatctttcaaaattaaccaaatgccccagaaaatgatgttaccactaaaatattttctccaagaaggcatactgtaacagaaaagataggtaagatatttttttcccaagaagtaagaattgattgtgctgaatgttcaaactctggaaactgttcacagtatgttgttcttagctgttatttatataaagtgaattattttctctctca

SEQ ID NO: 440746 - DNA, 4146 bp, Homo sapiens
tctcacacttatatttggcatagatgagtattttccactcgattgatccaaaagaggttcatgtctcctagtggggaagttacttctgctccatactttgtgactctcattgcctgtacctgctctttggaaatttgactgctccctgctcagtttacttcccgttgtgtaagttgcattctggtgcagcctgtgttcagtctcttcctaaaacaacactgtcggagagtgaacattctttttgtaggttggttttgtcagtcttgtggtctctccagggtgtgagggaagcttcataaccactcctgctgcagctcacccgctagggaaggatgggaagcgcagtctctttcctcttactttcaaaggccgtgtgtctgtatgagtgtttcaagtggtcttttttttacccttattgttataggggctttacaggacagaagactgaggaagtgaagcaagataaagatgacataattaatattttctccgttgcatctggtcatctctacgaaagatttcttcgcataatgatgctatccgtgctgaagaataccaagactcctgtgaaattctggttcttgaagaattacttgtcccccacatttaaggagtttataccttacatggcaaatgaatacaatttccagtatgagcttgttcagtacaaatggccccggtggcttcatcaacaaactgaaaaacagcgtatcatctggggttacaagatcctcttcctggatgtacttttcccactagttgttgacaagttcctgtttgtggatgctgatcagattgtacgaacagatctgaaagagttaagagatttcaatttggatggtgctccttatggttacactcctttctgtgacagccgaagagaaatggacggctacaggttctggaagtcagggtactgggccagtcatttagccgggcgaaagtatcatatcagtgcactatatgttgtggatctgaagaagtttaggaaaatagctgctggtgacagactcaggggacagtaccaaggtctgagtcaggaccctaacagcctttcaaatcttgatcaagatctgcccaataacatgattcatcaggtgccaattaaatccctccctcaagaatggctttggtgtgaaacgtggtgtgatgacgcctctaagaaaagggcaaaaaccattgatttgtgtaataatccgatgaccaaagagccgaaactggaagcagctgtgcggattgtcccggagtggcaggactacgaccaagagatcaaacagctacagatccgctttcagaaggagaaagaaacgggagcactgtacaaagagaagacaaaagaaccaagccgagaaggtcctcagaaacgtgaagaattatgatctctggagaaggacaggaaatcaccccatttgaaaaacagtttttataataaatgctagttttttctgatctgtctatacaactgctgataagccggctgggcaggagtgccacaccttttgattctgagcatttgattctgacttctgtactctggtggccactggatctttgggattaaagctctgttggatttgtacctcagaggaagaccaagtggctgatcctttggactctgtaaagagcattcttctagtcagagggtggaatggcagcagcaactggaagaaaatgagttttttggtgcccacacccaagagcacacacatgctgcactgtctcggaaagcagggccagctagagccaccatgttcttccttacctcagtttacctgcggcctgcgctgcactgcagatgcccaccctgccctgggtctggccggcggaagctctgtccaaggtccacacacctccaggtttacgccaacatccttgtgccctccccaccttctcttccaacgcattaggtgcattgtttaattgaaatccaaccaacaattgtgtgtcaaggctggtttggtgcagtggctgggcaaattaattttgggccaggatgggggtgggttgcagtgagggtagggaaaatgtcaggagtaggaaggttcgggggttaagggaagggaaggaagaccagaactggccatcctcttttataatccattagtagcaccatggctcatttgaaatgaaaatattacacttattccccacccaaccgcagtgaactttctaggtaattgttttgaaaacaatttttgtatctgtgaaagtctttgctttttctttccaccttctagaaaagtctgctaccagtttccttactgaatacagccatactcagcccctctcgcatccagcccgtcagggtcagggtcagggtcaggctccctcaagacgagcaccgcattgtctgccctcttttgcgtaggatttttctctcagacccaggggacattgccttggacttttctctacaaatgccctcagatgtaagaccagaaatgattctgcttgtggaactcgtggctttctgtcctattttccttttatgtgagccctgcaggttgcctttggcgcccacaccagttctgtcttcatgtcgctgcatcgtgaagccccatttgcctttagtccctgctttgtgtgtcttcacttccacagccagtgttgcccctcagggcatactttgctggtgaacgggctgtagagtcttgagtatgttattggcctaagtgggcatgaggccccagcatccgactccatctgccaggctgcagggcacagcagcactggcatagacaggcacgctctgtcttccaacgtgcaccagccttttcttacatattttgcctgtttttaaaaaatacgaggagagggtgcagatggatactgtgccctcaccctcctaagccaggtaatatattgatgtgcagacttttaagaaatcttagtcttatcacaaatatcaagtaatttattttttccattttcaaatgcaaaagttagcctaggaagcctcccagtcatcctgaaggaccttttgactttgcttttataattctgttaaaaattgaggaggggattaatgagtacaatgaaaacaaaacaaaacaaaaaattaagaagaggaaagctcaaaagaggataagagactgaaaaggcacctcagaatggctgctgtgggcagagtctgtgacatgactttccccgccctgcccctctgttcagagcagctggaaagatgggatcagtaagattaaaaaacttttgttcggccaggcgtggtggctcacacctgtaatcccagcactttgggaggctgaggcggacggatcatgaggtcaggagttcaagaccagcctggccaatatggtgaaaccccgtctctactaaaaatacaaaaattagccgggtgttgtggctcaccctctattcccagctactcgggaggcagagacaggagaatcgcctgaacccaggaggcagaggttgcagtgagctgagatcgtgccactgcactccagcctgggtgacagagcgagactccatctcagaaaacaaacaaacaaaaagaaacttttgttcaagctgcatcttcacattgaatgaaagcattcagacgggtgactgctgctgtccacaactgtgggcggaagtgtgccttttcccagtttctcgtccaggaggttgcatagcaaatactcaagtcactgggatatatgctttccaaatgctggcccccatagcacctttccccatgtctttctaccaagcctcttatgtttaatctgtgcagggaagacaagagtagaccatattctctgtgtgctgtgcatgtcctggtgtcactcattgcctcttatctgtcgccattctaatataagtcagcttaatagttgactctgaataatgcaaaacccagcttgcttccagaatggcctaggaccctcctcctcctgccagttttttttttttttttggttcatgtggcataatcatctttcaaaattaaccaaatgccccagaaaatgatgttaccactaaaatattttctccaagaaggcatactgtaacagaaaagataggtaagatatttttttcccaagaagtaagaattgattgtgctgaatgttcaaactctggaaactgttcacagtatgttgttcttagctgttatttatataaagtgaattattttctctctca

SEQ ID NO: 440747 - DNA, 4961 bp, Homo sapiens
ccagtgcattaatcagtagaattaatcagtgcatgttcctagtctgtaactaaactctgtggaagattcccctgctttcctatagtaaaggtttacgactttttcttctatctttattaagcttgtcattttcttctttttgcatggttcttacaaattatttggtcaatttcattttcagaatgttgaaacacagaatgtgcttctctcctctgactcaattagctgtttttgtttttctacagatgattcttttattaggccagtaactttttggattgttggggattttgatagcccttctggacggcagttactgtatgatgccatcaaacatcagaaatccagtaacaatgttagaataagcatgatcaataatcctgccaaagagataagctatgagaacactcagatctccagagcaatctgggcagctctccaaactcagacttccaacgctgctaagaacttcatcaccaaaatggccaaggagggggctgcagaggccctggctgcaggagctgacattgcggagttctctgttgggggaatggatttcagtctttttaaagaggtctttgagtcttccaaaatggatttcattttgtctcatgccgtgtactgcagggatgttctgaagctgaagaagggacagagggcagtgatcagcaatggaaggatcattgggccactggaggatagtgagctctttaatcaagacgatttccacctcctcgaaaatatcatcttaaaaacctcaggacagaaaataaaatctcatattcaacagcttcgggtagaagaagatgtggcaagcgacttggtaatgaaggtggatgctcttctgtcagcgcaaccaaaaggagatccaagaatcgagtaccagttttttgaagacagacacagtgcaatcaaactgaggccgaaggaaggggagacatactttgatgttgtggctgtcgttgaccctgtcaccagagaagcacagagacttgctcctttgctcttggttttggctcagctgataaacatgaatctgagagtatttatgaactgccaatccaaactttctgacatgcctttaaaaagcttttaccgttatgtcttagaaccagagatttctttcacttcagacaatagttttgctaagggtccaatcgcaaaatttttggatatgcctcagtctccactgttcactctgaatttgaacacacctgagagctggatggtagaatctgtcagaacaccatatgatcttgataatatttatttagaagaggtggacagtgtagtggctgctgagtatgagctggaatacctgttactggaaggtcattgctacgacatcaccacaggccagcctccacggggactacagtttaccttaggaacttcagccaacccggtcattgtggacaccattgttatggccaatctgggctactttcagctgaaagccaacccaggagcttggatcctcagacttaggaagggacgctctgaagatatttatagaatttacagccacgatggcaccgattctccccctgatgctgatgaggtggttatcgtcctcaacaacttcaaaagcaaaattattaaagtgaaggttcagaagaaggcagatatggtgaacgaagacttgctgagtgatggaacgagtgagaatgaatctggattttgggattccttcaaatggggctttacaggacagaagactgaggaagtgaagcaagataaagatgacataattaatattttctccgttgcatctggtcatctctacgaaagatttcttcgcataatgatgctatccgtgctgaagaataccaagactcctgtgaaattctggttcttgaagaattacttgtcccccacatttaaggatctgcccaataacatgattcatcaggtgccaattaaatccctccctcaagaatggctttggtgtgaaacgtggtgtgatgacgcctctaagaaaagggcaaaaaccattgatttgtgtaataatccgatgaccaaagagccgaaactggaagcagctgtgcggattgtcccggagtggcaggactacgaccaagagatcaaacagctacagatccgctttcagaaggagaaagaaacgggagcactgtacaaagagaagacaaaagaaccaagccgagaaggtcctcagaaacgtgaagaattatgatctctggagaaggacaggaaatcaccccatttgaaaaacagtttttataataaatgctagttttttctgatctgtctatacaactgctgataagccggctgggcaggagtgccacaccttttgattctgagcatttgattctgacttctgtactctggtggccactggatctttgggattaaagctctgttggatttgtacctcagaggaagaccaagtggctgatcctttggactctgtaaagagcattcttctagtcagagggtggaatggcagcagcaactggaagaaaatgagttttttggtgcccacacccaagagcacacacatgctgcactgtctcggaaagcagggccagctagagccaccatgttcttccttacctcagtttacctgcggcctgcgctgcactgcagatgcccaccctgccctgggtctggccggcggaagctctgtccaaggtccacacacctccaggtttacgccaacatccttgtgccctccccaccttctcttccaacgcattaggtgcattgtttaattgaaatccaaccaacaattgtgtgtcaaggctggtttggtgcagtggctgggcaaattaattttgggccaggatgggggtgggttgcagtgagggtagggaaaatgtcaggagtaggaaggttcgggggttaagggaagggaaggaagaccagaactggccatcctcttttataatccattagtagcaccatggctcatttgaaatgaaaatattacacttattccccacccaaccgcagtgaactttctaggtaattgttttgaaaacaatttttgtatctgtgaaagtctttgctttttctttccaccttctagaaaagtctgctaccagtttccttactgaatacagccatactcagcccctctcgcatccagcccgtcagggtcagggtcagggtcaggctccctcaagacgagcaccgcattgtctgccctcttttgcgtaggatttttctctcagacccaggggacattgccttggacttttctctacaaatgccctcagatgtaagaccagaaatgattctgcttgtggaactcgtggctttctgtcctattttccttttatgtgagccctgcaggttgcctttggcgcccacaccagttctgtcttcatgtcgctgcatcgtgaagccccatttgcctttagtccctgctttgtgtgtcttcacttccacagccagtgttgcccctcagggcatactttgctggtgaacgggctgtagagtcttgagtatgttattggcctaagtgggcatgaggccccagcatccgactccatctgccaggctgcagggcacagcagcactggcatagacaggcacgctctgtcttccaacgtgcaccagccttttcttacatattttgcctgtttttaaaaaatacgaggagagggtgcagatggatactgtgccctcaccctcctaagccaggtaatatattgatgtgcagacttttaagaaatcttagtcttatcacaaatatcaagtaatttattttttccattttcaaatgcaaaagttagcctaggaagcctcccagtcatcctgaaggaccttttgactttgcttttataattctgttaaaaattgaggaggggattaatgagtacaatgaaaacaaaacaaaacaaaaaattaagaagaggaaagctcaaaagaggataagagactgaaaaggcacctcagaatggctgctgtgggcagagtctgtgacatgactttccccgccctgcccctctgttcagagcagctggaaagatgggatcagtaagattaaaaaacttttgttcggccaggcgtggtggctcacacctgtaatcccagcactttgggaggctgaggcggacggatcatgaggtcaggagttcaagaccagcctggccaatatggtgaaaccccgtctctactaaaaatacaaaaattagccgggtgttgtggctcaccctctattcccagctactcgggaggcagagacaggagaatcgcctgaacccaggaggcagaggttgcagtgagctgagatcgtgccactgcactccagcctgggtgacagagcgagactccatctcagaaaacaaacaaacaaaaagaaacttttgttcaagctgcatcttcacattgaatgaaagcattcagacgggtgactgctgctgtccacaactgtgggcggaagtgtgccttttcccagtttctcgtccaggaggttgcatagcaaatactcaagtcactgggatatatgctttccaaatgctggcccccatagcacctttccccatgtctttctaccaagcctcttatgtttaatctgtgcagggaagacaagagtagaccatattctctgtgtgctgtgcatgtcctggtgtcactcattgcctcttatctgtcgccattctaatataagtcagcttaatagttgactctgaataatgcaaaacccagcttgcttccagaatggcctaggaccctcctcctcctgccagttttttttttttttttggttcatgtggcataatcatctttcaaaattaaccaaatgccccagaaaatgatgttaccactaaaatattttctccaagaaggcatactgtaacagaaaagataggtaagatatttttttcccaagaagtaagaattgattgtgctgaatgttcaaactctggaaactgttcacagtatgttgttcttagctgttatttatataaagtgaattattttctctctca

SEQ ID NO: 440748 - DNA, 7620 bp, Homo sapiens
ccagtgcattaatcagtagaattaatcagtgcatgttcctagtctgtaactaaactctgtggaagattcccctgctttcctatagtaaaggtttacgactttttcttctatctttattaagcttgtcattttcttctttttgcatggttcttacaaattatttggtcaatttcattttcagaatgttgaaacacagaatgtgcttctctcctctgactcaattagctgtttttgtttttctacagatgattcttttattaggccagtaactttttggattgttggggattttgatagcccttctggacggcagttactgtatgatgccatcaaacatcagaaatccagtaacaatgttagaataagcatgatcaataatcctgccaaagagataagctatgagaacactcagatctccagagcaatctgggcagctctccaaactcagacttccaacgctgctaagaacttcatcaccaaaatggccaaggagggggctgcagaggccctggctgcaggagctgacattgcggagttctctgttgggggaatggatttcagtctttttaaagaggtctttgagtcttccaaaatggatttcattttgtctcatgccgtgtactgcagggatgttctgaagctgaagaagggacagagggcagtgatcagcaatggaaggatcattgggccactggaggatagtgagctctttaatcaagacgatttccacctcctcgaaaatatcatcttaaaaacctcaggacagaaaataaaatctcatattcaacagcttcgggtagaagaagatgtggcaagcgacttggtaatgaaggtggatgctcttctgtcagcgcaaccaaaaggagatccaagaatcgagtaccagttttttgaagacagacacagtgcaatcaaactgaggccgaaggaaggggagacatactttgatgttgtggctgtcgttgaccctgtcaccagagaagcacagagacttgctcctttgctcttggttttggctcagctgataaacatgaatctgagagtatttatgaactgccaatccaaactttctgacatgcctttaaaaagcttttaccgttatgtcttagaaccagagatttctttcacttcagacaatagttttgctaagggtccaatcgcaaaatttttggatatgcctcagtctccactgttcactctgaatttgaacacacctgagagctggatggtagaatctgtcagaacaccatatgatcttgataatatttatttagaagaggtggacagtgtagtggctgctgagtatgagctggaatacctgttactggaaggtcattgctacgacatcaccacaggccagcctccacggggactacagtttaccttaggaacttcagccaacccggtcattgtggacaccattgttatggccaatctgggctactttcagctgaaagccaacccaggagcttggatcctcagacttaggaagggacgctctgaagatatttatagaatttacagccacgatggcaccgattctccccctgatgctgatgaggtggttatcgtcctcaacaacttcaaaagcaaaattattaaagtgaaggttcagaagaaggcagatatggtgaacgaagacttgctgagtgatggaacgagtgagaatgaatctggattttgggattccttcaaatggggctttacaggacagaagactgaggaagtgaagcaagataaagatgacataattaatattttctccgttgcatctggtcatctctacgaaagatttcttcgcataatgatgctatccgtgctgaagaataccaagactcctgtgaaattctggttcttgaagaattacttgtcccccacatttaaggagtttataccttacatggcaaatgaatacaatttccagtatgagcttgttcagtacaaatggccccggtggcttcatcaacaaactgaaaaacagcgtatcatctggggttacaagatcctcttcctggatgtacttttcccactagttgttgacaagttcctgtttgtggatgctgatcagattgtacgaacagatctgaaagagttaagagatttcaatttggatggtgctccttatggttacactcctttctgtgacagccgaagagaaatggacggctacaggttctggaagtcagggtactgggccagtcatttagccgggcgaaagtatcatatcagtgcactatatgttgtggatctgaagaagtttaggaaaatagctgctggtgacagactcaggggacagtaccaaggtctgagtcaggaccctaacagcctttcaaatcttgatcaagatctgcccaataacatgattcatcaggtgccaattaaatccctccctcaagaatggctttggtgtgaaacgtggtgtgatgacgcctctaagaaaagggcaaaaaccattgatttgtgtaataatccgatgaccaaagagccgaaactggaagcagctgtgcggattgtcccggagtggcaggactacgaccaagagatcaaacagctacagatccgctttcagaaggagaaagaaacgggagcactgtacaaagagaagacaaaagaaccaagccgagaaggtcctcagaaacgtgaagaattatgatctctggagaaggacaggaaatcaccccatttgaaaaacagtttttataataaatgctagttttttctgatctgtctatacaactgctgataagccggctgggcaggagtgccacaccttttgattctgagcatttgattctgacttctgtactctggtggccactggatctttgggattaaagctctgttggatttgtacctcagaggaagaccaagtggctgatcctttggactctgtaaagagcattcttctagtcagagggtggaatggcagcagcaactggaagaaaatgagttttttggtgcccacacccaagagcacacacatgctgcactgtctcggaaagcagggccagctagagccaccatgttcttccttacctcagtttacctgcggcctgcgctgcactgcagatgcccaccctgccctgggtctggccggcggaagctctgtccaaggtccacacacctccaggtttacgccaacatccttgtgccctccccaccttctcttccaacgcattaggtgcattgtttaattgaaatccaaccaacaattgtgtgtcaaggctggtttggtgcagtggctgggcaaattaattttgggccaggatgggggtgggttgcagtgagggtagggaaaatgtcaggagtaggaaggttcgggggttaagggaagggaaggaagaccagaactggccatcctcttttataatccattagtagcaccatggctcatttgaaatgaaaatattacacttattccccacccaaccgcagtgaactttctaggtaattgttttgaaaacaatttttgtatctgtgaaagtctttgctttttctttccaccttctagaaaagtctgctaccagtttccttactgaatacagccatactcagcccctctcgcatccagcccgtcagggtcagggtcagggtcaggctccctcaagacgagcaccgcattgtctgccctcttttgcgtaggatttttctctcagacccaggggacattgccttggacttttctctacaaatgccctcagatgtaagaccagaaatgattctgcttgtggaactcgtggctttctgtcctattttccttttatgtgagccctgcaggttgcctttggcgcccacaccagttctgtcttcatgtcgctgcatcgtgaagccccatttgcctttagtccctgctttgtgtgtcttcacttccacagccagtgttgcccctcagggcatactttgctggtgaacgggctgtagagtcttgagtatgttattggcctaagtgggcatgaggccccagcatccgactccatctgccaggctgcagggcacagcagcactggcatagacaggcacgctctgtcttccaacgtgcaccagccttttcttacatattttgcctgtttttaaaaaatacgaggagagggtgcagatggatactgtgccctcaccctcctaagccaggtaatatattgatgtgcagacttttaagaaatcttagtcttatcacaaatatcaagtaatttattttttccattttcaaatgcaaaagttagcctaggaagcctcccagtcatcctgaaggaccttttgactttgcttttataattctgttaaaaattgaggaggggattaatgagtacaatgaaaacaaaacaaaacaaaaaattaagaagaggaaagctcaaaagaggataagagactgaaaaggcacctcagaatggctgctgtgggcagagtctgtgacatgactttccccgccctgcccctctgttcagagcagctggaaagatgggatcagtaagattaaaaaacttttgttcggccaggcgtggtggctcacacctgtaatcccagcactttgggaggctgaggcggacggatcatgaggtcaggagttcaagaccagcctggccaatatggtgaaaccccgtctctactaaaaatacaaaaattagccgggtgttgtggctcaccctctattcccagctactcgggaggcagagacaggagaatcgcctgaacccaggaggcagaggttgcagtgagctgagatcgtgccactgcactccagcctgggtgacagagcgagactccatctcagaaaacaaacaaacaaaaagaaacttttgttcaagctgcatcttcacattgaatgaaagcattcagacgggtgactgctgctgtccacaactgtgggcggaagtgtgccttttcccagtttctcgtccaggaggttgcatagcaaatactcaagtcactgggatatatgctttccaaatgctggcccccatagcacctttccccatgtctttctaccaagcctcttatgtttaatctgtgcagggaagacaagagtagaccatattctctgtgtgctgtgcatgtcctggtgtcactcattgcctcttatctgtcgccattctaatataagtcagcttaatagttgactctgaataatgcaaaacccagcttgcttccagaatggcctaggaccctcctcctcctgccagttttttttttttttttggttcatgtggcataatcatctttcaaaattaaccaaatgccccagaaaatgatgttaccactaaaatattttctccaagaaggcatactgtaacagaaaagataggtaagatatttttttcccaagaagtaagaattgattgtgctgaatgttcaaactctggaaactgttcacagtatgttgttcttagctgttatttatataaagtgaattattttctctctcaatcatgccatagtggagacttttgtttgtgagtaagtgacagagtaatatgaaataatgtgatatgtcagagtgacatgcagcatcccggcctcccaaagtgctgggattgcaggcgtgaccactatgtccggtcaagccctcgtgttctgaaccttgtcaaggctctgcctgaatgagttttcatctgattgtggggaccaagtccctgagtagagggccaagagctagggacagggggaagagactggcccaggtggtagggaggaaagaactcccagagtttcctttagccaggaaacctgctctactgaccccgtgacttggacagtcagacatcaccctgagagtgacaagtgtaaaatgactcccttcctcccccgccctccggaagtatatttagatacttgaaagcagtccttttctaaaatggccttacctatgtggcctgaacgattaaaagaaagaactcagagttacaagggaaaaagaaaaagagttacaagggaattgtagtctttttctgaatagaatattagtactgtggtattgcatttcatgggaatggaaatgtattggtaaagctacctgatggaagctttctcttggtaacaaaaatggagggtgtattatgtgcagttatttaaatatatgtattccattgttgcgtggtttttttcccccctcaagacagagatttgctcttgttgcccagggtggagtacaatggtgtgaccttggctcactgcaacctctgcctcctgggttcaggtgattctcctgcctcagccttccgagtagctgggattacaggtgtgcgccaccacacccggctaatttttgctttttttttttttgagacagaatctcgctctgttgctcaggctggagtggagtgcagtggcacaatctcagctcactgcagcctctgcctcccgggttcaagagattctcctgactcaacctcctgagtagctgggattacaggtgcctgccactatgcctagctaatttttgtagtttttagtagtagacggggtcttcgcatgtgtggccagggtggtctcgaactcctgacctcaagtgatccacccgcatcggccccccaaagtgctgggattataggcgtgaaccaccgcgcctgtcccattgttgtgtaattttaataattagttttttaagtacttgattttatgggcacatttttgtgggatgattggagttaatcaaataaagcttgtcatgtgtgtagtttggtaagataacttctttaaattcatgttttctctgccttgaggtagtgagggaaagatcttaatcagtattttggtaattaactgattgaattcaagcaaatgagacatcatgaacttcagtggttattgatatttcagggtatatacctgaaatgcctagaggatacagatttctcatttcattctttggtctttcatttctctatatacagaaatgaaatgacacttctgggaggcagtagaagcaggaagtcaatgaattgagtagagggtcccattccctcaggctgtcattgatcagtgacaatttataatgaaggttaaactctgtggtcggtatttgcaagcgccgggcgtggtggctcacgcctgtaatcctagcaccttgggaggccaaggcaggcggatcacccgaggtcaggagtttgaggatttgcaagcaaaaggtcctctcctgagtctttcccagatacccagcagtgcagaggctagctgtggaaggttgcagtgggacaggaatgtattgtatgccttgccttacttgtcaccattgagatttccagagaaatgggcataacgtctcttaacaacaacagcagaaagcaaaatacattaacttaaggttgacaacaaaagattatcaagtaccatgttttccaaccaaccagttattcgtggtaataataaaataaaggtgggaaaatgttataatttttaaggaaactgtgtactttaaaaatcttctttatgaatatccaatgttactgtaatcctgctccattaaatgcagcattgttgtcaggtgctgcctcttgcttgggaacagcattgggcttttaaatgtctgcagaatctctgcgttcgaagggaattgagaatgaacttcctggtactgtaatgaaaataaggtctgctcaacacagtaaacgtttcctctcttcttta

SEQ ID NO: 440749 - DNA, 6086 bp, Homo sapiens
ccagtgcattaatcagtagaattaatcagtgcatgttcctagtctgtaactaaactctgtggaagattcccctgctttcctatagtaaaggtttacgactttttcttctatctttattaagcttgtcattttcttctttttgcatggttcttacaaattatttggtcaatttcattttcagaatgttgaaacacagaatgtgcttctctcctctgactcaattagctgtttttgtttttctacagatgattcttttattaggccagtaactttttggattgttggggattttgatagcccttctggacggcagttactgtatgatgccatcaaacatcagaaatccagtaacaatgttagaataagcatgatcaataatcctgccaaagagataagctatgagaacactcagatctccagagcaatctgggcagctctccaaactcagacttccaacgctgctaagaacttcatcaccaaaatggccaaggagggggctgcagaggccctggctgcaggagctgacattgcggagttctctgttgggggaatggatttcagtctttttaaagaggtctttgagtcttccaaaatggatttcattttgtctcatgccgtgtactgcagggatgttctgaagctgaagaagggacagagggcagtgatcagcaatggaaggatcattgggccactggaggatagtgagctctttaatcaagacgatttccacctcctcgaaaatatcatcttaaaaacctcaggacagaaaataaaatctcatattcaacagcttcgggtagaagaagatgtggcaagcgacttggtaatgaaggtggatgctcttctgtcagcgcaaccaaaaggagatccaagaatcgagtaccagttttttgaagacagacacagtgcaatcaaactgaggccgaaggaaggggagacatactttgatgttgtggctgtcgttgaccctgtcaccagagaagcacagagacttgctcctttgctcttggttttggctcagctgataaacatgaatctgagagtatttatgaactgccaatccaaactttctgacatgcctttaaaaagcttttaccgttatgtcttagaaccagagatttctttcacttcagacaatagttttgctaagggtccaatcgcaaaatttttggatatgcctcagtctccactgttcactctgaatttgaacacacctgagagctggatggtagaatctgtcagaacaccatatgatcttgataatatttatttagaagaggtggacagtgtagtggctgctgagtatgagctggaatacctgttactggaaggtcattgctacgacatcaccacaggccagcctccacggggactacagtttaccttaggaacttcagccaacccggtcattgtggacaccattgttatggccaatctgggctactttcagctgaaagccaacccaggagcttggatcctcagacttaggaagggacgctctgaagatatttatagaatttacagccacgatggcaccgattctccccctgatgctgatgaggtggttatcgtcctcaacaacttcaaaagcaaaattattaaagtgaaggttcagaagaaggcagatatggtgaacgaagacttgctgagtgatggaacgagtgagaatgaatctggattttgggattccttcaaatggggctttacaggacagaagactgaggaagtgaagcaagataaagatgacataattaatattttctccgttgcatctggtcatctctacgaaagatttcttcgcataatgatgctatccgtgctgaagaataccaagactcctgtgaaattctggttcttgaagaattacttgtcccccacatttaaggagtttataccttacatggcaaatgaatacaatttccagtatgagcttgttcagtacaaatggccccggtggcttcatcaacaaactgaaaaacagcgtatcatctggggttacaagatcctcttcctggatgtacttttcccactagttgttgacaagttcctgtttgtggatgctgatcagattgtacgaacagatctgaaagagttaagagatttcaatttggatggtgctccttatggttacactcctttctgtgacagccgaagagaaatggacggctacaggttctggaagtcagggtactgggccagtcatttagccgggcgaaagtatcatatcagtgcactatatgttgtggatctgaagaagtttaggaaaatagctgctggtgacagactcaggggacagtaccaaggtctgagtcaggaccctaacagcctttcaaatcttgatcaagatctgcccaataacatgattcatcaggtgccaattaaatccctccctcaagaatggctttggtgtgaaacgtggtgtgatgacgcctctaagaaaagggcaaaaaccattgatttgtgtaataatccgatgaccaaagagccgaaactggaagcagctgtgcggattgtcccggagtggcaggactacgaccaagagatcaaacagctacagatccgctttcagaaggagaaagaaacgggagcactgtacaaagagaagacaaaagaaccaagccgagaaggtcctcagaaacgtgaagaattatgatctctggagaaggacaggaaatcaccccatttgaaaaacagtttttataataaatgctagttttttctgatctgtctatacaactgctgataagccggctgggcaggagtgccacaccttttgattctgagcatttgattctgacttctgtactctggtggccactggatctttgggattaaagctctgttggatttgtacctcagaggaagaccaagtggctgatcctttggactctgtaaagagcattcttctagtcagagggtggaatggcagcagcaactggaagaaaatgagttttttggtgcccacacccaagagcacacacatgctgcactgtctcggaaagcagggccagctagagccaccatgttcttccttacctcagtttacctgcggcctgcgctgcactgcagatgcccaccctgccctgggtctggccggcggaagctctgtccaaggtccacacacctccaggtttacgccaacatccttgtgccctccccaccttctcttccaacgcattaggtgcattgtttaattgaaatccaaccaacaattgtgtgtcaaggctggtttggtgcagtggctgggcaaattaattttgggccaggatgggggtgggttgcagtgagggtagggaaaatgtcaggagtaggaaggttcgggggttaagggaagggaaggaagaccagaactggccatcctcttttataatccattagtagcaccatggctcatttgaaatgaaaatattacacttattccccacccaaccgcagtgaactttctaggtaattgttttgaaaacaatttttgtatctgtgaaagtctttgctttttctttccaccttctagaaaagtctgctaccagtttccttactgaatacagccatactcagcccctctcgcatccagcccgtcagggtcagggtcagggtcaggctccctcaagacgagcaccgcattgtctgccctcttttgcgtaggatttttctctcagacccaggggacattgccttggacttttctctacaaatgccctcagatgtaagaccagaaatgattctgcttgtggaactcgtggctttctgtcctattttccttttatgtgagccctgcaggttgcctttggcgcccacaccagttctgtcttcatgtcgctgcatcgtgaagccccatttgcctttagtccctgctttgtgtgtcttcacttccacagccagtgttgcccctcagggcatactttgctggtgaacgggctgtagagtcttgagtatgttattggcctaagtgggcatgaggccccagcatccgactccatctgccaggctgcagggcacagcagcactggcatagacaggcacgctctgtcttccaacgtgcaccagccttttcttacatattttgcctgtttttaaaaaatacgaggagagggtgcagatggatactgtgccctcaccctcctaagccaggtaatatattgatgtgcagacttttaagaaatcttagtcttatcacaaatatcaagtaatttattttttccattttcaaatgcaaaagttagcctaggaagcctcccagtcatcctgaaggaccttttgactttgcttttataattctgttaaaaattgaggaggggattaatgagtacaatgaaaacaaaacaaaacaaaaaattaagaagaggaaagctcaaaagaggataagagactgaaaaggcacctcagaatggctgctgtgggcagagtctgtgacatgactttccccgccctgcccctctgttcagagcagctggaaagatgggatcagtaagattaaaaaacttttgttcggccaggcgtggtggctcacacctgtaatcccagcactttgggaggctgaggcggacggatcatgaggtcaggagttcaagaccagcctggccaatatggtgaaaccccgtctctactaaaaatacaaaaattagccgggtgttgtggctcaccctctattcccagctactcgggaggcagagacaggagaatcgcctgaacccaggaggcagaggttgcagtgagctgagatcgtgccactgcactccagcctgggtgacagagcgagactccatctcagaaaacaaacaaacaaaaagaaacttttgttcaagctgcatcttcacattgaatgaaagcattcagacgggtgactgctgctgtccacaactgtgggcggaagtgtgccttttcccagtttctcgtccaggaggttgcatagcaaatactcaagtcactgggatatatgctttccaaatgctggcccccatagcacctttccccatgtctttctaccaagcctcttatgtttaatctgtgcagggaagacaagagtagaccatattctctgtgtgctgtgcatgtcctggtgtcactcattgcctcttatctgtcgccattctaatataagtcagcttaatagttgactctgaataatgcaaaacccagcttgcttccagaatggcctaggaccctcctcctcctgccagttttttttttttttttggttcatgtggcataatcatctttcaaaattaaccaaatgccccagaaaatgatgttaccactaaaatattttctccaagaaggcatactgtaacagaaaagataggtaagatatttttttcccaagaagtaagaattgattgtgctgaatgttcaaactctggaaactgttcacagtatgttgttcttagctgttatttatataaagtgaattattttctctctcaatcatgccatagtggagacttttgtttgtgagtaagtgacagagtaatatgaaataatgtgatatgtcagagtgacatgcagcatcctgagcctgtttttatgttctgtgtacagtggcatttgattgagatcaaagcctgtcacagcctgctgctgggggtgtggggatatgccagagtcctgtgtttggttttagaagtttactgaatgtttcccacatggagaataatggatggcatgttagtttctttaagagtggtaaagttgtacatctgtcattgttgcatttcgaattgaacacatagatgcttgcctgtctgcttgggtgaatgcctcttgggagagcgaagattacgtgcatgatgtatgttaagaaacagtttccggtcaggcacagtggcttacacctgtaatcccagcactttgggaagccgaggcgggcggattatgaggtcaagagatagagaccatcctggccaacacggtgaaaccccgtctctactaaaaatacaaaaattagctgggcatggtggcacacacctgtagtcccagctactcgggaggctgaggcaggagaatcacttgaacccgggaggtggaggttgcagtgagccgagatcatgccactgcactccagcctggcaatagagcgagactccgtctca

SEQ ID NO: 440750 - DNA, 6777 bp, Homo sapiens
ccagtgcattaatcagtagaattaatcagtgcatgttcctagtctgtaactaaactctgtggaagattcccctgctttcctatagtaaaggtttacgactttttcttctatctttattaagcttgtcattttcttctttttgcatggttcttacaaattatttggtcaatttcattttcagaatgttgaaacacagaatgtgcttctctcctctgactcaattagctgtttttgtttttctacagatgattcttttattaggccagtaactttttggattgttggggattttgatagcccttctggacggcagttactgtatgatgccatcaaacatcagaaatccagtaacaatgttagaataagcatgatcaataatcctgccaaagagataagctatgagaacactcagatctccagagcaatctgggcagctctccaaactcagacttccaacgctgctaagaacttcatcaccaaaatggccaaggagggggctgcagaggccctggctgcaggagctgacattgcggagttctctgttgggggaatggatttcagtctttttaaagaggtctttgagtcttccaaaatggatttcattttgtctcatgccgtgtactgcagggatgttctgaagctgaagaagggacagagggcagtgatcagcaatggaaggatcattgggccactggaggatagtgagctctttaatcaagacgatttccacctcctcgaaaatatcatcttaaaaacctcaggacagaaaataaaatctcatattcaacagcttcgggtagaagaagatgtggcaagcgacttggtaatgaaggtggatgctcttctgtcagcgcaaccaaaaggagatccaagaatcgagtaccagttttttgaagacagacacagtgcaatcaaactgaggccgaaggaaggggagacatactttgatgttgtggctgtcgttgaccctgtcaccagagaagcacagagacttgctcctttgctcttggttttggctcagctgataaacatgaatctgagagtatttatgaactgccaatccaaactttctgacatgcctttaaaaagcttttaccgttatgtcttagaaccagagatttctttcacttcagacaatagttttgctaagggtccaatcgcaaaatttttggatatgcctcagtctccactgttcactctgaatttgaacacacctgagagctggatggtagaatctgtcagaacaccatatgatcttgataatatttatttagaagaggtggacagtgtagtggctgctgagtatgagctggaatacctgttactggaaggtcattgctacgacatcaccacaggccagcctccacggggactacagtttaccttaggaacttcagccaacccggtcattgtggacaccattgttatggccaatctgggctactttcagctgaaagccaacccaggagcttggatcctcagacttaggaagggacgctctgaagatatttatagaatttacagccacgatggcaccgattctccccctgatgctgatgaggtggttatcgtcctcaacaacttcaaaagcaaaattattaaagtgaaggttcagaagaaggcagatatggtgaacgaagacttgctgagtgatggaacgagtgagaatgaatctggattttgggattccttcaaatggggctttacaggacagaagactgaggaagtgaagcaagataaagatgacataattaatattttctccgttgcatctggtcatctctacgaaagatttcttcgcataatgatgctatccgtgctgaagaataccaagactcctgtgaaattctggttcttgaagaattacttgtcccccacatttaaggagtttataccttacatggcaaatgaatacaatttccagtatgagcttgttcagtacaaatggccccggtggcttcatcaacaaactgaaaaacagcgtatcatctggggttacaagatcctcttcctggatgtacttttcccactagttgttgacaagttcctgtttgtggatgctgatcagattgtacgaacagatctgaaagagttaagagatttcaatttggatggtgctccttatggttacactcctttctgtgacagccgaagagaaatggacggctacaggttctggaagtcagggtactgggccagtcatttagccgggcgaaagtatcatatcagtgcactatatgttgtggatctgaagaagtttaggaaaatagctgctggtgacagactcaggggacagtaccaaggtctgagtcaggaccctaacagcctttcaaatcttgatcaagatctgcccaataacatgattcatcaggtgccaattaaatccctccctcaagaatggctttggtgtgaaacgtggtgtgatgacgcctctaagaaaagggcaaaaaccattgatttgtgtaataatccgatgaccaaagagccgaaactggaagcagctgtgcggattgtcccggagtggcaggactacgaccaagagatcaaacagctacagatccgctttcagaaggagaaagaaacgggagcactgtacaaagagaagacaaaagaaccaagccgagaaggtcctcagaaacgtgaagaattatgatctctggagaaggacaggaaatcaccccatttgaaaaacagtttttataataaatgctagttttttctgatctgtctatacaactgctgataagccggctgggcaggagtgccacaccttttgattctgagcatttgattctgacttctgtactctggtggccactggatctttgggattaaagctctgttggatttgtacctcagaggaagaccaagtggctgatcctttggactctgtaaagagcattcttctagtcagagggtggaatggcagcagcaactggaagaaaatgagttttttggtgcccacacccaagagcacacacatgctgcactgtctcggaaagcagggccagctagagccaccatgttcttccttacctcagtttacctgcggcctgcgctgcactgcagatgcccaccctgccctgggtctggccggcggaagctctgtccaaggtccacacacctccaggtttacgccaacatccttgtgccctccccaccttctcttccaacgcattaggtgcattgtttaattgaaatccaaccaacaattgtgtgtcaaggctggtttggtgcagtggctgggcaaattaattttgggccaggatgggggtgggttgcagtgagggtagggaaaatgtcaggagtaggaaggttcgggggttaagggaagggaaggaagaccagaactggccatcctcttttataatccattagtagcaccatggctcatttgaaatgaaaatattacacttattccccacccaaccgcagtgaactttctaggtaattgttttgaaaacaatttttgtatctgtgaaagtctttgctttttctttccaccttctagaaaagtctgctaccagtttccttactgaatacagccatactcagcccctctcgcatccagcccgtcagggtcagggtcagggtcaggctccctcaagacgagcaccgcattgtctgccctcttttgcgtaggatttttctctcagacccaggggacattgccttggacttttctctacaaatgccctcagatgtaagaccagaaatgattctgcttgtggaactcgtggctttctgtcctattttccttttatgtgagccctgcaggttgcctttggcgcccacaccagttctgtcttcatgtcgctgcatcgtgaagccccatttgcctttagtccctgctttgtgtgtcttcacttccacagccagtgttgcccctcagggcatactttgctggtgaacgggctgtagagtcttgagtatgttattggcctaagtgggcatgaggccccagcatccgactccatctgccaggctgcagggcacagcagcactggcatagacaggcacgctctgtcttccaacgtgcaccagccttttcttacatattttgcctgtttttaaaaaatacgaggagagggtgcagatggatactgtgccctcaccctcctaagccaggtaatatattgatgtgcagacttttaagaaatcttagtcttatcacaaatatcaagtaatttattttttccattttcaaatgcaaaagttagcctaggaagcctcccagtcatcctgaaggaccttttgactttgcttttataattctgttaaaaattgaggaggggattaatgagtacaatgaaaacaaaacaaaacaaaaaattaagaagaggaaagctcaaaagaggataagagactgaaaaggcacctcagaatggctgctgtgggcagagtctgtgacatgactttccccgccctgcccctctgttcagagcagctggaaagatgggatcagtaagattaaaaaacttttgttcggccaggcgtggtggctcacacctgtaatcccagcactttgggaggctgaggcggacggatcatgaggtcaggagttcaagaccagcctggccaatatggtgaaaccccgtctctactaaaaatacaaaaattagccgggtgttgtggctcaccctctattcccagctactcgggaggcagagacaggagaatcgcctgaacccaggaggcagaggttgcagtgagctgagatcgtgccactgcactccagcctgggtgacagagcgagactccatctcagaaaacaaacaaacaaaaagaaacttttgttcaagctgcatcttcacattgaatgaaagcattcagacgggtgactgctgctgtccacaactgtgggcggaagtgtgccttttcccagtttctcgtccaggaggttgcatagcaaatactcaagtcactgggatatatgctttccaaatgctggcccccatagcacctttccccatgtctttctaccaagcctcttatgtttaatctgtgcagggaagacaagagtagaccatattctctgtgtgctgtgcatgtcctggtgtcactcattgcctcttatctgtcgccattctaatataagtcagcttaatagttgactctgaataatgcaaaacccagcttgcttccagaatggcctaggaccctcctcctcctgccagttttttttttttttttggttcatgtggcataatcatctttcaaaattaaccaaatgccccagaaaatgatgttaccactaaaatattttctccaagaaggcatactgtaacagaaaagataggtaagatatttttttcccaagaagtaagaattgattgtgctgaatgttcaaactctggaaactgttcacagtatgttgttcttagctgttatttatataaagtgaattattttctctctcaatcatgccatagtggagacttttgtttgtgagtaagtgacagagtaatatgaaataatgtgatatgtcagagtgacatgcagcatcccggcctcccaaagtgctgggattgcaggcgtgaccactatgtccggtcaagccctcgtgttctgaaccttgtcaaggctctgcctgaatgagttttcatctgattgtggggaccaagtccctgagtagagggccaagagctagggacagggggaagagactggcccaggtggtagggaggaaagaactcccagagtttcctttagccaggaaacctgctctactgaccccgtgacttggacagtcagacatcaccctgagagtgacaagtgtaaaatgactcccttcctcccccgccctccggaagtatatttagatacttgaaagcagtccttttctaaaatggccttacctatgtggcctgaacgattaaaagaaagaactcagagttacaagggaaaaagaaaaagagttacaagggaattgtagtctttttctgaatagaatattagtactgtggtattgcatttcatgggaatggaaatgtattggtaaagctacctgatggaagctttctcttggtaacaaaaatggagggtgtattatgtgcagttatttaaatatatgtattccattgttgcgtggtttttttcccccctcaagacagagatttgctcttgttgcccagggtggagtacaatggtgtgaccttggctcactgcaacctctgcctcctgggttcaggtgattctcctgcctcagccttccgagtagctgggattacaggtgtgcgccaccacacccggctaatttttgctttttttttttttgagacagaatctcgctctgttgctcaggctgagatcgtgccactgcactccagcctggggtgacagagcgagactccatctcagaaaacaaacaaacaaaaagaaactttggttcaagctgcatcttcacttggattgcaacgctttcagacgggtgactggctgctgtccacaactgtggccggaagtgtgccttttcccagtttctcgtccagggggtgtgcatagcaaatactcaacgtccctgggatatttgctttccaagtgctggcccccataggacctttccccatgtcttttctaccagggcctcttgtgttaatcgtgtgcggggacacagggttgcccttattttctgtgtgggtgggctggcgtggggtcacaccatggcctttatctgtgggctccatttaggcacgctaaaggtggtctgaatatgggacccgttggtccaatggctaggcctcctccgcgcgtatttggcgcagggcgacttctcga

SEQ ID NO: 440751 - DNA, 6280 bp, Homo sapiens
ccagtgcattaatcagtagaattaatcagtgcatgttcctagtctgtaactaaactctgtggaagattcccctgctttcctatagtaaaggtttacgactttttcttctatctttattaagcttgtcattttcttctttttgcatggttcttacaaattatttggtcaatttcattttcagaatgttgaaacacagaatgtgcttctctcctctgactcaattagctgtttttgtttttctacagatgattcttttattaggccagtaactttttggattgttggggattttgatagcccttctggacggcagttactgtatgatgccatcaaacatcagaaatccagtaacaatgttagaataagcatgatcaataatcctgccaaagagataagctatgagaacactcagatctccagagcaatctgggcagctctccaaactcagacttccaacgctgctaagaacttcatcaccaaaatggccaaggagggggctgcagaggccctggctgcaggagctgacattgcggagttctctgttgggggaatggatttcagtctttttaaagaggtctttgagtcttccaaaatggatttcattttgtctcatgccgtgtactgcagggatgttctgaagctgaagaagggacagagggcagtgatcagcaatggaaggatcattgggccactggaggatagtgagctctttaatcaagacgatttccacctcctcgaaaatatcatcttaaaaacctcaggacagaaaataaaatctcatattcaacagcttcgggtagaagaagatgtggcaagcgacttggtaatgaaggtggatgctcttctgtcagcgcaaccaaaaggagatccaagaatcgagtaccagttttttgaagacagacacagtgcaatcaaactgaggccgaaggaaggggagacatactttgatgttgtggctgtcgttgaccctgtcaccagagaagcacagagacttgctcctttgctcttggttttggctcagctgataaacatgaatctgagagtatttatgaactgccaatccaaactttctgacatgcctttaaaaagcttttaccgttatgtcttagaaccagagatttctttcacttcagacaatagttttgctaagggtccaatcgcaaaatttttggatatgcctcagtctccactgttcactctgaatttgaacacacctgagagctggatggtagaatctgtcagaacaccatatgatcttgataatatttatttagaagaggtggacagtgtagtggctgctgagtatgagctggaatacctgttactggaaggtcattgctacgacatcaccacaggccagcctccacggggactacagtttaccttaggaacttcagccaacccggtcattgtggacaccattgttatggccaatctgggctactttcagctgaaagccaacccaggagcttggatcctcagacttaggaagggacgctctgaagatatttatagaatttacagccacgatggcaccgattctccccctgatgctgatgaggtggttatcgtcctcaacaacttcaaaagcaaaattattaaagtgaaggttcagaagaaggcagatatggtgaacgaagacttgctgagtgatggaacgagtgagaatgaatctggattttgggattccttcaaatggggctttacaggacagaagactgaggaagtgaagcaagataaagatgacataattaatattttctccgttgcatctggtcatctctacgaaagatttcttcgcataatgatgctatccgtgctgaagaataccaagactcctgtgaaattctggttcttgaagaattacttgtcccccacatttaaggagtttataccttacatggcaaatgaatacaatttccagtatgagcttgttcagtacaaatggccccggtggcttcatcaacaaactgaaaaacagcgtatcatctggggttacaagatcctcttcctggatgtacttttcccactagttgttgacaagttcctgtttgtggatgctgatcagattgtacgaacagatctgaaagagttaagagatttcaatttggatggtgctccttatggttacactcctttctgtgacagccgaagagaaatggacggctacaggttctggaagtcagggtactgggccagtcatttagccgggcgaaagtatcatatcagtgcactatatgttgtggatctgaagaagtttaggaaaatagctgctggtgacagactcaggggacagtaccaaggtctgagtcaggaccctaacagcctttcaaatcttgatcaagatctgcccaataacatgattcatcaggtgccaattaaatccctccctcaagaatggctttggtgtgaaacgtggtgtgatgacgcctctaagaaaagggcaaaaaccattgatttgtgtaataatccgatgaccaaagagccgaaactggaagcagctgtgcggattgtcccggagtggcaggactacgaccaagagatcaaacagctacagatccgctttcagaaggagaaagaaacgggagcactgtacaaagagaagacaaaagaaccaagccgagaaggtcctcagaaacgtgaagaattatgatctctggagaaggacaggaaatcaccccatttgaaaaacagtttttataataaatgctagttttttctgatctgtctatacaactgctgataagccggctgggcaggagtgccacaccttttgattctgagcatttgattctgacttctgtactctggtggccactggatctttgggattaaagctctgttggatttgtacctcagaggaagaccaagtggctgatcctttggactctgtaaagagcattcttctagtcagagggtggaatggcagcagcaactggaagaaaatgagttttttggtgcccacacccaagagcacacacatgctgcactgtctcggaaagcagggccagctagagccaccatgttcttccttacctcagtttacctgcggcctgcgctgcactgcagatgcccaccctgccctgggtctggccggcggaagctctgtccaaggtccacacacctccaggtttacgccaacatccttgtgccctccccaccttctcttccaacgcattaggtgcattgtttaattgaaatccaaccaacaattgtgtgtcaaggctggtttggtgcagtggctgggcaaattaattttgggccaggatgggggtgggttgcagtgagggtagggaaaatgtcaggagtaggaaggttcgggggttaagggaagggaaggaagaccagaactggccatcctcttttataatccattagtagcaccatggctcatttgaaatgaaaatattacacttattccccacccaaccgcagtgaactttctaggtaattgttttgaaaacaatttttgtatctgtgaaagtctttgctttttctttccaccttctagaaaagtctgctaccagtttccttactgaatacagccatactcagcccctctcgcatccagcccgtcagggtcagggtcagggtcaggctccctcaagacgagcaccgcattgtctgccctcttttgcgtaggatttttctctcagacccaggggacattgccttggacttttctctacaaatgccctcagatgtaagaccagaaatgattctgcttgtggaactcgtggctttctgtcctattttccttttatgtgagccctgcaggttgcctttggcgcccacaccagttctgtcttcatgtcgctgcatcgtgaagccccatttgcctttagtccctgctttgtgtgtcttcacttccacagccagtgttgcccctcagggcatactttgctggtgaacgggctgtagagtcttgagtatgttattggcctaagtgggcatgaggccccagcatccgactccatctgccaggctgcagggcacagcagcactggcatagacaggcacgctctgtcttccaacgtgcaccagccttttcttacatattttgcctgtttttaaaaaatacgaggagagggtgcagatggatactgtgccctcaccctcctaagccaggtaatatattgatgtgcagacttttaagaaatcttagtcttatcacaaatatcaagtaatttattttttccattttcaaatgcaaaagttagcctaggaagcctcccagtcatcctgaaggaccttttgactttgcttttataattctgttaaaaattgaggaggggattaatgagtacaatgaaaacaaaacaaaacaaaaaattaagaagaggaaagctcaaaagaggataagagactgaaaaggcacctcagaatggctgctgtgggcagagtctgtgacatgactttccccgccctgcccctctgttcagagcagctggaaagatgggatcagtaagattaaaaaacttttgttcggccaggcgtggtggctcacacctgtaatcccagcactttgggaggctgaggcggacggatcatgaggtcaggagttcaagaccagcctggccaatatggtgaaaccccgtctctactaaaaatacaaaaattagccgggtgttgtggctcaccctctattcccagctactcgggaggcagagacaggagaatcgcctgaacccaggaggcagaggttgcagtgagctgagatcgtgccactgcactccagcctgggtgacagagcgagactccatctcagaaaacaaacaaacaaaaagaaacttttgttcaagctgcatcttcacattgaatgaaagcattcagacgggtgactgctgctgtccacaactgtgggcggaagtgtgccttttcccagtttctcgtccaggaggttgcatagcaaatactcaagtcactgggatatatgctttccaaatgctggcccccatagcacctttccccatgtctttctaccaagcctcttatgtttaatctgtgcagggaagacaagagtagaccatattctctgtgtgctgtgcatgtcctggtgtcactcattgcctcttatctgtcgccattctaatataagtcagcttaatagttgactctgaataatgcaaaacccagcttgcttccagaatggcctaggaccctcctcctcctgccagttttttttttttttttggttcatgtggcataatcatctttcaaaattaaccaaatgccccagaaaatgatgttaccactaaaatattttctccaagaaggcatactgtaacagaaaagataggtaagatatttttttcccaagaagtaagaattgattgtgctgaatgttcaaactctggaaactgttcacagtatgttgttcttagctgttatttatataaagtgaattattttctctctcaatcatgccatagtggagacttttgtttgtgagtaagtgacagagtaatatgaaataatgtgatatgtcagagtgacatgcagcatcccggcctcccaaagtgctgggattgcaggcgtgaccactatgtccggtcaagccctcgtgttctgaaccttgtcaaggctctgcctgaatgagttttcatctgattgtggggaccaagtccctgagtagagggccaagagctagggacagggggaagagactggcccaggtggtagggaggaaagaactcccagagtttcctttagccaggaaacctgctctactgaccccgtgacttggacagtcagacatcaccctgagagtgacaagtgtaaaatgactcccttcctcccccgccctccggaagtatatttagatacttgaaagcagtccttttctaaaatggccttacctatgtggcctgaacgattaaaagaaagaactcagagttacaagggaaaaagaaaaagagttacaagggaattgtagtctttttctgaatagaatattagtactgtggtattgcatttcatgggaatggaaatgtattggtaaagctacctgatggaagctttctcttggtaacaaaaatggagggtgtattatgtgcagttatttaaatatatgtattccattgttgcgtggtttttttcccccctcaagacagagatttgctcttgttgcccagggtggagtacaatggtgtgactgtgatagtgccattgcactccagcctgggtgacagagtgagaccctgtctcaaaaaaacaaaatcaaaacaacccataaaccaaggtgttgaaatcattcaataaaaatgttaaaataattata

SEQ ID NO: 440752 - DNA, 5300 bp, Homo sapiens
tcacttttcctgccttccattagccactcacacattctttgtagatgtaaatacagctttacatagcccactaccatattgcttctgtgtaataatccgatgaccaaagagccgaaactggaagcagctgtgcggattgtcccggagtggcaggactacgaccaagagatcaaacagctacagatccgctttcagaaggagaaagaaacgggagcactgtacaaagagaagacaaaagaaccaagccgagaaggtcctcagaaacgtgaagaattatgatctctggagaaggacaggaaatcaccccatttgaaaaacagtttttataataaatgctagttttttctgatctgtctatacaactgctgataagccggctgggcaggagtgccacaccttttgattctgagcatttgattctgacttctgtactctggtggccactggatctttgggattaaagctctgttggatttgtacctcagaggaagaccaagtggctgatcctttggactctgtaaagagcattcttctagtcagagggtggaatggcagcagcaactggaagaaaatgagttttttggtgcccacacccaagagcacacacatgctgcactgtctcggaaagcagggccagctagagccaccatgttcttccttacctcagtttacctgcggcctgcgctgcactgcagatgcccaccctgccctgggtctggccggcggaagctctgtccaaggtccacacacctccaggtttacgccaacatccttgtgccctccccaccttctcttccaacgcattaggtgcattgtttaattgaaatccaaccaacaattgtgtgtcaaggctggtttggtgcagtggctgggcaaattaattttgggccaggatgggggtgggttgcagtgagggtagggaaaatgtcaggagtaggaaggttcgggggttaagggaagggaaggaagaccagaactggccatcctcttttataatccattagtagcaccatggctcatttgaaatgaaaatattacacttattccccacccaaccgcagtgaactttctaggtaattgttttgaaaacaatttttgtatctgtgaaagtctttgctttttctttccaccttctagaaaagtctgctaccagtttccttactgaatacagccatactcagcccctctcgcatccagcccgtcagggtcagggtcagggtcaggctccctcaagacgagcaccgcattgtctgccctcttttgcgtaggatttttctctcagacccaggggacattgccttggacttttctctacaaatgccctcagatgtaagaccagaaatgattctgcttgtggaactcgtggctttctgtcctattttccttttatgtgagccctgcaggttgcctttggcgcccacaccagttctgtcttcatgtcgctgcatcgtgaagccccatttgcctttagtccctgctttgtgtgtcttcacttccacagccagtgttgcccctcagggcatactttgctggtgaacgggctgtagagtcttgagtatgttattggcctaagtgggcatgaggccccagcatccgactccatctgccaggctgcagggcacagcagcactggcatagacaggcacgctctgtcttccaacgtgcaccagccttttcttacatattttgcctgtttttaaaaaatacgaggagagggtgcagatggatactgtgccctcaccctcctaagccaggtaatatattgatgtgcagacttttaagaaatcttagtcttatcacaaatatcaagtaatttattttttccattttcaaatgcaaaagttagcctaggaagcctcccagtcatcctgaaggaccttttgactttgcttttataattctgttaaaaattgaggaggggattaatgagtacaatgaaaacaaaacaaaacaaaaaattaagaagaggaaagctcaaaagaggataagagactgaaaaggcacctcagaatggctgctgtgggcagagtctgtgacatgactttccccgccctgcccctctgttcagagcagctggaaagatgggatcagtaagattaaaaaacttttgttcggccaggcgtggtggctcacacctgtaatcccagcactttgggaggctgaggcggacggatcatgaggtcaggagttcaagaccagcctggccaatatggtgaaaccccgtctctactaaaaatacaaaaattagccgggtgttgtggctcaccctctattcccagctactcgggaggcagagacaggagaatcgcctgaacccaggaggcagaggttgcagtgagctgagatcgtgccactgcactccagcctgggtgacagagcgagactccatctcagaaaacaaacaaacaaaaagaaacttttgttcaagctgcatcttcacattgaatgaaagcattcagacgggtgactgctgctgtccacaactgtgggcggaagtgtgccttttcccagtttctcgtccaggaggttgcatagcaaatactcaagtcactgggatatatgctttccaaatgctggcccccatagcacctttccccatgtctttctaccaagcctcttatgtttaatctgtgcagggaagacaagagtagaccatattctctgtgtgctgtgcatgtcctggtgtcactcattgcctcttatctgtcgccattctaatataagtcagcttaatagttgactctgaataatgcaaaacccagcttgcttccagaatggcctaggaccctcctcctcctgccagttttttttttttttttggttcatgtggcataatcatctttcaaaattaaccaaatgccccagaaaatgatgttaccactaaaatattttctccaagaaggcatactgtaacagaaaagataggtaagatatttttttcccaagaagtaagaattgattgtgctgaatgttcaaactctggaaactgttcacagtatgttgttcttagctgttatttatataaagtgaattattttctctctcaatcatgccatagtggagacttttgtttgtgagtaagtgacagagtaatatgaaataatgtgatatgtcagagtgacatgcagcatcccggcctcccaaagtgctgggattgcaggcgtgaccactatgtccggtcaagccctcgtgttctgaaccttgtcaaggctctgcctgaatgagttttcatctgattgtggggaccaagtccctgagtagagggccaagagctagggacagggggaagagactggcccaggtggtagggaggaaagaactcccagagtttcctttagccaggaaacctgctctactgaccccgtgacttggacagtcagacatcaccctgagagtgacaagtgtaaaatgactcccttcctcccccgccctccggaagtatatttagatacttgaaagcagtccttttctaaaatggccttacctatgtggcctgaacgattaaaagaaagaactcagagttacaagggaaaaagaaaaagagttacaagggaattgtagtctttttctgaatagaatattagtactgtggtattgcatttcatgggaatggaaatgtattggtaaagctacctgatggaagctttctcttggtaacaaaaatggagggtgtattatgtgcagttatttaaatatatgtattccattgttgcgtggtttttttcccccctcaagacagagatttgctcttgttgcccagggtggagtacaatggtgtgaccttggctcactgcaacctctgcctcctgggttcaggtgattctcctgcctcagccttccgagtagctgggattacaggtgtgcgccaccacacccggctaatttttgctttttttttttttgagacagaatctcgctctgttgctcaggctggagtggagtgcagtggcacaatctcagctcactgcagcctctgcctcccgggttcaagagattctcctgactcaacctcctgagtagctgggattacaggtgcctgccactatgcctagctaatttttgtagtttttagtagtagacggggtcttcgcatgtgtggccagggtggtctcgaactcctgacctcaagtgatccacccgcatcggccccccaaagtgctgggattataggcgtgaaccaccgcgcctgtcccattgttgtgtaattttaataattagttttttaagtacttgattttatgggcacatttttgtgggatgattggagttaatcaaataaagcttgtcatgtgtgtagtttggtaagataacttctttaaattcatgttttctctgccttgaggtagtgagggaaagatcttaatcagtattttggtaattaactgattgaattcaagcaaatgagacatcatgaacttcagtggttattgatatttcagggtatatacctgaaatgcctagaggatacagatttctcatttcattctttggtctttcatttctctatatacagaaatgaaatgacacttctgggaggcagtagaagcaggaagtcaatgaattgagtagagggtcccattccctcaggctgtcattgatcagtgacaatttataaaaacaaactgcaaagtctgtggcaagtggctgcctgcttcctagaaggagcccatgaaggttaaactctgtggtcggtatttgcaagcgccgggcgtggtggctcacgcctgtaatcctagcaccttgggaggccaaggcaggcggatcacccgaggtcaggagtttgaggatttgcaagcaaaaggtcctctcctgagtctttcccagatacccagcagtgcagaggctagctgtggaaggttgcagtgggacaggaatgtattgtatgccttgccttacttgtcaccattgagatttccagagaaatgggcataacgtctcttaacaacaacagcagaaagcaaaatacattaacttaaggttgacaacaaaagattatcaagtaccatgttttccaaccaaccagttattcgtggtaataataaaataaaggtgggaaaatgttataatttttaaggaaactgtgtactttaaaaatcttctttatgaatatccaatgttactgtaatcctgctccattaaatgcagcattgttgtcaggtgctgcctcttgcttgggaacagcattgggcttttaaatgtctgcagaatctctgcgttcgaagggaattgagaatgaacttcctggtactgtaatgaaaataaggtctgctcaacacagtaaacgtttcctctcttcttta

SEQ ID NO: 440753 - DNA, 3200 bp, Homo sapiens
cgtacggatgtggcctgaagattaaaagaaagaactcagagttacaagggaaaaagaaaaagagttacaagggaatggtagtctttttctgaatagaatattagtactgtggtatggcatttcatgggaatggaaatgtatgggtaaagctacctgatggaagctttctctgggtaacaaaaatggagggtgtattatgtgcagttatttaaatatatgtattccatggttgcagtgagctgagatcgtgccactgcactccagcctgggtgacagagcgagactccatctcagaaaacaaacaaacaaaaagaaacttttgttcaagctgcatcttcacattgaatgaaagcattcagacgggtgactgctgctgtccacaactgtgggcggaagtgtgccttttcccagtttctcgtccaggaggttgcatagcaaatactcaagtcactgggatatatgctttccaaatgctggcccccatagcacctttccccatgtctttctaccaagcctcttatgtttaatctgtgcagggaagacaagagtagaccatattctctgtgtgctgtgcatgtcctggtgtcactcattgcctcttatctgtcgccattctaatataagtcagcttaatagttgactctgaataatgcaaaacccagcttgcttccagaatggcctaggaccctcctcctcctgccagttttttttttttttttggttcatgtggcataatcatctttcaaaattaaccaaatgccccagaaaatgatgttaccactaaaatattttctccaagaaggcatactgtaacagaaaagataggtaagatatttttttcccaagaagtaagaattgattgtgctgaatgttcaaactctggaaactgttcacagtatgttgttcttagctgttatttatataaagtgaattattttctctctcaatcatgccatagtggagacttttgtttgtgagtaagtgacagagtaatatgaaataatgtgatatgtcagagtgacatgcagcatcccggcctcccaaagtgctgggattgcaggcgtgaccactatgtccggtcaagccctcgtgttctgaaccttgtcaaggctctgcctgaatgagttttcatctgattgtggggaccaagtccctgagtagagggccaagagctagggacagggggaagagactggcccaggtggtagggaggaaagaactcccagagtttcctttagccaggaaacctgctctactgaccccgtgacttggacagtcagacatcaccctgagagtgacaagtgtaaaatgactcccttcctcccccgccctccggaagtatatttagatacttgaaagcagtccttttctaaaatggccttacctatgtggcctgaacgattaaaagaaagaactcagagttacaagggaaaaagaaaaagagttacaagggaattgtagtctttttctgaatagaatattagtactgtggtattgcatttcatgggaatggaaatgtattggtaaagctacctgatggaagctttctcttggtaacaaaaatggagggtgtattatgtgcagttatttaaatatatgtattccattgttgcgtggtttttttcccccctcaagacagagatttgctcttgttgcccagggtggagtacaatggtgtgaccttggctcactgcaacctctgcctcctgggttcaggtgattctcctgcctcagccttccgagtagctgggattacaggtgtgcgccaccacacccggctaatttttgctttttttttttttgagacagaatctcgctctgttgctcaggctggagtggagtgcagtggcacaatctcagctcactgcagcctctgcctcccgggttcaagagattctcctgactcaacctcctgagtagctgggattacaggtgcctgccactatgcctagctaatttttgtagtttttagtagtagacggggtcttcgcatgtgtggccagggtggtctcgaactcctgacctcaagtgatccacccgcatcggccccccaaagtgctgggattataggcgtgaaccaccgcgcctgtcccattgttgtgtaattttaataattagttttttaagtacttgattttatgggcacatttttgtgggatgattggagttaatcaaataaagcttgtcatgtgtgtagtttggtaagataacttctttaaattcatgttttctctgccttgaggtagtgagggaaagatcttaatcagtattttggtaattaactgattgaattcaagcaaatgagacatcatgaacttcagtggttattgatatttcagggtatatacctgaaatgcctagaggatacagatttctcatttcattctttggtctttcatttctctatatacagaaatgaaatgacacttctgggaggcagtagaagcaggaagtcaatgaattgagtagagggtcccattccctcaggctgtcattgatcagtgacaatttataaaaacaaactgcaaagtctgtggcaagtggctgcctgcttcctagaaggagcccatgaaggttaaactctgtggtcggtatttgcaagcgccgggcgtggtggctcacgcctgtaatcctagcaccttgggaggccaaggcaggcggatcacccgaggtcaggagtttgaggatttgcaagcaaaaggtcctctcctgagtctttcccagatacccagcagtgcagaggctagctgtggaaggttgcagtgggacaggaatgtattgtatgccttgccttacttgtcaccattgagatttccagagaaatgggcataacgtctcttaacaacaacagcagaaagcaaaatacattaacttaaggttgacaacaaaagattatcaagtaccatgttttccaaccaaccagttattcgtggtaataataaaataaaggtgggaaaatgttataatttttaaggaaactgtgtactttaaaaatcttctttatgaatatccaatgttactgtaatcctgctccattaaatgcagcattgttgtcaggtgctgcctcttgcttgggaacagcattgggcttttaaatgtctgcagaatctctgcgttcgaagggaattgagaatgaacttcctggtactgtaatgaaaataaggtctgctcaacacagtaaacgtttcctctcttcttta

SEQ ID NO: 440754 - DNA, 2722 bp, Homo sapiens
ccagtgcattaatcagtagaattaatcagtgcatgttcctagtctgtaactaaactctgtggaagattcccctgctttcctatagtaaaggtttacgactttttcttctatctttattaagcttgtcattttcttctttttgcatggttcttacaaattatttggtcaatttcattttcagaatgttgaaacacagaatgtgcttctctcctctgactcaattagctgtttttgtttttctacagatgattcttttattaggccagtaactttttggattgttggggattttgatagcccttctggacggcagttactgtatgatgccatcaaacatcagaaatccagtaacaatgttagaataagcatgatcaataatcctgccaaagagataagctatgagaacactcagatctccagagcaatctgggcagctctccaaactcagacttccaacgctgctaagaacttcatcaccaaaatggccaaggagggggctgcagaggccctggctgcaggagctgacattgcggagttctctgttgggggaatggatttcagtctttttaaagaggtctttgagtcttccaaaatggatttcattttgtctcatgccgtgtactgcagggatgttctgaagctgaagaagggacagagggcagtgatcagcaatggaaggatcattgggccactggaggatagtgagctctttaatcaagacgatttccacctcctcgaaaatatcatcttaaaaacctcaggacagaaaataaaatctcatattcaacagcttcgggtagaagaagatgtggcaagcgacttggtaatgaaggtggatgctcttctgtcagcgcaaccaaaaggagatccaagaatcgagtaccagttttttgaagacagacacagtgcaatcaaactgaggccgaaggaaggggagacatactttgatgttgtggctgtcgttgaccctgtcaccagagaagcacagagacttgctcctttgctcttggttttggctcagctgataaacatgaatctgagagtatttatgaactgccaatccaaactttctgacatgcctttaaaaagcttttaccgttatgtcttagaaccagagatttctttcacttcagacaatagttttgctaagggtccaatcgcaaaatttttggatatgcctcagtctccactgttcactctgaatttgaacacacctgagagctggatggtagaatctgtcagaacaccatatgatcttgataatatttatttagaagaggtggacagtgtagtggctgctgagtatgagctggaatacctgttactggaaggtcattgctacgacatcaccacaggccagcctccacggggactacagtttaccttaggaacttcagccaacccggtcattgtggacaccattgttatggccaatctgggctactttcagctgaaagccaacccaggagcttggatcctcagacttaggaagggacgctctgaagatatttatagaatttacagccacgatggcaccgattctccccctgatgctgatgaggtggttatcgtcctcaacaacttcaaaagcaaaattattaaagtgaaggttcagaagaaggcagatatggtgaacgaagacttgctgagtgatggaacgagtgagaatgaatctggattttgggattccttcaaatggggctttacaggacagaagactgaggaagtgaagcaagataaagatgacataattaatattttctccgttgcatctggtcatctctacgaaagatttcttcgcataatgatgctatccgtgctgaagaataccaagactcctgtgaaattctggttcttgaagaattacttgtcccccacatttaaggagtttataccttacatggcaaatgaatacaatttccagtatgagcttgttcagtacaaatggccccggtggcttcatcaacaaactgaaaaacagcgtatcatctggggttacaagatcctcttcctggatgtacttttcccactagttgttgacaagttcctgtttgtggatgctgatcagattgtacgaacagatctgaaagagttaagagatttcaatttggatggtgctccttatggttacactcctttctgtgacagccgaagagaaatggacggctacaggttctggaagtcagggtactgggccagtcatttagccgggcgaaagtatcatatcagtgcactatatgttgtggatctgaagaagtttaggaaaatagctgctggtgacagactcaggggacagtaccaaggtctgagtcaggaccctaacagcctttcaaatcttgatcaagatctgcccaataacatgattcatcaggtgccaattaaatccctccctcaagaatggctttggtgtgaaacgtggtgtgatgacgcctctaagaaaagggcaaaaaccattgatttgtgtaataatccgatgaccaaagagccgaaactggaagcagctgtgcggattgtcccggagtggcaggactacgaccaagagatcaaacagctacagatccgctttcagaaggagaaagaaacgggagcactgtacaaagagaagacaaaagaaccaagccgagaaggtcctcagaaacgtgaagaattatgatctctggagaaggacaggaaatcaccccatttgaaaaacagtttttataataaatgctagttttttctg

SEQ ID NO: 440755 - DNA, 2661 bp, Homo sapiens
ccagtgcattaatcagtagaattaatcagtgcatgttcctagtctgtaactaaactctgtggaagattcccctgctttcctatagtaaaggtttacgactttttcttctatctttattaagcttgtcattttcttctttttgcatggttcttacaaattatttggtcaatttcattttcagaatgttgaaacacagaatgtgcttctctcctctgactcaattagctgtttttgtttttctacagatgattcttttattaggccagtaactttttggattgttggggattttgatagcccttctggacggcagttactgtatgatgccatcaaacatcagaaatccagtaacaatgttagaataagcatgatcaataatcctgccaaagagataagctatgagaacactcagatctccagagcaatctgggcagctctccaaactcagacttccaacgctgctaagaacttcatcaccaaaatggccaaggagggggctgcagaggccctggctgcaggagctgacattgcggagttctctgttgggggaatggatttcagtctttttaaagaggtctttgagtcttccaaaatggatttcattttgtctcatgccgtgtactgcagggatgttctgaagctgaagaagggacagagggcagtgatcagcaatggaaggatcattgggccactggaggatagtgagctctttaatcaagacgatttccacctcctcgaaaatatcatcttaaaaacctcaggacagaaaataaaatctcatattcaacagcttcgggtagaagaagatgtggcaagcgacttggtaatgaaggtggatgctcttctgtcagcgcaaccaaaaggagatccaagaatcgagtaccagttttttgaagacagacacagtgcaatcaaactgaggccgaaggaaggggagacatactttgatgttgtggctgtcgttgaccctgtcaccagagaagcacagagacttgctcctttgctcttggttttggctcagctgataaacatgaatctgagagtatttatgaactgccaatccaaactttctgacatgcctttaaaaagcttttaccgttatgtcttagaaccagagatttctttcacttcagacaatagttttgctaagggtccaatcgcaaaatttttggatatgcctcagtctccactgttcactctgaatttgaacacacctgagagctggatggtagaatctgtcagaacaccatatgatcttgataatatttatttagaagaggtggacagtgtagtggctgctgagtatgagctggaatacctgttactggaaggtcattgctacgacatcaccacaggccagcctccacggggactacagtttaccttaggaacttcagccaacccggtcattgtggacaccattgttatggccaatctgggctactttcagctgaaagccaacccaggagcttggatcctcagacttaggaagggacgctctgaagatatttatagaatttacagccacgatggcaccgattctccccctgatgctgatgaggtggttatcgtcctcaacaacttcaaaagcaaaattattaaagtgaaggttcagaagaaggcagatatggtgaacgaagacttgctgagtgatggaacgagtgagaatgaatctggattttgggattccttcaaatggggctttacaggacagaagactgaggaagtgaagcaagataaagatgacataattaatattttctccgttgcatctggtcatctctacgaaagatttcttcgcataatgatgctatccgtgctgaagaataccaagactcctgtgaaattctggttcttgaagaattacttgtcccccacatttaaggagtttataccttacatggcaaatgaatacaatttccagtatgagcttgttcagtacaaatggccccggtggcttcatcaacaaactgaaaaacagcgtatcatctggggttacaagatcctcttcctggatgtacttttcccactagttgttgacaagttcctgtttgtggatgctgatcagattgtacgaacagatctgaaagagttaagagatttcaatttggatggtgctccttatggttacactcctttctgtgacagccgaagagaaatggacggctacaggttctggaagtcagggtactgggccagtcatttagccgggcgaaagtatcatatcagtgcactatatgttgtggatctgaagaagtttaggaaaatagctgctggtgacagactcaggggacagtaccaaggtctgagtcaggaccctaacagcctttcaaatcttgatcaagatctgcccaataacatgattcatcaggtgccaattaaatccctccctcaagaatggctttggtgtgaaacgtggtgtgatgacgcctctaagaaaagggcaaaaaccattgatttgtgtaataatccgatgaccaaagagccgaaactggaagcagctgtgcggattgtcccggagtggcaggactacgaccaagagatcaaacagctacagatccgctttcagaaggagaaagaaacgggagcactgtacaaagagaagacaaaagaaccaagccgagaaggtcctcagacaccgtcgaaggggatcaaccgggc

SEQ ID NO: 440756 - DNA, 2844 bp, Homo sapiens
ccagtgcattaatcagtagaattaatcagtgcatgttcctagtctgtaactaaactctgtggaagattcccctgctttcctatagtaaaggtttacgactttttcttctatctttattaagcttgtcattttcttctttttgcatggttcttacaaattatttggtcaatttcattttcagaatgttgaaacacagaatgtgcttctctcctctgactcaattagctgtttttgtttttctacagatgattcttttattaggccagtaactttttggattgttggggattttgatagcccttctggacggcagttactgtatgatgccatcaaacatcagaaatccagtaacaatgttagaataagcatgatcaataatcctgccaaagagataagctatgagaacactcagatctccagagcaatctgggcagctctccaaactcagacttccaacgctgctaagaacttcatcaccaaaatggccaaggagggggctgcagaggccctggctgcaggagctgacattgcggagttctctgttgggggaatggatttcagtctttttaaagaggtctttgagtcttccaaaatggatttcattttgtctcatgccgtgtactgcagggatgttctgaagctgaagaagggacagagggcagtgatcagcaatggaaggatcattgggccactggaggatagtgagctctttaatcaagacgatttccacctcctcgaaaatatcatcttaaaaacctcaggacagaaaataaaatctcatattcaacagcttcgggtagaagaagatgtggcaagcgacttggtaatgaaggtggatgctcttctgtcagcgcaaccaaaaggagatccaagaatcgagtaccagttttttgaagacagacacagtgcaatcaaactgaggccgaaggaaggggagacatactttgatgttgtggctgtcgttgaccctgtcaccagagaagcacagagacttgctcctttgctcttggttttggctcagctgataaacatgaatctgagagtatttatgaactgccaatccaaactttctgacatgcctttaaaaagcttttaccgttatgtcttagaaccagagatttctttcacttcagacaatagttttgctaagggtccaatcgcaaaatttttggatatgcctcagtctccactgttcactctgaatttgaacacacctgagagctggatggtagaatctgtcagaacaccatatgatcttgataatatttatttagaagaggtggacagtgtagtggctgctgagtatgagctggaatacctgttactggaaggtcattgctacgacatcaccacaggccagcctccacggggactacagtttaccttaggaacttcagccaacccggtcattgtggacaccattgttatggccaatctgggctactttcagctgaaagccaacccaggagcttggatcctcagacttaggaagggacgctctgaagatatttatagaatttacagccacgatggcaccgattctccccctgatgctgatgaggtggttatcgtcctcaacaacttcaaaagcaaaattattaaagtgaaggttcagaagaaggcagatatggtgaacgaagacttgctgagtgatggaacgagtgagaatgaatctggattttgggattccttcaaatggggctttacaggacagaagactgaggaagtgaagcaagataaagatgacataattaatattttctccgttgcatctggtcatctctacgaaagatttcttcgcataatgatgctatccgtgctgaagaataccaagactcctgtgaaattctggttcttgaagaattacttgtcccccacatttaaggagtttataccttacatggcaaatgaatacaatttccagtatgagcttgttcagtacaaatggccccggtggcttcatcaacaaactgaaaaacagcgtatcatctggggttacaagatcctcttcctggatgtacttttcccactagttgttgacaagttcctgtttgtggatgctgatcagattgtacgaacagatctgaaagagttaagagatttcaatttggatggtgctccttatggttacactcctttctgtgacagccgaagagaaatggacggctacaggttctggaagtcagggtactgggccagtcatttagccgggcgaaagtatcatatcaggtactgaaaagaagcactcctaacactgttacggggttttccttaaaattgattttgtgtggttaaaattgtgaataggtaatacattggtatggttgaaaaataaaaatgataaaaaatacacagtggctgggtgcagtggctcatgccttaatcccagcactttgggatgccaaggcaggtggatcacctgaggtcaggatttcaagaccagcctggccaacatggcgaaaccccgtctctactaaaaatacaaaaattagctgggcatggtggtgggcgcctgtaatcccagctactcgggaggctaaggcaggagaattgcttgaacccaggaggcggaggttgcagtgagctgagatcacgccgctgcactccagcctggatgacagagtgagattccatctcaaaaaaaaaaaaaaaaaaaaaaaaccggggggatcaatggccggggggcgggaaaaaggagggtaagtggaaagtgggcccaggggccaattaggcgtggtcccgggacccaggcttccttggtacaacgggggcaagacctggcgggtcccccataatggcgaggcggaatcaattccggaaaacgccgggtaacctgggataatg

SEQ ID NO: 440757 - DNA, 204 bp, Homo sapiens
tacaatctgctgagtcactccttggcttccagtttatctctgtgccttgtaatttttccaaatggactttcacttttcctgccttccattagccactcacacattctttgtagatgtaaatacagctttacatagcccactaccatattgcttctggtagtatatcatttggttccttactattgttttcttgtccagttagga

SEQ ID NO: 440758 - DNA, 694 bp, Homo sapiens
cagagggcagtgatcagcaatggaagggtgaggatttgtcaagcttgacttcacattagatccgtgaacagtctttgcagcattctcctctgaagctagtaaactcttcagacagagccactcttttttcaaaggtgattggggcttatgaagtgccattgatgtttctgcctcctatttccaaggagctgtgctttttgacatagacaaatatccccatatggagccttcctgctgtcggtgagagtgtggtggctctcagaaagtcagtcagtatggactttgacacataaagtagcctttgttgtttttattcaggtagaattaatgaaaactactttacgattttattttactttgtccttgaggaattgataagtaaataactacaagtatttgctttgggcttcactttgtattatttcactgattttatctaaacatgtacctgtctcaggtctttaagatgttctggcgtatgaggtagcctgaggacgccagagggttccttaccagcttgctgagtgcaggcagccttccagagctaagcgcctgctcttctctccttcacagatcattgggccactggaggatagtgagctctttaatcaagacgatttccacctcctcgaaaatatcatcttaaaaacctcaggacagaaaataaaatctcatattcaacagcttcgggtag

SEQ ID NO: 440759 - DNA, 4910 bp, Homo sapiens
tgtctctggcactgtggcggactgaccacggcccgggcatgggctgcaagggagacgcgagcggtgcgtgtgccgcgggtgcgctgccggtgacaggagtttgctataaaatgggagttctggttgtactcactgttctgtggctgttctcctcagtaaaggccgactcaaaagccattacaacctctcttacaacaaaatggttttccactccattgttgttagaagccagtgagtttttagcagaagacagtcaagagaaattttggaattttgtagaagccagtcaaaatattggatcatcagatcatgacggtaccgattattcctactatcatgcaatattggaggctgcatttcagtttctgtcacccctccagcagaatttgtttaaattttgtctgtcccttcgttcttactcagctacaatccaagccttccagcagatagcagctgatgaacctccaccagaaggatgtaattcgtttttttcagtgcatggaaagaagacttgtgaatctgatacccttgaggctcttctactgacagcctctgaaagacccaaacctttattgttcaaaggagatcacagatatccctcgtctaatcctgaaagccctgtggtgattttctactctgagattggctctgaggaattttccaattttcaccgccagcttatatcaaaaagcaatgcaggcaaaatcaactatgtattcagacattatatatttaatcccaggaaggagcctgtttacctctctggctatggcgtggaattggccattaagagcactgagtacaaggccaaggatgatactcaggtgaaaggaactgaggtaaacaccacagtgattggtgaaaatgatcctattgatgaggttcaggggttcctctttggaaaattaagagatctgcaccccgacctggagggacagttgaaagaactcagaaagcatcttgtagagagcaccaatgaaatggcacctttaaaagtttggcagttgcaagatctcagtttccagactgctgctcgaatcttggcttctcctgttgagttggctttggttgtcatgaaggatcttagtcagaattttcctaccaaagccagagcaataacaaaaacagctgtgagctcagaacttagaaccgaagtggaagagaatcagaagtatttcaagggaactttaggattacaacctggagattcagccctcttcatcaatggacttcacatggatttagatacacaggatatattcagtctgtttgatgtgttgaggaatgaagctcgggtaatggagggtctgcatagattgggaatagaaggcctttctctgcataatgttttgaagctgaacatccagccctctgaggcagactatgccgtagacatccggagtcctgctatttcatgggtcaacaacctggaggttgatagcagatataattcgtggccttctagtttacaagagttgcttcgacccacctttcctggtgttattcggcagatcaggaaaaacttacataatatggttttcatagttgatcctgcacatgagaccacagcagagttgatgaacacagctgagatgttccttagtaatcatataccactaagaattggttttatctttgtggttaatgactctgaagatgttgatgggatgcaagatgctggagtggctgttcttagagcatataattatgttgcccaagaagtggatgattatcatgccttccagactctgacacatatctataacaaggtgaggactggagaaaaagtgaaagttgaacatgtggtcagtgtcctggagaagaaatatccgtatgtagaagtgaatagcattttggggattgattctgcttatgatcggaatcggaaggaagcaagaggctactatgagcagactggagttggacctctgcccgttgtgctgttcaatggaatgccctttgaaagggaacagctagaccctgatgagttagaaaccatcacaatgcataaaatcctggagaccaccaccttcttccaaagagcggtgtacttgggtgaactgccccatgatcaagatgtggtagagtatatcatgaatcagccaaatgttgttccacgaatcaattctaggattttgacagctgaacgagactacctggatttaacagcgagtaataacttctttgtggatgattatgctagatttactatcttggattcccaaggcaagactgctgctgtagccaatagtatgaactatctgacaaagaaaggaatgtcctccaaggaaatctatgatgattcttttattaggccagtaactttttggattgttggggattttgatagcccttctggacggcagttactgtatgatgccatcaaacatcagaaatccagtaacaatgttagaataagcatgatcaataatcctgccaaagagataagctatgagaacactcagatctccagagcaatctgggcagctctccaaactcagacttccaacgctgctaagaacttcatcaccaaaatggccaaggagggggctgcagaggccctggctgcaggagctgacattgcggagttctctgttgggggaatggatttcagtctttttaaagaggtctttgagtcttccaaaatggatttcattttgtctcatgccgtgtactgcagggatgttctgaagctgaagaagggacagagggcagtgatcagcaatggaaggatcattgggccactggaggatagtgagctctttaatcaagacgatttccacctcctcgaaaatatcatcttaaaaacctcaggacagaaaataaaatctcatattcaacagcttcgggtagaagaagatgtggcaagcgacttggtaatgaaggtggatgctcttctgtcagcgcaaccaaaaggagatccaagaatcgagtaccagttttttgaagacagacacagtgcaatcaaactgaggccgaaggaaggggagacatactttgatgttgtggctgtcgttgaccctgtcaccagagaagcacagagacttgctcctttgctcttggttttggctcagctgataaacatgaatctgagagtatttatgaactgccaatccaaactttctgacatgcctttaaaaagcttttaccgttatgtcttagaaccagagatttctttcacttcagacaatagttttgctaagggtccaatcgcaaaatttttggatatgcctcagtctccactgttcactctgaatttgaacacacctgagagctggatggtagaatctgtcagaacaccatatgatcttgataatatttatttagaagaggtggacagtgtagtggctgctgagtatgagctggaatacctgttactggaaggtcattgctacgacatcaccacaggccagcctccacggggactacagtttaccttaggaacttcagccaacccggtcattgtggacaccattgttatggccaatctgggctactttcagctgaaagccaacccaggagcttggatcctcagacttaggaagggacgctctgaagatatttatagaatttacagccacgatggcaccgattctccccctgatgctgatgaggtggttatcgtcctcaacaacttcaaaagcaaaattattaaagtgaaggttcagaagaaggcagatatggtgaacgaagacttgctgagtgatggaacgagtgagaatgaatctggattttgggattccttcaaatggggctttacaggacagaagactgaggaagtgaagcaagataaagatgacataattaatattttctccgttgcatctggtcatctctacgaaagatttcttcgcataatgatgctatccgtgctgaagaataccaagactcctgtgaaattctggttcttgaagaattacttgtcccccacatttaaggagtttataccttacatggcaaatgaatacaatttccagtatgagcttgttcagtacaaatggccccggtggcttcatcaacaaactgaaaaacagcgtatcatctggggttacaagatcctcttcctggatgtacttttcccactagttgttgacaagttcctgtttgtggatgctgatcagattgtacgaacagatctgaaagagttaagagatttcaatttggatggtgctccttatggttacactcctttctgtgacagccgaagagaaatggacggctacaggttctggaagtcagggtactgggccagtcatttagccgggcgaaagtatcatatcagtgcactatatgttgtggatctgaagaagtttaggaaaatagctgctggtgacagactcaggggacagtaccaaggtctgagtcaggaccctaacagcctttcaaatcttgatcaagatctgcccaataacatgattcatcaggtgccaattaaatccctccctcaagaatggctttggtgtgaaacgtggtgtgatgacgcctctaagaaaagggcaaaaaccattgatttgtgtaataatccgatgaccaaagagccgaaactggaagcagctgtgcggattgtcccggagtggcaggactacgaccaagagatcaaacagctacagatccgctttcagaaggagaaagaaacgggagcactgtacaaagagaagacaaaagaaccaagccgagaaggtcctcagaaacgtgaagaattatgatctctggagaaggacaggaaatcaccccatttgaaaaacagtttttataataaatgctagttttttctgatctgtctatacaactgctgataagccggctgggcaggagtgccacaccttttgattctgagcatttgattctgacttctgtactctggtggccactggatctttgggattaaagctctgttggatttgtacctc

SEQ ID NO: 440760 - DNA, 5305 bp, Homo sapiens
ccagtgcattaatcagtagaattaatcagtgcatgttcctagtctgtaactaaactctgtggaagattcccctgctttcctatagtaaaggtttacgactttttcttctatctttattaagcttgtcattttcttctttttgcatggttcttacaaattatttggtcaatttcattttcagaatgttgaaacacagaatgtgcttctctcctctgactcaattagctgtttttgtttttctacagatgattcttttattaggccagtaactttttggattgttggggattttgatagcccttctggacggcagttactgtatgatgccatcaaacatcagaaatccagtaacaatgttagaataagcatgatcaataatcctgccaaagagataagctatgagaacactcagatctccagagcaatctgggcagctctccaaactcagacttccaacgctgctaagaacttcatcaccaaaatggccaaggagggggctgcagaggccctggctgcaggagctgacattgcggagttctctgttgggggaatggatttcagtctttttaaagaggtctttgagtcttccaaaatggatttcattttgtctcatgccgtgtactgcagggatgttctgaagctgaagaagggacagagggcagtgatcagcaatggaaggatcattgggccactggaggatagtgagctctttaatcaagacgatttccacctcctcgaaaatatcatcttaaaaacctcaggacagaaaataaaatctcatattcaacagcttcgggtagaagaagatgtggcaagcgacttggtaatgaaggtggatgctcttctgtcagcgcaaccaaaaggagatccaagaatcgagtaccagttttttgaagacagacacagtgcaatcaaactgaggccgaaggaaggggagacatactttgatgttgtggctgtcgttgaccctgtcaccagagaagcacagagacttgctcctttgctcttggttttggctcagctgataaacatgaatctgagagtatttatgaactgccaatccaaactttctgacatgcctttaaaaagcttttaccgttatgtcttagaaccagagatttctttcacttcagacaatagttttgctaagggtccaatcgcaaaatttttggatatgcctcagtctccactgttcactctgaatttgaacacacctgagagctggatggtagaatctgtcagaacaccatatgatcttgataatatttatttagaagaggtggacagtgtagtggctgctgagtatgagctggaatacctgttactggaaggtcattgctacgacatcaccacaggccagcctccacggggactacagtttaccttaggaacttcagccaacccggtcattgtggacaccattgttatggccaatctgggctactttcagctgaaagccaacccaggagcttggatcctcagacttaggaagggacgctctgaagatatttatagaatttacagccacgatggcaccgattctccccctgatgctgatgaggtggttatcgtcctcaacaacttcaaaagcaaaattattaaagtgaaggttcagaagaaggcagatatggtgaacgaagacttgctgagtgatggaacgagtgagaatgaatctggattttgggattccttcaaatggggctttacaggacagaagactgaggaagtgaagcaagataaagatgacataattaatattttctccgttgcatctggtcatctctacgaaagatttcttcgcataatgatgctatccgtgctgaagaataccaagactcctgtgaaattctggttcttgaagaattacttgtcccccacatttaaggagtttataccttacatggcaaatgaatacaatttccagtatgagcttgttcagtacaaatggccccggtggcttcatcaacaaactgaaaaacagcgtatcatctggggttacaagatcctcttcctggatgtacttttcccactagttgttgacaagttcctgtttgtggatgctgatcagattgtacgaacagatctgaaagagttaagagatttcaatttggatggtgctccttatggttacactcctttctgtgacagccgaagagaaatggacggctacaggttctggaagtcagggtactgggccagtcatttagccgggcgaaagtatcatatcaggatctgcccaataacatgattcatcaggtgccaattaaatccctccctcaagaatggctttggtgtgaaacgtggtgtgatgacgcctctaagaaaagggcaaaaaccattgatttgtgtaataatccgatgaccaaagagccgaaactggaagcagctgtgcggattgtcccggagtggcaggactacgaccaagagatcaaacagctacagatccgctttcagaaggagaaagaaacgggagcactgtacaaagagaagacaaaagaaccaagccgagaaggtcctcagaaacgtgaagaattatgatctctggagaaggacaggaaatcaccccatttgaaaaacagtttttataataaatgctagttttttctgatctgtctatacaactgctgataagccggctgggcaggagtgccacaccttttgattctgagcatttgattctgacttctgtactctggtggccactggatctttgggattaaagctctgttggatttgtacctcagaggaagaccaagtggctgatcctttggactctgtaaagagcattcttctagtcagagggtggaatggcagcagcaactggaagaaaatgagttttttggtgcccacacccaagagcacacacatgctgcactgtctcggaaagcagggccagctagagccaccatgttcttccttacctcagtttacctgcggcctgcgctgcactgcagatgcccaccctgccctgggtctggccggcggaagctctgtccaaggtccacacacctccaggtttacgccaacatccttgtgccctccccaccttctcttccaacgcattaggtgcattgtttaattgaaatccaaccaacaattgtgtgtcaaggctggtttggtgcagtggctgggcaaattaattttgggccaggatgggggtgggttgcagtgagggtagggaaaatgtcaggagtaggaaggttcgggggttaagggaagggaaggaagaccagaactggccatcctcttttataatccattagtagcaccatggctcatttgaaatgaaaatattacacttattccccacccaaccgcagtgaactttctaggtaattgttttgaaaacaatttttgtatctgtgaaagtctttgctttttctttccaccttctagaaaagtctgctaccagtttccttactgaatacagccatactcagcccctctcgcatccagcccgtcagggtcagggtcagggtcaggctccctcaagacgagcaccgcattgtctgccctcttttgcgtaggatttttctctcagacccaggggacattgccttggacttttctctacaaatgccctcagatgtaagaccagaaatgattctgcttgtggaactcgtggctttctgtcctattttccttttatgtgagccctgcaggttgcctttggcgcccacaccagttctgtcttcatgtcgctgcatcgtgaagccccatttgcctttagtccctgctttgtgtgtcttcacttccacagccagtgttgcccctcagggcatactttgctggtgaacgggctgtagagtcttgagtatgttattggcctaagtgggcatgaggccccagcatccgactccatctgccaggctgcagggcacagcagcactggcatagacaggcacgctctgtcttccaacgtgcaccagccttttcttacatattttgcctgtttttaaaaaatacgaggagagggtgcagatggatactgtgccctcaccctcctaagccaggtaatatattgatgtgcagacttttaagaaatcttagtcttatcacaaatatcaagtaatttattttttccattttcaaatgcaaaagttagcctaggaagcctcccagtcatcctgaaggaccttttgactttgcttttataattctgttaaaaattgaggaggggattaatgagtacaatgaaaacaaaacaaaacaaaaaattaagaagaggaaagctcaaaagaggataagagactgaaaaggcacctcagaatggctgctgtgggcagagtctgtgacatgactttccccgccctgcccctctgttcagagcagctggaaagatgggatcagtaagattaaaaaacttttgttcggccaggcgtggtggctcacacctgtaatcccagcactttgggaggctgaggcggacggatcatgaggtcaggagttcaagaccagcctggccaatatggtgaaaccccgtctctactaaaaatacaaaaattagccgggtgttgtggctcaccctctattcccagctactcgggaggcagagacaggagaatcgcctgaacccaggaggcagaggttgcagtgagctgagatcgtgccactgcactccagcctgggtgacagagcgagactccatctcagaaaacaaacaaacaaaaagaaacttttgttcaagctgcatcttcacattgaatgaaagcattcagacgggtgactgctgctgtccacaactgtgggcggaagtgtgccttttcccagtttctcgtccaggaggttgcatagcaaatactcaagtcactgggatatatgctttccaaatgctggcccccatagcacctttccccatgtctttctaccaagcctcttatgtttaatctgtgcagggaagacaagagtagaccatattctctgtgtgctgtgcatgtcctggtgtcactcattgcctcttatctgtcgccattctaatataagtcagcttaatagttgactctgaataatgcaaaacccagcttgcttccagaatggcctaggaccctcctcctcctgccagttttttttttttttttggttcatgtggcataatcatctttcaaaattaaccaaatgccccagaaaatgatgttaccactaaaatattttctccaagaaggcatactgtaacagaaaagataggtaagatatttttttcccaagaagtaagaattgattgtgctgaatgttcaaactctggaaactgttcacagtatgttgttcttagctgttatttatataaagtgaattattttctctctca

SEQ ID NO: 440761 - DNA, 7674 bp, Homo sapiens
ccagtgcattaatcagtagaattaatcagtgcatgttcctagtctgtaactaaactctgtggaagattcccctgctttcctatagtaaaggtttacgactttttcttctatctttattaagcttgtcattttcttctttttgcatggttcttacaaattatttggtcaatttcattttcagaatgttgaaacacagaatgtgcttctctcctctgactcaattagctgtttttgtttttctacagatgattcttttattaggccagtaactttttggattgttggggattttgatagcccttctggacggcagttactgtatgatgccatcaaacatcagaaatccagtaacaatgttagaataagcatgatcaataatcctgccaaagagataagctatgagaacactcagatctccagagcaatctgggcagctctccaaactcagacttccaacgctgctaagaacttcatcaccaaaatggccaaggagggggctgcagaggccctggctgcaggagctgacattgcggagttctctgttgggggaatggatttcagtctttttaaagaggtctttgagtcttccaaaatggatttcattttgtctcatgccgtgtactgcagggatgttctgaagctgaagaagggacagagggcagtgatcagcaatggaaggatcattgggccactggaggatagtgagctctttaatcaagacgatttccacctcctcgaaaatatcatcttaaaaacctcaggacagaaaataaaatctcatattcaacagcttcgggtagaagaagatgtggcaagcgacttggtaatgaaggtggatgctcttctgtcagcgcaaccaaaaggagatccaagaatcgagtaccagttttttgaagacagacacagtgcaatcaaactgaggccgaaggaaggggagacatactttgatgttgtggctgtcgttgaccctgtcaccagagaagcacagagacttgctcctttgctcttggttttggctcagctgataaacatgaatctgagagtatttatgaactgccaatccaaactttctgacatgcctttaaaaagcttttaccgttatgtcttagaaccagagatttctttcacttcagacaatagttttgctaagggtccaatcgcaaaatttttggatatgcctcagtctccactgttcactctgaatttgaacacacctgagagctggatggtagaatctgtcagaacaccatatgatcttgataatatttatttagaagaggtggacagtgtagtggctgctgagtatgagctggaatacctgttactggaaggtcattgctacgacatcaccacaggccagcctccacggggactacagtttaccttaggaacttcagccaacccggtcattgtggacaccattgttatggccaatctgggctactttcagctgaaagccaacccaggagcttggatcctcagacttaggaagggacgctctgaagatatttatagaatttacagccacgatggcaccgattctccccctgatgctgatgaggtggttatcgtcctcaacaacttcaaaagcaaaattattaaagtgaaggttcagaagaaggcagatatggtgaacgaagacttgctgagtgatggaacgagtgagaatgaatctggattttgggattccttcaaatggggctttacaggacagaagactgaggaagtgaagcaagataaagatgacataattaatattttctccgttgcatctggtcatctctacgaaagatttcttcgcataatgatgctatccgtgctgaagaataccaagactcctgtgaaattctggttcttgaagaattacttgtcccccacatttaaggagtttataccttacatggcaaatgaatacaatttccagtatgagcttgttcagtacaaatggccccggtggcttcatcaacaaactgaaaaacagcgtatcatctggggttacaagatcctcttcctggatgtacttttcccactagttgttgacaagttcctgtttgtggatgctgatcagattgtacgaacagatctgaaagagttaagagatttcaatttggatggtgctccttatggttacactcctttctgtgacagccgaagagaaatggacggctacaggttctggaagtcagggtactgggccagtcatttagccgggcgaaagtatcatatcagtgcactatatgttgtggatctgaagaagtttaggaaaatagctgctggtgacagactcaggggacagtaccaaggtctgagtcaggaccctaacagcctttcaaatcttgatcaagatctgcccaataacatgattcatcaggtgccaattaaatccctccctcaagaatggctttggtgtgaaacgtggtgtgatgacgcctctaagaaaagggcaaaaaccattgatttgtgtaataatccgatgaccaaagagccgaaactggaagcagctgtgcggattgtcccggagtggcaggactacgaccaagagatcaaacagctacagatccgctttcagaaggagaaagaaacgggagcactgtacaaagagaagacaaaagaaccaagccgagaaggtcctcagaaacgtgaagaattatgatctctggagaaggacaggaaatcaccccatttgaaaaacagtttttataataaatgctagttttttctgatctgtctatacaactgctgataagccggctgggcaggagtgccacaccttttgattctgagcatttgattctgacttctgtactctggtggccactggatctttgggattaaagctctgttggatttgtacctcagaggaagaccaagtggctgatcctttggactctgtaaagagcattcttctagtcagagggtggaatggcagcagcaactggaagaaaatgagttttttggtgcccacacccaagagcacacacatgctgcactgtctcggaaagcagggccagctagagccaccatgttcttccttacctcagtttacctgcggcctgcgctgcactgcagatgcccaccctgccctgggtctggccggcggaagctctgtccaaggtccacacacctccaggtttacgccaacatccttgtgccctccccaccttctcttccaacgcattaggtgcattgtttaattgaaatccaaccaacaattgtgtgtcaaggctggtttggtgcagtggctgggcaaattaattttgggccaggatgggggtgggttgcagtgagggtagggaaaatgtcaggagtaggaaggttcgggggttaagggaagggaaggaagaccagaactggccatcctcttttataatccattagtagcaccatggctcatttgaaatgaaaatattacacttattccccacccaaccgcagtgaactttctaggtaattgttttgaaaacaatttttgtatctgtgaaagtctttgctttttctttccaccttctagaaaagtctgctaccagtttccttactgaatacagccatactcagcccctctcgcatccagcccgtcagggtcagggtcagggtcaggctccctcaagacgagcaccgcattgtctgccctcttttgcgtaggatttttctctcagacccaggggacattgccttggacttttctctacaaatgccctcagatgtaagaccagaaatgattctgcttgtggaactcgtggctttctgtcctattttccttttatgtgagccctgcaggttgcctttggcgcccacaccagttctgtcttcatgtcgctgcatcgtgaagccccatttgcctttagtccctgctttgtgtgtcttcacttccacagccagtgttgcccctcagggcatactttgctggtgaacgggctgtagagtcttgagtatgttattggcctaagtgggcatgaggccccagcatccgactccatctgccaggctgcagggcacagcagcactggcatagacaggcacgctctgtcttccaacgtgcaccagccttttcttacatattttgcctgtttttaaaaaatacgaggagagggtgcagatggatactgtgccctcaccctcctaagccaggtaatatattgatgtgcagacttttaagaaatcttagtcttatcacaaatatcaagtaatttattttttccattttcaaatgcaaaagttagcctaggaagcctcccagtcatcctgaaggaccttttgactttgcttttataattctgttaaaaattgaggaggggattaatgagtacaatgaaaacaaaacaaaacaaaaaattaagaagaggaaagctcaaaagaggataagagactgaaaaggcacctcagaatggctgctgtgggcagagtctgtgacatgactttccccgccctgcccctctgttcagagcagctggaaagatgggatcagtaagattaaaaaacttttgttcggccaggcgtggtggctcacacctgtaatcccagcactttgggaggctgaggcggacggatcatgaggtcaggagttcaagaccagcctggccaatatggtgaaaccccgtctctactaaaaatacaaaaattagccgggtgttgtggctcaccctctattcccagctactcgggaggcagagacaggagaatcgcctgaacccaggaggcagaggttgcagtgagctgagatcgtgccactgcactccagcctgggtgacagagcgagactccatctcagaaaacaaacaaacaaaaagaaacttttgttcaagctgcatcttcacattgaatgaaagcattcagacgggtgactgctgctgtccacaactgtgggcggaagtgtgccttttcccagtttctcgtccaggaggttgcatagcaaatactcaagtcactgggatatatgctttccaaatgctggcccccatagcacctttccccatgtctttctaccaagcctcttatgtttaatctgtgcagggaagacaagagtagaccatattctctgtgtgctgtgcatgtcctggtgtcactcattgcctcttatctgtcgccattctaatataagtcagcttaatagttgactctgaataatgcaaaacccagcttgcttccagaatggcctaggaccctcctcctcctgccagttttttttttttttttggttcatgtggcataatcatctttcaaaattaaccaaatgccccagaaaatgatgttaccactaaaatattttctccaagaaggcatactgtaacagaaaagataggtaagatatttttttcccaagaagtaagaattgattgtgctgaatgttcaaactctggaaactgttcacagtatgttgttcttagctgttatttatataaagtgaattattttctctctcaatcatgccatagtggagacttttgtttgtgagtaagtgacagagtaatatgaaataatgtgatatgtcagagtgacatgcagcatcccggcctcccaaagtgctgggattgcaggcgtgaccactatgtccggtcaagccctcgtgttctgaaccttgtcaaggctctgcctgaatgagttttcatctgattgtggggaccaagtccctgagtagagggccaagagctagggacagggggaagagactggcccaggtggtagggaggaaagaactcccagagtttcctttagccaggaaacctgctctactgaccccgtgacttggacagtcagacatcaccctgagagtgacaagtgtaaaatgactcccttcctcccccgccctccggaagtatatttagatacttgaaagcagtccttttctaaaatggccttacctatgtggcctgaacgattaaaagaaagaactcagagttacaagggaaaaagaaaaagagttacaagggaattgtagtctttttctgaatagaatattagtactgtggtattgcatttcatgggaatggaaatgtattggtaaagctacctgatggaagctttctcttggtaacaaaaatggagggtgtattatgtgcagttatttaaatatatgtattccattgttgcgtggtttttttcccccctcaagacagagatttgctcttgttgcccagggtggagtacaatggtgtgaccttggctcactgcaacctctgcctcctgggttcaggtgattctcctgcctcagccttccgagtagctgggattacaggtgtgcgccaccacacccggctaatttttgctttttttttttttgagacagaatctcgctctgttgctcaggctggagtggagtgcagtggcacaatctcagctcactgcagcctctgcctcccgggttcaagagattctcctgactcaacctcctgagtagctgggattacaggtgcctgccactatgcctagctaatttttgtagtttttagtagtagacggggtcttcgcatgtgtggccagggtggtctcgaactcctgacctcaagtgatccacccgcatcggccccccaaagtgctgggattataggcgtgaaccaccgcgcctgtcccattgttgtgtaattttaataattagttttttaagtacttgattttatgggcacatttttgtgggatgattggagttaatcaaataaagcttgtcatgtgtgtagtttggtaagataacttctttaaattcatgttttctctgccttgaggtagtgagggaaagatcttaatcagtattttggtaattaactgattgaattcaagcaaatgagacatcatgaacttcagtggttattgatatttcagggtatatacctgaaatgcctagaggatacagatttctcatttcattctttggtctttcatttctctatatacagaaatgaaatgacacttctgggaggcagtagaagcaggaagtcaatgaattgagtagagggtcccattccctcaggctgtcattgatcagtgacaatttataaaaacaaactgcaaagtctgtggcaagtggctgcctgcttcctagaaggagcccatgaaggttaaactctgtggtcggtatttgcaagcgccgggcgtggtggctcacgcctgtaatcctagcaccttgggaggccaaggcaggcggatcacccgaggtcaggagtttgaggatttgcaagcaaaaggtcctctcctgagtctttcccagatacccagcagtgcagaggctagctgtggaaggttgcagtgggacaggaatgtattgtatgccttgccttacttgtcaccattgagatttccagagaaatgggcataacgtctcttaacaacaacagcagaaagcaaaatacattaacttaaggttgacaacaaaagattatcaagtaccatgttttccaaccaaccagttattcgtggtaataataaaataaaggtgggaaaatgttataatttttaaggaaactgtgtactttaaaaatcttctttatgaatatccaatgttactgtaatcctgctccattaaatgcagcattgttgtcaggtgctgcctcttgcttgggaacagcattgggcttttaaatgtctgcagaatctctgcgttcgaagggaattgagaatgaacttcctggtactgtaatgaaaataaggtctgctcaacacagtaaacgtttcctctcttcttta

SEQ ID NO: 440762 - DNA, 7579 bp, Homo sapiens
ccagtgcattaatcagtagaattaatcagtgcatgttcctagtctgtaactaaactctgtggaagattcccctgctttcctatagtaaaggtttacgactttttcttctatctttattaagcttgtcattttcttctttttgcatggttcttacaaattatttggtcaatttcattttcagaatgttgaaacacagaatgtgcttctctcctctgactcaattagctgtttttgtttttctacagatgattcttttattaggccagtaactttttggattgttggggattttgatagcccttctggacggcagttactgtatgatgccatcaaacatcagaaatccagtaacaatgttagaataagcatgatcaataatcctgccaaagagataagctatgagaacactcagatctccagagcaatctgggcagctctccaaactcagacttccaacgctgctaagaacttcatcaccaaaatggccaaggagggggctgcagaggccctggctgcaggagctgacattgcggagttctctgttgggggaatggatttcagtctttttaaagaggtctttgagtcttccaaaatggatttcattttgtctcatgccgtgtactgcagggatgttctgaagctgaagaagggacagagggcagtgatcagcaatggaaggatcattgggccactggaggatagtgagctctttaatcaagacgatttccacctcctcgaaaatatcatcttaaaaacctcaggacagaaaataaaatctcatattcaacagcttcgggtagaagaagatgtggcaagcgacttggtaatgaaggtggatgctcttctgtcagcgcaaccaaaaggagatccaagaatcgagtaccagttttttgaagacagacacagtgcaatcaaactgaggccgaaggaaggggagacatactttgatgttgtggctgtcgttgaccctgtcaccagagaagcacagagacttgctcctttgctcttggttttggctcagctgataaacatgaatctgagagtatttatgaactgccaatccaaactttctgacatgcctttaaaaagcttttaccgttatgtcttagaaccagagatttctttcacttcagacaatagttttgctaagggtccaatcgcaaaatttttggatatgcctcagtctccactgttcactctgaatttgaacacacctgagagctggatggtagaatctgtcagaacaccatatgatcttgataatatttatttagaagaggtggacagtgtagtggctgctgagtatgagctggaatacctgttactggaaggtcattgctacgacatcaccacaggccagcctccacggggactacagtttaccttaggaacttcagccaacccggtcattgtggacaccattgttatggccaatctgggctactttcagctgaaagccaacccaggagcttggatcctcagacttaggaagggacgctctgaagatatttatagaatttacagccacgatggcaccgattctccccctgatgctgatgaggtggttatcgtcctcaacaacttcaaaagcaaaattattaaagtgaaggttcagaagaaggcagatatggtgaacgaagacttgctgagtgatggaacgagtgagaatgaatctggattttgggattccttcaaatggggctttacaggacagaagactgaggaagtgaagcaagataaagatgacataattaatattttctccgttgcatctggtcatctctacgaaagatttcttcgcataatgatgctatccgtgctgaagaataccaagactcctgtgaaattctggttcttgaagaattacttgtcccccacatttaaggagtttataccttacatggcaaatgaatacaatttccagtatgagcttgttcagtacaaatggccccggtggcttcatcaacaaactgaaaaacagcgtatcatctggggttacaagatcctcttcctggatgtacttttcccactagttgttgacaagttcctgtttgtggatgctgatcagattgtacgaacagatctgaaagagttaagagatttcaatttggatggtgctccttatggttacactcctttctgtgacagccgaagagaaatggacggctacaggttctggaagtcagggtactgggccagtcatttagccgggcgaaagtatcatatcagtgcactatatgttgtggatctgaagaagtttaggaaaatagctgctggtgacagactcaggggacagtaccaaggtctgagtcaggaccctaacagcctttcaaatcttgatcaagatctgcccaataacatgattcatcaggtgccaattaaatccctccctcaagaatggctttggtgtgaaacgtggtgtgatgacgcctctaagaaaagggcaaaaaccattgatttgtgtaataatccgatgaccaaagagccgaaactggaagcagctgtgcggattgtcccggagtggcaggactacgaccaagagatcaaacagctacagatccgctttcagaaggagaaagaaacgggagcactgtacaaagagaagacaaaagaaccaagccgagaaggtcctcagaaacgtgaagaattatgatctctggagaaggacaggaaatcaccccatttgaaaaacagtttttataataaatgctagttttttctgatctgtctatacaactgctgataagccggctgggcaggagtgccacaccttttgattctgagcatttgattctgacttctgtactctggtggccactggatctttgggattaaagctctgttggatttgtacctcagaggaagaccaagtggctgatcctttggactctgtaaagagcattcttctagtcagagggtggaatggcagcagcaactggaagaaaatgagttttttggtgcccacacccaagagcacacacatgctgcactgtctcggaaagcagggccagctagagccaccatgttcttccttacctcagtttacctgcggcctgcgctgcactgcagatgcccaccctgccctgggtctggccggcggaagctctgtccaaggtccacacacctccaggtttacgccaacatccttgtgccctcccctgccctctccctgaaataaagaacagcttgacagaaaaaaaaaaaaaaaaaaaaaaaaaaaaaaaaaaaaaaaaactcgtgccgaattcggcacgagtggccatcctcttttataatccattagtagcaccatggctcatttgaaatgaaaatattacacttattccccacccaaccgcagtgaactttctaggtaattgttttgaaaacaatttttgtatctgtgaaagtctttgctttttctttccaccttctagaaaagtctgctaccagtttccttactgaatacagccatactcagcccctctcgcatccagcccgtcagggtcagggtcagggtcaggctccctcaagacgagcaccgcattgtctgccctcttttgcgtaggatttttctctcagacccaggggacattgccttggacttttctctacaaatgccctcagatgtaagaccagaaatgattctgcttgtggaactcgtggctttctgtcctattttccttttatgtgagccctgcaggttgcctttggcgcccacaccagttctgtcttcatgtcgctgcatcgtgaagccccatttgcctttagtccctgctttgtgtgtcttcacttccacagccagtgttgcccctcagggcatactttgctggtgaacgggctgtagagtcttgagtatgttattggcctaagtgggcatgaggccccagcatccgactccatctgccaggctgcagggcacagcagcactggcatagacaggcacgctctgtcttccaacgtgcaccagccttttcttacatattttgcctgtttttaaaaaatacgaggagagggtgcagatggatactgtgccctcaccctcctaagccaggtaatatattgatgtgcagacttttaagaaatcttagtcttatcacaaatatcaagtaatttattttttccattttcaaatgcaaaagttagcctaggaagcctcccagtcatcctgaaggaccttttgactttgcttttataattctgttaaaaattgaggaggggattaatgagtacaatgaaaacaaaacaaaacaaaaaattaagaagaggaaagctcaaaagaggataagagactgaaaaggcacctcagaatggctgctgtgggcagagtctgtgacatgactttccccgccctgcccctctgttcagagcagctggaaagatgggatcagtaagattaaaaaacttttgttcggccaggcgtggtggctcacacctgtaatcccagcactttgggaggctgaggcggacggatcatgaggtcaggagttcaagaccagcctggccaatatggtgaaaccccgtctctactaaaaatacaaaaattagccgggtgttgtggctcaccctctattcccagctactcgggaggcagagacaggagaatcgcctgaacccaggaggcagaggttgcagtgagctgagatcgtgccactgcactccagcctgggtgacagagcgagactccatctcagaaaacaaacaaacaaaaagaaacttttgttcaagctgcatcttcacattgaatgaaagcattcagacgggtgactgctgctgtccacaactgtgggcggaagtgtgccttttcccagtttctcgtccaggaggttgcatagcaaatactcaagtcactgggatatatgctttccaaatgctggcccccatagcacctttccccatgtctttctaccaagcctcttatgtttaatctgtgcagggaagacaagagtagaccatattctctgtgtgctgtgcatgtcctggtgtcactcattgcctcttatctgtcgccattctaatataagtcagcttaatagttgactctgaataatgcaaaacccagcttgcttccagaatggcctaggaccctcctcctcctgccagttttttttttttttttggttcatgtggcataatcatctttcaaaattaaccaaatgccccagaaaatgatgttaccactaaaatattttctccaagaaggcatactgtaacagaaaagataggtaagatatttttttcccaagaagtaagaattgattgtgctgaatgttcaaactctggaaactgttcacagtatgttgttcttagctgttatttatataaagtgaattattttctctctcaatcatgccatagtggagacttttgtttgtgagtaagtgacagagtaatatgaaataatgtgatatgtcagagtgacatgcagcatcccggcctcccaaagtgctgggattgcaggcgtgaccactatgtccggtcaagccctcgtgttctgaaccttgtcaaggctctgcctgaatgagttttcatctgattgtggggaccaagtccctgagtagagggccaagagctagggacagggggaagagactggcccaggtggtagggaggaaagaactcccagagtttcctttagccaggaaacctgctctactgaccccgtgacttggacagtcagacatcaccctgagagtgacaagtgtaaaatgactcccttcctcccccgccctccggaagtatatttagatacttgaaagcagtccttttctaaaatggccttacctatgtggcctgaacgattaaaagaaagaactcagagttacaagggaaaaagaaaaagagttacaagggaattgtagtctttttctgaatagaatattagtactgtggtattgcatttcatgggaatggaaatgtattggtaaagctacctgatggaagctttctcttggtaacaaaaatggagggtgtattatgtgcagttatttaaatatatgtattccattgttgcgtggtttttttcccccctcaagacagagatttgctcttgttgcccagggtggagtacaatggtgtgaccttggctcactgcaacctctgcctcctgggttcaggtgattctcctgcctcagccttccgagtagctgggattacaggtgtgcgccaccacacccggctaatttttgctttttttttttttgagacagaatctcgctctgttgctcaggctggagtggagtgcagtggcacaatctcagctcactgcagcctctgcctcccgggttcaagagattctcctgactcaacctcctgagtagctgggattacaggtgcctgccactatgcctagctaatttttgtagtttttagtagtagacggggtcttcgcatgtgtggccagggtggtctcgaactcctgacctcaagtgatccacccgcatcggccccccaaagtgctgggattataggcgtgaaccaccgcgcctgtcccattgttgtgtaattttaataattagttttttaagtacttgattttatgggcacatttttgtgggatgattggagttaatcaaataaagcttgtcatgtgtgtagtttggtaagataacttctttaaattcatgttttctctgccttgaggtagtgagggaaagatcttaatcagtattttggtaattaactgattgaattcaagcaaatgagacatcatgaacttcagtggttattgatatttcagggtatatacctgaaatgcctagaggatacagatttctcatttcattctttggtctttcatttctctatatacagaaatgaaatgacacttctgggaggcagtagaagcaggaagtcaatgaattgagtagagggtcccattccctcaggctgtcattgatcagtgacaatttataaaaacaaactgcaaagtctgtggcaagtggctgcctgcttcctagaaggagcccatgaaggttaaactctgtggtcggtatttgcaagcgccgggcgtggtggctcacgcctgtaatcctagcaccttgggaggccaaggcaggcggatcacccgaggtcaggagtttgaggatttgcaagcaaaaggtcctctcctgagtctttcccagatacccagcagtgcagaggctagctgtggaaggttgcagtgggacaggaatgtattgtatgccttgccttacttgtcaccattgagatttccagagaaatgggcataacgtctcttaacaacaacagcagaaagcaaaatacattaacttaaggttgacaacaaaagattatcaagtaccatgttttccaaccaaccagttattcgtggtaataataaaataaaggtgggaaaatgttataatttttaaggaaactgtgtactttaaaaatcttctttatgaatatccaatgttactgtaatcctgctccattaaatgcagcattgttgtcaggtgctgcctcttgcttgggaacagcattgggcttttaaatgtctgcagaatctctgcgttcgaagggaattgagaatgaacttcctggtactgtaatgaaaataaggtctgctcaacacagtaaacgtttcctctcttcttta

SEQ ID NO: 440763 - DNA, 6202 bp, Homo sapiens
ccagtgcattaatcagtagaattaatcagtgcatgttcctagtctgtaactaaactctgtggaagattcccctgctttcctatagtaaaggtttacgactttttcttctatctttattaagcttgtcattttcttctttttgcatggttcttacaaattatttggtcaatttcattttcagaatgttgaaacacagaatgtgcttctctcctctgactcaattagctgtttttgtttttctacagatgattcttttattaggccagtaactttttggattgttggggattttgatagcccttctggacggcagttactgtatgatgccatcaaacatcagaaatccagtaacaatgttagaataagcatgatcaataatcctgccaaagagataagctatgagaacactcagatctccagagcaatctgggcagctctccaaactcagacttccaacgctgctaagaacttcatcaccaaaatggccaaggagggggctgcagaggccctggctgcaggagctgacattgcggagttctctgttgggggaatggatttcagtctttttaaagaggtctttgagtcttccaaaatggatttcattttgtctcatgccgtgtactgcagggatgttctgaagctgaagaagggacagagggcagtgatcagcaatggaaggatcattgggccactggaggatagtgagctctttaatcaagacgatttccacctcctcgaaaatatcatcttaaaaacctcaggacagaaaataaaatctcatattcaacagcttcgggtagaagaagatgtggcaagcgacttggtaatgaaggtggatgctcttctgtcagcgcaaccaaaaggagatccaagaatcgagtaccagttttttgaagacagacacagtgcaatcaaactgaggccgaaggaaggggagacatactttgatgttgtggctgtcgttgaccctgtcaccagagaagcacagagacttgctcctttgctcttggttttggctcagctgataaacatgaatctgagagtatttatgaactgccaatccaaactttctgacatgcctttaaaaagcttttaccgttatgtcttagaaccagagatttctttcacttcagacaatagttttgctaagggtccaatcgcaaaatttttggatatgcctcagtctccactgttcactctgaatttgaacacacctgagagctggatggtagaatctgtcagaacaccatatgatcttgataatatttatttagaagaggtggacagtgtagtggctgctgagtatgagctggaatacctgttactggaaggtcattgctacgacatcaccacaggccagcctccacggggactacagtttaccttaggaacttcagccaacccggtcattgtggacaccattgttatggccaatctgggctactttcagctgaaagccaacccaggagcttggatcctcagacttaggaagggacgctctgaagatatttatagaatttacagccacgatggcaccgattctccccctgatgctgatgaggtggttatcgtcctcaacaacttcaaaagcaaaattattaaagtgaaggttcagaagaaggcagatatggtgaacgaagacttgctgagtgatggaacgagtgagaatgaatctggattttgggattccttcaaatggggctttacaggacagaagactgaggaagtgaagcaagataaagatgacataattaatattttctccgttgcatctggtcatctctacgaaagatttcttcgcataatgatgctatccgtgctgaagaataccaagactcctgtgaaattctggttcttgaagaattacttgtcccccacatttaaggagtttataccttacatggcaaatgaatacaatttccagtatgagcttgttcagtacaaatggccccggtggcttcatcaacaaactgaaaaacagcgtatcatctggggttacaagatcctcttcctggatgtacttttcccactagttgttgacaagttcctgtttgtggatgctgatcagattgtacgaacagatctgaaagagttaagagatttcaatttggatggtgctccttatggttacactcctttctgtgacagccgaagagaaatggacggctacaggttctggaagtcagggtactgggccagtcatttagccgggcgaaagtatcatatcagtgcactatatgttgtggatctgaagaagtttaggaaaatagctgctggtgacagactcaggggacagtaccaaggtctgagtcaggaccctaacagcctttcaaatcttgatcaagatctgcccaataacatgattcatcaggtgccaattaaatccctccctcaagaatggctttggtgtgaaacgtggtgtgatgacgcctctaagaaaagggcaaaaaccattgatttgtgtaataatccgatgaccaaagagccgaaactggaagcagctgtgcggattgtcccggagtggcaggactacgaccaagagatcaaacagctacagatccgctttcagaaggagaaagaaacgggagcactgtacaaagagaagacaaaagaaccaagccgagaaggtcctcagaaacgtgaagaattatgatctctggagaaggacaggaaatcaccccatttgaaaaacagtttttataataaatgctagttttttctgatctgtctatacaactgctgataagccggctgggcaggagtgccacaccttttgattctgagcatttgattctgacttctgtactctggtggccactggatctttgggattaaagctctgttggatttgtacctcagaggaagaccaagtggctgatcctttggactctgtaaagagcattcttctagtcagagggtggaatggcagcagcaactggaagaaaatgagttttttggtgcccacacccaagagcacacacatgctgcactgtctcggaaagcagggccagctagagccaccatgttcttccttacctcagtttacctgcggcctgcgctgcactgcagatgcccaccctgccctgggtctggccggcggaagctctgtccaaggtccacacacctccaggtttacgccaacatccttgtgccctccccaccttctcttccaacgcattaggtgcattgtttaattgaaatccaaccaacaattgtgtgtcaaggctggtttggtgcagtggctgggcaaattaattttgggccaggatgggggtgggttgcagtgagggtagggaaaatgtcaggagtaggaaggttcgggggttaagggaagggaaggaagaccagaactggccatcctcttttataatccattagtagcaccatggctcatttgaaatgaaaatattacacttattccccacccaaccgcagtgaactttctaggtaattgttttgaaaacaatttttgtatctgtgaaagtctttgctttttctttccaccttctagaaaagtctgctaccagtttccttactgaatacagccatactcagcccctctcgcatccagcccgtcagggtcagggtcagggtcaggctccctcaagacgagcaccgcattgtctgccctcttttgcgtaggatttttctctcagacccaggggacattgccttggacttttctctacaaatgccctcagatgtaagaccagaaatgattctgcttgtggaactcgtggctttctgtcctattttccttttatgtgagccctgcaggttgcctttggcgcccacaccagttctgtcttcatgtcgctgcatcgtgaagccccatttgcctttagtccctgctttgtgtgtcttcacttccacagccagtgttgcccctcagggcatactttgctggtgaacgggctgtagagtcttgagtatgttattggcctaagtgggcatgaggccccagcatccgactccatctgccaggctgcagggcacagcagcactggcatagacaggcacgctctgtcttccaacgtgcaccagccttttcttacatattttgcctgtttttaaaaaatacgaggagagggtgcagatggatactgtgccctcaccctcctaagccaggtaatatattgatgtgcagacttttaagaaatcttagtcttatcacaaatatcaagtaatttattttttccattttcaaatgcaaaagttagcctaggaagcctcccagtcatcctgaaggaccttttgactttgcttttataattctgttaaaaattgaggaggggattaatgagtacaatgaaaacaaaacaaaacaaaaaattaagaagaggaaagctcaaaagaggataagagactgaaaaggcacctcagaatggctgctgtgggcagagtctgtgacatgactttccccgccctgcccctctgttcagagcagctggaaagatgggatcagtaagattaaaaaacttttgttcggccaggcgtggtggctcacacctgtaatcccagcactttgggaggctgaggcggacggatcatgaggtcaggagttcaagaccagcctggccaatatggtgaaaccccgtctctactaaaaatacaaaaattagccgggtgttgtggctcaccctctattcccagctactcgggaggcagagacaggagaatcgcctgaacccaggaggcagaggttgcagtgagctgagatcgtgccactgcactccagcctgggtgacagagcgagactccatctcagaaaacaaacaaacaaaaagaaacttttgttcaagctgcatcttcacattgaatgaaagcattcagacgggtgactgctgctgtccacaactgtgggcggaagtgtgccttttcccagtttctcgtccaggaggttgcatagcaaatactcaagtcactgggatatatgctttccaaatgctggcccccatagcacctttccccatgtctttctaccaagcctcttatgtttaatctgtgcagggaagacaagagtagaccatattctctgtgtgctgtgcatgtcctggtgtcactcattgcctcttatctgtcgccattctaatataagtcagcttaatagttgactctgaataatgcaaaacccagcttgcttccagaatggcctaggaccctcctcctcctgccagttttttttttttttttggttcatgtggcataatcatctttcaaaattaaccaaatgccccagaaaatgatgttaccactaaaatattttctccaagaaggcatactgtaacagaaaagataggtaagatatttttttcccaagaagtaagaattgattgtgctgaatgttcaaactctggaaactgttcacagtatgttgttcttagctgttatttatataaagtgaattattttctctctcaatcatgccatagtggagacttttgtttgtgagtaagtgacagagtaatatgaaataatgtgatatgtcagagtgacatgcagcatcccggcctcccaaagtgctgggattgcaggcgtgaccactatgtccggtcaagccctcgtgttctgaaccttgtcaaggctctgcctgaatgagttttcatctgattgtggggaccaagtccctgagtagagggccaagagctagggacagggggaagagactggcccaggtggtagggaggaaagaactcccagagtttcctttagccaggaaacctgctctactgaccccgtgacttggacagtcagacatcaccctgagagtgacaagtgtaaaatgactcccttcctcccccgccctccggaagtatatttagatacttgaaagcagtccttttctaaaatggccttacctatgtggcctgaacgattaaaagaaagaactcagagttacaagggaaaaagaaaaagagttacaagggaattgtagtctttttctgaatagaatattagtactgtggtattgcatttcatgggaatggaaatgtattggtaaagctacctgatggaagctttctcttggtaacaaaaatggagggtgtattatgtgcagttatttaaatatatgtattccattgttgcgtggtttttttcccccctcaagacagagtgagaccctgtctcaaaaaaacaaaatcaaaacaacccataaaccaaggtgttgaaatcattcaataaaaatgttaaaataattata

SEQ ID NO: 440764 - DNA, 5879 bp, Homo sapiens
ccagtgcattaatcagtagaattaatcagtgcatgttcctagtctgtaactaaactctgtggaagattcccctgctttcctatagtaaaggtttacgactttttcttctatctttattaagcttgtcattttcttctttttgcatggttcttacaaattatttggtcaatttcattttcagaatgttgaaacacagaatgtgcttctctcctctgactcaattagctgtttttgtttttctacagatgattcttttattaggccagtaactttttggattgttggggattttgatagcccttctggacggcagttactgtatgatgccatcaaacatcagaaatccagtaacaatgttagaataagcatgatcaataatcctgccaaagagataagctatgagaacactcagatctccagagcaatctgggcagctctccaaactcagacttccaacgctgctaagaacttcatcaccaaaatggccaaggagggggctgcagaggccctggctgcaggagctgacattgcggagttctctgttgggggaatggatttcagtctttttaaagaggtctttgagtcttccaaaatggatttcattttgtctcatgccgtgtactgcagggatgttctgaagctgaagaagggacagagggcagtgatcagcaatggaaggatcattgggccactggaggatagtgagctctttaatcaagacgatttccacctcctcgaaaatatcatcttaaaaacctcaggacagaaaataaaatctcatattcaacagcttcgggtagaagaagatgtggcaagcgacttggtaatgaaggtggatgctcttctgtcagcgcaaccaaaaggagatccaagaatcgagtaccagttttttgaagacagacacagtgcaatcaaactgaggccgaaggaaggggagacatactttgatgttgtggctgtcgttgaccctgtcaccagagaagcacagagacttgctcctttgctcttggttttggctcagctgataaacatgaatctgagagtatttatgaactgccaatccaaactttctgacatgcctttaaaaagcttttaccgttatgtcttagaaccagagatttctttcacttcagacaatagttttgctaagggtccaatcgcaaaatttttggatatgcctcagtctccactgttcactctgaatttgaacacacctgagagctggatggtagaatctgtcagaacaccatatgatcttgataatatttatttagaagaggtggacagtgtagtggctgctgagtatgagctggaatacctgttactggaaggtcattgctacgacatcaccacaggccagcctccacggggactacagtttaccttaggaacttcagccaacccggtcattgtggacaccattgttatggccaatctgggctactttcagctgaaagccaacccaggagcttggatcctcagacttaggaagggacgctctgaagatatttatagaatttacagccacgatggcaccgattctccccctgatgctgatgaggtggttatcgtcctcaacaacttcaaaagcaaaattattaaagtgaaggttcagaagaaggcagatatggtgaacgaagacttgctgagtgatggaacgagtgagaatgaatctggattttgggattccttcaaatggggctttacaggacagaagactgaggaagtgaagcaagataaagatgacataattaatattttctccgttgcatctggtcatctctacgaaagatttcttcgcataatgatgctatccgtgctgaagaataccaagactcctgtgaaattctggttcttgaagaattacttgtcccccacatttaaggagtttataccttacatggcaaatgaatacaatttccagtatgagcttgttcagtacaaatggccccggtggcttcatcaacaaactgaaaaacagcgtatcatctggggttacaagatcctcttcctggatgtacttttcccactagttgttgacaagttcctgtttgtggatgctgatcagattgtacgaacagatctgaaagagttaagagatttcaatttggatggtgctccttatggttacactcctttctgtgacagccgaagagaaatggacggctacaggttctggaagtcagggtactgggccagtcatttagccgggcgaaagtatcatatcagtgcactatatgttgtggatctgaagaagtttaggaaaatagctgctggtgacagactcaggggacagtaccaaggtctgagtcaggaccctaacagcctttcaaatcttgatcaagatctgcccaataacatgattcatcaggtgccaattaaatccctccctcaagaatggctttggtgtgaaacgtggtgtgatgacgcctctaagaaaagggcaaaaaccattgatttgtgtaataatccgatgaccaaagagccgaaactggaagcagctgtgcggattgtcccggagtggcaggactacgaccaagagatcaaacagctacagatccgctttcagaaggagaaagaaacgggagcactgtacaaagagaagacaaaagaaccaagccgagaaggtcctcagaaacgtgaagaattatgatctctggagaaggacaggaaatcaccccatttgaaaaacagtttttataataaatgctagttttttctgatctgtctatacaactgctgataagccggctgggcaggagtgccacaccttttgattctgagcatttgattctgacttctgtactctggtggccactggatctttgggattaaagctctgttggatttgtacctcagaggaagaccaagtggctgatcctttggactctgtaaagagcattcttctagtcagagggtggaatggcagcagcaactggaagaaaatgagttttttggtgcccacacccaagagcacacacatgctgcactgtctcggaaagcagggccagctagagccaccatgttcttccttacctcagtttacctgcggcctgcgctgcactgcagatgcccaccctgccctgggtctggccggcggaagctctgtccaaggtccacacacctccaggtttacgccaacatccttgtgccctccccaccttctcttccaacgcattaggtgcattgtttaattgaaatccaaccaacaattgtgtgtcaaggctggtttggtgcagtggctgggcaaattaattttgggccaggatgggggtgggttgcagtgagggtagggaaaatgtcaggagtaggaaggttcgggggttaagggaagggaaggaagaccagaactggccatcctcttttataatccattagtagcaccatggctcatttgaaatgaaaatattacacttattccccacccaaccgcagtgaactttctaggtaattgttttgaaaacaatttttgtatctgtgaaagtctttgctttttctttccaccttctagaaaagtctgctaccagtttccttactgaatacagccatactcagcccctctcgcatccagcccgtcagggtcagggtcagggtcaggctccctcaagacgagcaccgcattgtctgccctcttttgcgtaggatttttctctcagacccaggggacattgccttggacttttctctacaaatgccctcagatgtaagaccagaaatgattctgcttgtggaactcgtggctttctgtcctattttccttttatgtgagccctgcaggttgcctttggcgcccacaccagttctgtcttcatgtcgctgcatcgtgaagccccatttgcctttagtccctgctttgtgtgtcttcacttccacagccagtgttgcccctcagggcatactttgctggtgaacgggctgtagagtcttgagtatgttattggcctaagtgggcatgaggccccagcatccgactccatctgccaggctgcagggcacagcagcactggcatagacaggcacgctctgtcttccaacgtgcaccagccttttcttacatattttgcctgtttttaaaaaatacgaggagagggtgcagatggatactgtgccctcaccctcctaagccaggtaatatattgatgtgcagacttttaagaaatcttagtcttatcacaaatatcaagtaatttattttttccattttcaaatgcaaaagttagcctaggaagcctcccagtcatcctgaaggaccttttgactttgcttttataattctgttaaaaattgaggaggggattaatgagtacaatgaaaacaaaacaaaacaaaaaattaagaagaggaaagctcaaaagaggataagagactgaaaaggcacctcagaatggctgctgtgggcagagtctgtgacatgactttccccgccctgcccctctgttcagagcagctggaaagatgggatcagtaagattaaaaaacttttgttcggccaggcgtggtggctcacacctgtaatcccagcactttgggaggctgaggcggacggatcatgaggtcaggagttcaagaccagcctggccaatatggtgaaaccccgtctctactaaaaatacaaaaattagccgggtgttgtggctcaccctctattcccagctactcgggaggcagagacaggagaatcgcctgaacccaggaggcagaggttgcagtgagctgagatcgtgccactgcactccagcctgggtgacagagcgagactccatctcagaaaacaaacaaacaaaaagaaacttttgttcaagctgcatcttcacattgaatgaaagcattcagacgggtgactgctgctgtccacaactgtgggcggaagtgtgccttttcccagtttctcgtccaggaggttgcatagcaaatactcaagtcactgggatatatgctttccaaatgctggcccccatagcacctttccccatgtctttctaccaagcctcttatgtttaatctgtgcagggaagacaagagtagaccatattctctgtgtgctgtgcatgtcctggtgtcactcattgcctcttatctgtcgccattctaatataagtcagcttaatagttgactctgaataatgcaaaacccagcttgcttccagaatggcctaggaccctcctcctcctgccagttttttttcttcttctattattaccaggggtcacatggtgggcataactcattctttcaaatttacccaatttggccccaagaaattggtttgttcccattaaactattcttctcccaaagaagggcatactggtgaccacgaaccaagatcggaacaatcattctttgtcccaagaaacgctaacaatggatgggcgcgcgacgtgttccaacacttcggtgaacctgcggtccaccaagatatgtcggtccctaaggccgggcacattcactactcaccggcgcacatattgtgcctctcctacacatcatgccatatgtggcaccttttggttgtggcgaccacacagtcgaccacgagctcactatggaccacaaggggacctacgtgcccagagctgagacatagcagcaccccaggaggccggacaaaacagccccggcgacaccacgggggacattggaattggagcaatcacaaggggcttgttacacaaatcttttatgacgtagcggatggagggggaattagtggccaaaagcaccgagatgtagagggatgcaagaagagttaactggagttggtttcaccacattgggggaaaaacagtgagtggagcatgttaagttcatttagagaagtcgaatcaagtggtggaaaattgtgcaagatggtggacttatcgaagtgagcagcatat

SEQ ID NO: 440765 - DNA, 3244 bp, Homo sapiens
ccagtgcattaatcagtagaattaatcagtgcatgttcctagtctgtaactaaactctgtggaagattcccctgctttcctatagtaaaggtttacgactttttcttctatctttattaagcttgtcattttcttctttttgcatggttcttacaaattatttggtcaatttcattttcagaatgttgaaacacagaatgtgcttctctcctctgactcaattagctgtttttgtttttctacagatgattcttttattaggccagtaactttttggattgttggggattttgatagcccttctggacggcagttactgtatgatgccatcaaacatcagaaatccagtaacaatgttagaataagcatgatcaataatcctgccaaagagataagctatgagaacactcagatctccagagcaatctgggcagctctccaaactcagacttccaacgctgctaagaacttcatcaccaaaatggccaaggagggggctgcagaggccctggctgcaggagctgacattgcggagttctctgttgggggaatggatttcagtctttttaaagaggtctttgagtcttccaaaatggatttcattttgtctcatgccgtgtactgcagggatgttctgaagctgaagaagggacagagggcagtgatcagcaatggaaggatcattgggccactggaggatagtgagctctttaatcaagacgatttccacctcctcgaaaatatcatcttaaaaacctcaggacagaaaataaaatctcatattcaacagcttcgggtagaagaagatgtggcaagcgacttggtaatgaaggtggatgctcttctgtcagcgcaaccaaaaggagatccaagaatcgagtaccagttttttgaagacagacacagtgcaatcaaactgaggccgaaggaaggggagacatactttgatgttgtggctgtcgttgaccctgtcaccagagaagcacagagacttgctcctttgctcttggttttggctcagctgataaacatgaatctgagagtatttatgaactgccaatccaaactttctgacatgcctttaaaaagcttttaccgttatgtcttagaaccagagatttctttcacttcagacaatagttttgctaagggtccaatcgcaaaatttttggatatgcctcagtctccactgttcactctgaatttgaacacacctgagagctggatggtagaatctgtcagaacaccatatgatcttgataatatttatttagaagaggtggacagtgtagtggctgctgagtatgagctggaatacctgttactggaaggtcattgctacgacatcaccacaggccagcctccacggggactacagtttaccttaggaacttcagccaacccggtcattgtggacaccattgttatggccaatctgggctactttcagctgaaagccaacccaggagcttggatcctcagacttaggaagggacgctctgaagatatttatagaatttacagccacgatggcaccgattctccccctgatgctgatgaggtggttatcgtcctcaacaacttcaaaagcaaaattattaaagtgaaggttcagaagaaggcagatatggtgaacgaagacttgctgagtgatggaacgagtgagaatgaatctggattttgggattccttcaaatggggctttacaggacagaagactgaggaagtgaagcaagataaagatgacataattaatattttctccgttgcatctggtcatctctacgaaagatttcttcgcataatgatgctatccgtgctgaagaataccaagactcctgtgaaattctggttcttgaagaattacttgtcccccacatttaaggagtttataccttacatggcaaatgaatacaatttccagtatgagcttgttcagtacaaatggccccggtggcttcatcaacaaactgaaaaacagcgtatcatctggggttacaagatcctcttcctggatgtacttttcccactagttgttgacaagttcctgtttgtggatgctgatcagattgtacgaacagatctgaaagagttaagagatttcaatttggatggtgctccttatggttacactcctttctgtgacagccgaagagaaatggacggctacaggttctggaagtcagggtactgggccagtcatttagccgggcgaaagtatcatatcagtgcactatatgttgtggatctgaagaagtttaggaaaatagctgctggtgacagactcaggggacagtaccaaggtctgagtcaggaccctaacagcctttcaaatcttgatcaagatctgcccaataacatgattcatcaggtgccaattaaatccctccctcaagaatggctttggtgtgaaacgtggtgtgatgacgcctctaagaaaagggcaaaaaccattgatttgtgtaataatccgatgaccaaagagccgaaactggaagcagctgtgcggattgtcccggagtggcaggactacgaccaagagatcaaacagctacagatccgctttcagaaggagaaagaaacgggagcactgtacaaagagaagacaaaagaaccaagccgagaaggtcctcagaaacgtgaagaattatgatctctggagaaggacaggaaatcaccccatttgaaaaacagtttttataataaatgctagttttttctgatctgtctatacaactgctgataagccggctgggcaggagtgccacaccttttgattctgagcatttgattctgacttctgtactctggtggccactggatctttgggattaaagctctgttggatttgtacctcagaggaagaccaagtggctgatcctttggactctgtaaagagcattcttctagtcagagggtggaatggcagcagcaactggaagaaaatgagttttttggtgcccacacccaagagcacacacatgctgcactgtctcggaaagcagggccagctagagccaccatgttcttccttacctcagtttacctgcggcctgcgctgcactgcagatgcccaccctgccctgggtctggccggcggaagctctgtccaaggtccacacacctccaggtttacgccaacatccttgtgccctccccaccttctcttccaacgcattaggtgcattgtttaattgaaatccaaccaacatgaccaaaaaccaaaagtgcattcaaccttacc

SEQ ID NO: 440766 - DNA, 2767 bp, Homo sapiens
ccagtgcattaatcagtagaattaatcagtgcatgttcctagtctgtaactaaactctgtggaagattcccctgctttcctatagtaaaggtttacgactttttcttctatctttattaagcttgtcattttcttctttttgcatggttcttacaaattatttggtcaatttcattttcagaatgttgaaacacagaatgtgcttctctcctctgactcaattagctgtttttgtttttctacagatgattcttttattaggccagtaactttttggattgttggggattttgatagcccttctggacggcagttactgtatgatgccatcaaacatcagaaatccagtaacaatgttagaataagcatgatcaataatcctgccaaagagataagctatgagaacactcagatctccagagcaatctgggcagctctccaaactcagacttccaacgctgctaagaacttcatcaccaaaatggccaaggagggggctgcagaggccctggctgcaggagctgacattgcggagttctctgttgggggaatggatttcagtctttttaaagaggtctttgagtcttccaaaatggatttcattttgtctcatgccgtgtactgcagggatgttctgaagctgaagaagggacagagggcagtgatcagcaatggaaggatcattgggccactggaggatagtgagctctttaatcaagacgatttccacctcctcgaaaatatcatcttaaaaacctcaggacagaaaataaaatctcatattcaacagcttcgggtagaagaagatgtggcaagcgacttggtaatgaaggtggatgctcttctgtcagcgcaaccaaaaggagatccaagaatcgagtaccagttttttgaagacagacacagtgcaatcaaactgaggccgaaggaaggggagacatactttgatgttgtggctgtcgttgaccctgtcaccagagaagcacagagacttgctcctttgctcttggttttggctcagctgataaacatgaatctgagagtatttatgaactgccaatccaaactttctgacatgcctttaaaaagcttttaccgttatgtcttagaaccagagatttctttcacttcagacaatagttttgctaagggtccaatcgcaaaatttttggatatgcctcagtctccactgttcactctgaatttgaacacacctgagagctggatggtagaatctgtcagaacaccatatgatcttgataatatttatttagaagaggtggacagtgtagtggctgctgagtatgagctggaatacctgttactggaaggtcattgctacgacatcaccacaggccagcctccacggggactacagtttaccttaggaacttcagccaacccggtcattgtggacaccattgttatggccaatctgggctactttcagctgaaagccaacccaggagcttggatcctcagacttaggaagggacgctctgaagatatttatagaatttacagccacgatggcaccgattctccccctgatgctgatgaggtggttatcgtcctcaacaacttcaaaagcaaaattattaaagtgaaggttcagaagaaggcagatatggtgaacgaagacttgctgagtgatggaacgagtgagaatgaatctggattttgggattccttcaaatggggctttacaggacagaagactgaggaagtgaagcaagataaagatgacataattaatattttctccgttgcatctggtcatctctacgaaagatttcttcgcataatgatgctatccgtgctgaagaataccaagactcctgtgaaattctggttcttgaagaattacttgtcccccacatttaaggagtttataccttacatggcaaatgaatacaatttccagtatgagcttgttcagtacaaatggccccggtggcttcatcaacaaactgaaaaacagcgtatcatctggggttacaagatcctcttcctggatgtacttttcccactagttgttgacaagttcctgtttgtggatgctgatcagattgtacgaacagatctgaaagagttaagagatttcaatttggatggtgctccttatggttacactcctttctgtgacagccgaagagaaatggacggctacaggttctggaagtcagggtactgggccagtcatttagccgggcgaaagtatcatatcagtgcactatatgttgtggatctgaagaagtttaggaaaatagctgctggtgacagactcaggggacagtaccaaggtctgagtcaggaccctaacagcctttcaaatcttgatcaagatctgcccaataacatgattcatcaggtgccaattaaatccctccctcaagaatggctttggtgtgaaacgtggtgtgatgacgcctctaagaaaagggcaaaaaccattgatttgtaatccgatgacccaagagccgaaactggaaacaccggtgtttccctttgtcttcttctttttaacattttaggttagagatattacttaaaaacagtgttaccaggaaaaagaactaaagacgactaactcttaaagataactttaatgagttgaaatgaatagcttaatttctatcaccacttcagaaatatatatagtttttatctgtttttactgtcttttttgttttgttttgtttttacaggcatcccaccatgcctggctaattttgtatttttagagacaaaggaatcaccggtccgc

SEQ ID NO: 440767 - DNA, 2786 bp, Homo sapiens
ccagtgcattaatcagtagaattaatcagtgcatgttcctagtctgtaactaaactctgtggaagattcccctgctttcctatagtaaaggtttacgactttttcttctatctttattaagcttgtcattttcttctttttgcatggttcttacaaattatttggtcaatttcattttcagaatgttgaaacacagaatgtgcttctctcctctgactcaattagctgtttttgtttttctacagatgattcttttattaggccagtaactttttggattgttggggattttgatagcccttctggacggcagttactgtatgatgccatcaaacatcagaaatccagtaacaatgttagaataagcatgatcaataatcctgccaaagagataagctatgagaacactcagatctccagagcaatctgggcagctctccaaactcagacttccaacgctgctaagaacttcatcaccaaaatggccaaggagggggctgcagaggccctggctgcaggagctgacattgcggagttctctgttgggggaatggatttcagtctttttaaagaggtctttgagtcttccaaaatggatttcattttgtctcatgccgtgtactgcagggatgttctgaagctgaagaagggacagagggcagtgatcagcaatggaaggatcattgggccactggaggatagtgagctctttaatcaagacgatttccacctcctcgaaaatatcatcttaaaaacctcaggacagaaaataaaatctcatattcaacagcttcgggtagaagaagatgtggcaagcgacttggtaatgaaggtggatgctcttctgtcagcgcaaccaaaaggagatccaagaatcgagtaccagttttttgaagacagacacagtgcaatcaaactgaggccgaaggaaggggagacatactttgatgttgtggctgtcgttgaccctgtcaccagagaagcacagagacttgctcctttgctcttggttttggctcagctgataaacatgaatctgagagtatttatgaactgccaatccaaactttctgacatgcctttaaaaagcttttaccgttatgtcttagaaccagagatttctttcacttcagacaatagttttgctaagggtccaatcgcaaaatttttggatatgcctcagtctccactgttcactctgaatttgaacacacctgagagctggatggtagaatctgtcagaacaccatatgatcttgataatatttatttagaagaggtggacagtgtagtggctgctgagtatgagctggaatacctgttactggaaggtcattgctacgacatcaccacaggccagcctccacggggactacagtttaccttaggaacttcagccaacccggtcattgtggacaccattgttatggccaatctgggctactttcagctgaaagccaacccaggagcttggatcctcagacttaggaagggacgctctgaagatatttatagaatttacagccacgatggcaccgattctccccctgatgctgatgaggtggttatcgtcctcaacaacttcaaaagcaaaattattaaagtgaaggttcagaagaaggcagatatggtgaacgaagacttgctgagtgatggaacgagtgagaatgaatctggattttgggattccttcaaatggggctttacaggacagaagactgaggaagtgaagcaagataaagatgacataattaatattttctccgttgcatctggtcatctctacgaaagatttcttcgcataatgatgctatccgtgctgaagaataccaagactcctgtgaaattctggttcttgaagaattacttgtcccccacatttaaggagtttataccttacatggcaaatgaatacaatttccagtatgagcttgttcagtacaaatggccccggtggcttcatcaacaaactgaaaaacagcgtatcatctggggttacaagatcctcttcctggatgtacttttcccactagttgttgacaagttcctgtttgtggatgctgatcagattgtacgaacagatctgaaagagttaagagatttcaatttggatggtgctccttatggttacactcctttctgtgacagccgaagagaaatggacggctacaggttctggaagtcagggtactgggccagtcatttagccgggcgaaagtatcatatcaggatctgcccaataacatgattcatcaggtgccaattaaatccctccctcaagaatggctttggtgtgaaacgtggtgtgatgacgcctctaagaaaagggcaaaaaccattgatttgtaagccgtatgtggtgtgcttctgcatgttcatccactggatgttgtaataatccgatgaccaaagagccgaaactggaagcagctgtgcggattgtcccggagtggcaggactacgaccaagagatcaaacagctacagatccgctttcagaaggagaaagaaacgggagcactgtacaaagagaagacaaaagaaccaagccgagaaggtcctcagaaacgtgaagaattatgatctctggagaaggacaggaaatcaccccatttgaaaaacagtttttataataaatgctagttttttctgatctgtctatacaactgctgataagccggctgggcaggagtgccacaccttttgattctgagcatttgattctgacttctgtactctggtggccactggatctttgggattaaagctctgttggatttgtacctc

SEQ ID NO: 440768 - DNA, 456 bp, Homo sapiens
ccatcaataggatcaatgactcccataaaaccctcagtaatagaagttctagtccattacaaagcaactcacacagtactatgataaccaatgtccataggtcccaatccaggactgctacaggccccccaaaactgacttgtaatccctgtgaatcccagacttgcaatcattcaccaccttagcaccccaatcaataaactctcatggactgaatcgatgacctcagatactgacatttccaacacttccaggcagaaccaacacgtcatttacaaggaaaagggatcacaatggcactagatttatttgcaacaacagaagccatgttagaagaaaactctacaaatcattgagacagaaggactgacatccaagaattctaaacctgccctagctagataccattcttttgtcagagcaaaagaaagacaattttagccgggcgcggtggct

SEQ ID NO: 440769 - DNA, 1498 bp, Homo sapiens
cctttccatagtattaagtatgtctttggcccacttgtagtttctcaagaaagcatgttgatacggacagcccctactctcatatatggtgtattgaccttaggcaagagatgtggtttctctgagctccagatatgtcatctataaaattggtgttaacaccgtttatctcatagggtgctaagaagattaaagtactgcccagagtaggcactcagtcaagttctctttcctctcctgatacctacccccatcctttcctctaggttgcatatagttctttactcccaaaggagatcacagtagatagaaaatcccatgaatgtccttgctcttcgttgttacctccctccccctctatcccccacacataatgccttagatattcagtaggttttattgattagaggtgaacttatttggaaggaataaaaagacaaagcaggagaatggtcaagaacatgagttttagagtgagacacttgagtttgaaatccagcccaaccatttactagttgtgtgacctctatcaagttatgcaacctctctgtgcctcagtttcctttttggcaaattggtgctaacacctcacaggactattgtaaggattaagttcatgtagataaagcacttaacacagcatccgacacatctcatcactcaataaattatcactgccctttgttactgtggttaacaaacacttgctgtaatttctctcttctaacttataggacaaacaaataatggaaatttttaacataagtatgtagagattgtggtaccacagtgataaactgatttttatgcttaagttaatgactctggtttatgtatgacaatttattcagtatgagaatctcagaaaactaatgtttttttctattccttaaccttcctaccctttttttggtaaagaaaattaccgaaaaaacaaaaaacaaaaaaaaaactacctctgtctatttatttattccattttaatctcatggcttgaaatctgaaaaattggagttgctgtaagagattggtggatgtctttttgccctcatggtgatgtattcttttacagcttttatcattgaccagaattttaaggcctgcttattttaaaaaacgaaaaccagtgttctttatgataataagcttaaaataatagaaatactttttaaaatagtatggggagagctcattgtcagtgaatatagatcattcttgttgatacccttctttgaatattctagtgtattaatataccattgtttatttaatcatgtcttattaatggactggctgttttcacatatttgatatatcaagtgtcttcacaacttgtgcttgcatattctttcccaaaatattgaaagtccatatatttccttgtacatttttaaagttgatatctaaatctttcattgtagttgcaaagcatgtaatttcttgggggaggggggctgtaaatattgacattttaaaataaaacttttaaatcagcctt

SEQ ID NO: 440770 - DNA, 1210 bp, Homo sapiens
tatggataaaggataataccgtttacacaatgaatattacttaactggcgggaaatactccctccccctctatcccccacacataatgccttagatattcagtaggttttattgattagaggtgaacttatttggaaggaataaaaagacaaagcaggagaatggtcaagaacatgagttttagagtgagacacttgagtttgaaatccagcccaaccatttactagttgtgtgacctctatcaagttatgcaacctctctgtgcctcagtttcctttttggcaaattggtgctaacacctcacaggactattgtaaggattaagttcatgtagataaagcacttaacacagcatccgacacatctcatcactcaataaattatcactgccctttgttactgtggttaacaaacacttgctgtaatttctctcttctaacttataggacaaacaaataatggaaatttttaacataagtatgtagagattgtggtaccacagtgataaactgatttttatgcttaagttaatgactctggtttatgtatgacaatttattcagtatgagaatctcagaaaactaatgtttttttctattccttaaccttcctaccctttttttggtaaagaaaattaccgaaaaaacaaaaaacaaaaaaaaaactacctctgtctatttatttattccattttaatctcatggcttgaaatctgaaaaattggagttgctgtaagagattggtggatgtctttttgccctcatggtgatgtattcttttacagcttttatcattgaccagaattttaaggcctgcttattttaaaaaacgaaaaccagtgttctttatgataataagcttaaaataatagaaatactttttaaaatagtatggggagagctcattgtcagtgaatatagatcattcttgttgatacccttctttgaatattctagtgtattaatataccattgtttatttaatcatgtcttattaatggactggctgttttcacatatttgatatatcaagtgtcttcacaacttgtgcttgcatattctttcccaaaatattgaaagtccatatatttccttgtacatttttaaagttgatatctaaatctttcattgtagttgcaaagcatgtaatttcttgggggaggggggctgtaaatattgacattttaaaataaaacttttaaatcagcctt

SEQ ID NO: 440771 - DNA, 4789 bp, Homo sapiens
cccgcggttggacgcggcgctcagttgccgggcgggggagggcgcgtccggtttttctcaggggacgttgaaattatttttgtaacgggagtcgggagaggacggggcgtgccccgacgtgcgcgcgcgtcgtcctccccggcgctcctccacagctcgctggctcccgccgcggaaaggcgtcatgccgcccaaaaccccccgaaaaacggccgccaccgccgccgctgccgccgcggaacccccggcaccgccgccgccgccccctcctgaggaggacccagagcaggacagcggcccggaggacctgcctctcgtcaggcttgagtttgaagaaacagaagaacctgattttactgcattatgtcagaaattaaagataccagatcatgtcagagagagagcttggttaacttgggagaaagtttcatctgtggatggagtattgggaggttatattcaaaagaaaaaggaactgtggggaatctgtatctttattgcagcagttgacctagatgagatgtcgttcacttttactgagctacagaaaaacatagaaatcagtgtccataaattctttaacttactaaaagaaattgataccagtaccaaagttgataatgctatgtcaagactgttgaagaagtatgatgtattgtttgcactcttcagcaaattggaaaggacatgtgaacttatatatttgacacaacccagcagttcgatatctactgaaataaattctgcattggtgctaaaagtttcttggatcacatttttattagctaaaggggaagtattacaaatggaagatgatctggtgatttcatttcagttaatgctatgtgtccttgactattttattaaactctcacctcccatgttgctcaaagaaccatataaaacagctgttatacccattaatggttcacctcgaacacccaggcgaggtcagaacaggagtgcacggatagcaaaacaactagaaaatgatacaagaattattgaagttctctgtaaagaacatgaatgtaatatagatgaggtgaaaaatgtttatttcaaaaattttataccttttatgaattctcttggacttgtaacatctaatggacttccagaggttgaaaatctttctaaacgatacgaagaaatttatcttaaaaataaagatctagatgcaagattatttttggatcatgataaaactcttcagactgattctatagacagttttgaaacacagagaacaccacgaaaaagtaaccttgatgaagaggtgaatgtaattcctccacacactccagttaggactgttatgaacactatccaacaattaatgatgattttaaattcagcaagtgatcaaccttcagaaaatctgatttcctattttaacaactgcacagtgaatccaaaagaaagtatactgaaaagagtgaaggatataggatacatctttaaagagaaatttgctaaagctgtgggacagggttgtgtcgaaattggatcacagcgatacaaacttggagttcgcttgtattaccgagtaatggaatccatgcttaaatcagaagaagaacgattatccattcaaaattttagcaaacttctgaatgacaacatttttcatatgtctttattggcgtgcgctcttgaggttgtaatggccacatatagcagaagtacatctcagaatcttgattctggaacagatttgtctttcccatggattctgaatgtgcttaatttaaaagcctttgatttttacaaagtgatcgaaagttttatcaaagcagaaggcaacttgacaagagaaatgataaaacatttagaacgatgtgaacatcgaatcatggaatcccttgcatggctctcagattcacctttatttgatcttattaaacaatcaaaggaccgagaaggaccaactgatcaccttgaatctgcttgtcctcttaatcttcctctccagaataatcacactgcagcagatatgtatctttctcctgtaagatctccaaagaaaaaaggttcaactacgcgtgtaaattctactgcaaatgcagagacacaagcaacctcagccttccagacccagaagccattgaaatctacctctctttcactgttttataaaaaagtgtatcggctagcctatctccggctaaatacactttgtgaacgccttctgtctgagcacccagaattagaacatatcatctggacccttttccagcacaccctgcagaatgagtatgaactcatgagagacaggcatttggaccaaattatgatgtgttccatgtatggcatatgcaaagtgaagaatatagaccttaaattcaaaatcattgtaacagcatacaaggatcttcctcatgctgttcaggagacattcaaacgtgttttgatcaaagaagaggagtatgattctattatagtattctataactcggtcttcatgcagagactgaaaacaaatattttgcagtatgcttccaccaggccccctaccttgtcaccaatacctcacattcctcgaagcccttacaagtttcctagttcacccttacggattcctggagggaacatctatatttcacccctgaagagtccatataaaatttcagaaggtctgccaacaccaacaaaaatgactccaagatcaagaatcttagtatcaattggtgaatcattcgggacttctgagaagttccagaaaataaatcagatggtatgtaacagcgaccgtgtgctcaaaagaagtgctgaaggaagcaaccctcctaaaccactgaaaaaactacgctttgatattgaaggatcagatgaagcagatggaagtaaacatctcccaggagagtccaaatttcagcagaaactggcagaaatgacttctactcgaacacgaatgcaaaagcagaaaatgaatgatagcatggatacctcaaacaaggaagagaaatgaggatctcaggaccttggtggacactgtgtacacctctggattcattgtctctcacagatgtgactgtataactttcccaggttctgtttatggccacatttaatatcttcagctctttttgtggatataaaatgtgcagatgcaattgtttgggtgattcctaagccacttgaaatgttagtcattgttatttatacaagattgaaaatcttgtgtaaatcctgccatttaaaaagttgtagcagattgtttcctcttccaaagtaaaattgctgtgctttatggatagtaagaatggccctagagtgggagtcctgataacccaggcctgtctgactactttgccttcttttgtagcatataggtgatgtttgctcttgtttttattaatttatatgtatatttttttaatttaacatgaacacccttagaaaatgtgtcctatctatcttccaaatgcaatttgattgactgcccattcaccaaaattatcctgaactcttctgcaaaaatggatattattagaaattagaaaaaaattactaattttacacattagattttattttactattggaatctgatatactgtgtgcttgttttataaaattttgcttttaattaaataaaagctggaagcaaagtataaccatatgatactatcatactactgaaacagatttcatacctcagaatgtaaaagaacttactgattattttcttcatccaacttatgtttttaaatgaggattattgatagtactcttggtttttataccattcagatcactgaatttataaagtacccatctagtacttgaaaaagtaaagtgttctgccagatcttaggtatagaggaccctaacacagtatatcccaagtgcactttctaatgtttctgggtcctgaagaattaagatacaaattaattttactccataaacagactgttaattataggagccttaatttttttttcatagagatttgtctaattgcatctcaaaattattctgccctccttaatttgggaaggtttgtgttttctctggaatggtacatgtcttccatgtatcttttgaactggcaattgtctatttatcttttatttttttaagtcagtatggtctaacactggcatgttcaaagccacattatttctagtccaaaattacaagtaatcaagggtcattatgggttaggcattaatgtttctatctgattttgtgcaaaagcttcaaattaaaacagctgcattagaaaaagaggcgcttctccccttcccctacacctaaaggtgtatttaaactatcttgtgtgattaacttatttagagatgctgtaacttaaaataggggatatttaaggtagcttcagctagcttttaggaaaatcactttgtctaactcagaattatttttaaaaagaaatctggtcttgttagaaaacaaaattttattttgtgctcatttaagtttcaaacttactattttgacagttattttgataacaatgacactagaaaacttgactccatttcatcattgtttctgcatgaatatcatacaaatcagttagtttttaggtcaagggcttactatttctgggtcttttgctactaagttcacattagaattagtgccagaattttaggaacttcagagatcgtgtattgagatttcttaaataatgcttcagatattattgctttattgcttttttgtattggttaaaactgtacatttaaaattgctatgttactattttctacaattaatagtttgtctattttaaaataaattagttgttaagagtctt

SEQ ID NO: 440772 - DNA, 636 bp, Homo sapiens
cccgcggttggacgcggcgctcagttgccgggcgggggagggcgcgtccggtttttctcaggggacgttgaaattatttttgtaacgggagtcgggagaggacggggcgtgccccgacgtgcgcgcgcgtcgtcctccccggcgctcctccacagctcgctggctcccgccgcggaaaggcgtcatgccgcccaaaaccccccgaaaaacggccgccaccgccgccgctgccgccgcggaacccccggcaccgccgccgccgccccctcctgaggaggacccagagcaggacagcggcccggaggacctgcctctcgtcaggcttgagtttgaagaaacagaagaacctgattttactgcattatgtcagaaattaaagataccagatcatgtcagagagagagcttggttaacttgggagaaagtttcatctgtggatggagtattggtactccgctcacctgttttcaaaccatggttgaccatgggaaactgaaactgtggaaagtgaaaccgtggatatggaatgactgatgtaatcacttcttattgtatagatgtatcaaaatatcacattgaacaccttaaatataaactttttcgtttgtcaattgtacctccataaagctggaaaaa

SEQ ID NO: 440773 - DNA, 502 bp, Homo sapiens
  misc_feature (502)..(502): n is a, c, g, or t
ggaggaagaatgtgagctgcatgggaaaagacaggaggatttacaaagagtgggtgtttaattggggatggaattaggtagttattctgatttttagatttttcatatcttttatttggtccaatgaagcagaaaatttaaatgaagttattacctttgcctgatttttgacacacctcaaactataacttgaggttgctaactatgaaacactggcatttaatgatttaaagtaaagaattctgtaatttgtagacttctgagaagttccagaaaataaatcagatggtatgtaacagcgaccgtgtgctcaaaagaagtgctgaaggaagcaaccctcctaaaccactgaaaaaactacgctttgatattgaaggatcagatgaagcagatggaagtaaacatctcccaggagagtccaaatttcagcagaaactggcagaaatgacttttactctaacacgattgcataagcagtgacctttgtggacactgcgtaccn

SEQ ID NO: 440774 - DNA, 4416 bp, Homo sapiens
gcagttcgatatctactgaaataaattctgcattggtgctaaaagtttcttggatcacatttttattagctaaagggaggttatattcaaaagaaaaaggaactgtggggaatctgtatctttattgcagcagttgacctagatgagatgtcgttcacttttactgagctacagaaaaacatagaaatcagtgtccataaattctttaacttactaaaagaaattgataccagtaccaaagttgataatgctatgtcaagactgttgaagaagtatgatgtattgtttgcactcttcagcaaattggaaaggacatgtgaacttatatatttgacacaacccagcagttcgatatctactgaaataaattctgcattggtgctaaaagtttcttggatcacatttttattagctaaaggggaagtattacaaatggaagatgatctggtgatttcatttcagttaatgctatgtgtccttgactattttattaaactctcacctcccatgttgctcaaagaaccatataaaacagctgttatacccattaatggttcacctcgaacacccaggcgaggtcagaacaggagtgcacggatagcaaaacaactagaaaatgatacaagaattattgaagttctctgtaaagaacatgaatgtaatatagatgaggtgaaaaatgtttatttcaaaaattttataccttttatgaattctcttggacttgtaacatctaatggacttccagaggttgaaaatctttctaaacgatacgaagaaatttatcttaaaaataaagatctagatgcaagattatttttggatcatgataaaactcttcagactgattctatagacagttttgaaacacagagaacaccacgaaaaagtaaccttgatgaagaggtgaatgtaattcctccacacactccagttaggactgttatgaacactatccaacaattaatgatgattttaaattcagcaagtgatcaaccttcagaaaatctgatttcctattttaacaactgcacagtgaatccaaaagaaagtatactgaaaagagtgaaggatataggatacatctttaaagagaaatttgctaaagctgtgggacagggttgtgtcgaaattggatcacagcgatacaaacttggagttcgcttgtattaccgagtaatggaatccatgcttaaatcagaagaagaacgattatccattcaaaattttagcaaacttctgaatgacaacatttttcatatgtctttattggcgtgcgctcttgaggttgtaatggccacatatagcagaagtacatctcagaatcttgattctggaacagatttgtctttcccatggattctgaatgtgcttaatttaaaagcctttgatttttacaaagtgatcgaaagttttatcaaagcagaaggcaacttgacaagagaaatgataaaacatttagaacgatgtgaacatcgaatcatggaatcccttgcatggctctcagattcacctttatttgatcttattaaacaatcaaaggaccgagaaggaccaactgatcaccttgaatctgcttgtcctcttaatcttcctctccagaataatcacactgcagcagatatgtatctttctcctgtaagatctccaaagaaaaaaggttcaactacgcgtgtaaattctactgcaaatgcagagacacaagcaacctcagccttccagacccagaagccattgaaatctacctctctttcactgttttataaaaaagtgtatcggctagcctatctccggctaaatacactttgtgaacgccttctgtctgagcacccagaattagaacatatcatctggacccttttccagcacaccctgcagaatgagtatgaactcatgagagacaggcatttggaccaaattatgatgtgttccatgtatggcatatgcaaagtgaagaatatagaccttaaattcaaaatcattgtaacagcatacaaggatcttcctcatgctgttcaggagacattcaaacgtgttttgatcaaagaagaggagtatgattctattatagtattctataactcggtcttcatgcagagactgaaaacaaatattttgcagtatgcttccaccaggccccctaccttgtcaccaatacctcacattcctcgaagcccttacaagtttcctagttcacccttacggattcctggagggaacatctatatttcacccctgaagagtccatataaaatttcagaaggtctgccaacaccaacaaaaatgactccaagatcaagaatcttagtatcaattggtgaatcattcgggacttctgagaagttccagaaaataaatcagatggtatgtaacagcgaccgtgtgctcaaaagaagtgctgaaggaagcaaccctcctaaaccactgaaaaaactacgctttgatattgaaggatcagatgaagcagatggaagtaaacatctcccaggagagtccaaatttcagcagaaactggcagaaatgacttctactcgaacacgaatgcaaaagcagaaaatgaatgatagcatggatacctcaaacaaggaagagaaatgaggatctcaggaccttggtggacactgtgtacacctctggattcattgtctctcacagatgtgactgtataactttcccaggttctgtttatggccacatttaatatcttcagctctttttgtggatataaaatgtgcagatgcaattgtttgggtgattcctaagccacttgaaatgttagtcattgttatttatacaagattgaaaatcttgtgtaaatcctgccatttaaaaagttgtagcagattgtttcctcttccaaagtaaaattgctgtgctttatggatagtaagaatggccctagagtgggagtcctgataacccaggcctgtctgactactttgccttcttttgtagcatataggtgatgtttgctcttgtttttattaatttatatgtatatttttttaatttaacatgaacacccttagaaaatgtgtcctatctatcttccaaatgcaatttgattgactgcccattcaccaaaattatcctgaactcttctgcaaaaatggatattattagaaattagaaaaaaattactaattttacacattagattttattttactattggaatctgatatactgtgtgcttgttttataaaattttgcttttaattaaataaaagctggaagcaaagtataaccatatgatactatcatactactgaaacagatttcatacctcagaatgtaaaagaacttactgattattttcttcatccaacttatgtttttaaatgaggattattgatagtactcttggtttttataccattcagatcactgaatttataaagtacccatctagtacttgaaaaagtaaagtgttctgccagatcttaggtatagaggaccctaacacagtatatcccaagtgcactttctaatgtttctgggtcctgaagaattaagatacaaattaattttactccataaacagactgttaattataggagccttaatttttttttcatagagatttgtctaattgcatctcaaaattattctgccctccttaatttgggaaggtttgtgttttctctggaatggtacatgtcttccatgtatcttttgaactggcaattgtctatttatcttttatttttttaagtcagtatggtctaacactggcatgttcaaagccacattatttctagtccaaaattacaagtaatcaagggtcattatgggttaggcattaatgtttctatctgattttgtgcaaaagcttcaaattaaaacagctgcattagaaaaagaggcgcttctccccttcccctacacctaaaggtgtatttaaactatcttgtgtgattaacttatttagagatgctgtaacttaaaataggggatatttaaggtagcttcagctagcttttaggaaaatcactttgtctaactcagaattatttttaaaaagaaatctggtcttgttagaaaacaaaattttattttgtgctcatttaagtttcaaacttactattttgacagttattttgataacaatgacactagaaaacttgactccatttcatcattgtttctgcatgaatatcatacaaatcagttagtttttaggtcaagggcttactatttctgggtcttttgctactaagttcacattagaattagtgccagaattttaggaacttcagagatcgtgtattgagatttcttaaataatgcttcagatattattgctttattgcttttttgtattggttaaaactgtacatttaaaattgctatgttactattttctacaattaatagtttgtctattttaaaataaattagttgttaagagtctt

SEQ ID NO: 440775 - DNA, 5522 bp, Homo sapiens
cccgcggttggacgcggcgctcagttgccgggcgggggagggcgcgtccggtttttctcaggggacgttgaaattatttttgtaacgggagtcgggagaggacggggcgtgccccgacgtgcgcgcgcgtcgtcctccccggcgctcctccacagctcgctggctcccgccgcggaaaggcgtcatgccgcccaaaaccccccgaaaaacggccgccaccgccgccgctgccgccgcggaacccccggcaccgccgccgccgccccctcctgaggaggacccagagcaggacagcggcccggaggacctgcctctcgtcaggcttgagtttgaagaaacagaagaacctgattttactgcattatgtcagaaattaaagataccagatcatgtcagagagagagcttggttaacttgggagaaagtttcatctgtggatggagtattgggaggttatattcaaaagaaaaaggaactgtggggaatctgtatctttattgcagcagttgacctagatgagatgtcgttcacttttactgagctacagaaaaacatagaaatcagtgtccataaattctttaacttactaaaagaaattgataccagtaccaaagttgataatgctatgtcaagactgttgaagaagtatgatgtattgtttgcactcttcagcaaattggaaaggacatgtgaacttatatatttgacacaacccagcagttcgatatctactgaaataaattctgcattggtgctaaaagtttcttggatcacatttttattagctaaaggggaagtattacaaatggaagatgatctggtgatttcatttcagttaatgctatgtgtccttgactattttattaaactctcacctcccatgttgctcaaagaaccatataaaacagctgttatacccattaatggttcacctcgaacacccaggcgaggtcagaacaggagtgcacggatagcaaaacaactagaaaatgatacaagaattattgaagttctctgtaaagaacatgaatgtaatatagatgaggtgaaaaatgtttatttcaaaaattttataccttttatgaattctcttggacttgtaacatctaatggacttccagaggttgaaaatctttctaaacgatacgaagaaatttatcttaaaaataaagatctagatgcaagattatttttggatcatgataaaactcttcagactgattctatagacagttttgaaacacagagaacaccacgaaaaagtaaccttgatgaagaggtgaatgtaattcctccacacactccagttaggactgttatgaacactatccaacaattaatgatgattttaaattcagcaagtgatcaaccttcagaaaatctgatttcctattttaacaactgcacagtgaatccaaaagaaagtatactgaaaagagtgaaggatataggatacatctttaaagagaaatttgctaaagctgtgggacagggttgtgtcgaaattggatcacagcgatacaaacttggagttcgcttgtattaccgagtaatggaatccatgcttaaatcagaagaagaacgattatccattcaaaattttagcaaacttctgaatgacaacatttttcatatgtctttattggcgtgcgctcttgaggttgtaatggccacatatagcagaagtacatctcagaatcttgattctggaacagatttgtctttcccatggattctgaatgtgcttaatttaaaagcctttgatttttacaaagtgatcgaaagttttatcaaagcagaaggcaacttgacaagagaaatgataaaacatttagaacgatgtgaacatcgaatcatggaatcccttgcatggctctcagattcacctttatttgatcttattaaacaatcaaaggaccgagaaggaccaactgatcaccttgaatctgcttgtcctcttaatcttcctctccagaataatcacactgcagcagatatgtatctttctcctgtaagatctccaaagaaaaaaggttcaactacgcgtgtaaattctactgcaaatgcagagacacaagcaacctcagccttccagacccagaagccattgaaatctacctctctttcactgttttataaaaaagtgtatcggctagcctatctccggctaaatacactttgtgaacgccttctgtctgagcacccagaattagaacatatcatctggacccttttccagcacaccctgcagaatgagtatgaactcatgagagacaggcatttggaccaaattatgatgtgttccatgtatggcatatgcaaagtgaagaatatagaccttaaattcaaaatcattgtaacagcatacaaggatcttcctcatgctgttcaggagacattcaaacgtgttttgatcaaagaagaggagtatgattctattatagtattctataactcggtcttcatgcagagactgaaaacaaatattttgcagtatgcttccaccaggccccctaccttgtcaccaatacctcacattcctcgaagcccttacaagtttcctagttcacccttacggattcctggagggaacatctatatttcacccctgaagagtccatataaaatttcagaaggtctgccaacaccaacaaaaatgactccaagatcaagaatcttagtatcaattggtgaatcattcgggacttctgagaagttccagaaaataaatcagatggtatgtaacagcgaccgtgtgctcaaaagaagtgctgaaggaagcaaccctcctaaaccactgaaaaaactacgctttgatattgaaggatcagatgaagcagatggaagtaaacatctcccaggagagtccaaatttcagcagaaactggcagaaatgacttctactcgaacacgaatgcaaaagcagaaaatgaatgatagcatggatacctcaaacaaggaagagaaatgaggatctcaggaccttggtggacactgtgtacacctctggattcattgtctctcacagatgtgactgtataactttcccaggttctgtttatggccacatttaatatcttcagctctttttgtggatataaaatgtgcagatgcaattgtttgggtgattcctaagccacttgaaatgttagtcattgttatttatacaagattgaaaatcttgtgtaaatcctgccatttaaaaagttgtagcagattgtttcctcttccaaagtaaaattgctgtgctttatggatagtaagaatggccctagagtgggagtcctgataacccaggcctgtctgactactttgccttcttttgtagcatataggtgatgtttgctcttgtttttattaatttatatgtatatttttttaatttaacatgaacacccttagaaaatgtgtcctatctatcttccaaatgcaatttgattgactgcccattcaccaaaattatcctgaactcttctgcaaaaatggatattattagaaattagaaaaaaattactaattttacacattagattttattttactattggaatctgatatactgtgtgcttgttttataaaattttgcttttaattaaataaaagctggaagcaaagtataaccatatgatactatcatactactgaaacagatttcatacctcagaatgtaaaagaacttactgattattttcttcatccaacttatgtttttaaatgaggattattgatagtactcttggtttttataccattcagatcactgaatttataaagtacccatctagtacttgaaaaagtaaagtgttctgccagatcttaggtatagaggaccctaacacagtatatcccaagtgcactttctaatgtttctgggtcctgaagaattaagatacaaattaattttactccataaacagactgttaattataggagccttaatttttttttcatagagatttgtctaattgcatctcaaaattattctgccctccttaatttgggaaggtttgtgttttctctggaatggtacatgtcttccatgtatcttttgaactggcaattgtctatttatcttttatttttttaagtcagtatggtctaacactggcatgttcaaagccacattatttctagtccaaaattacaagtaatcaagggtcattatgggttaggcattaatgtttctatctgattttgtgcaaaagcttcaaattaaaacagctgcattagaaaaagaggcgcttctccccttcccctacacctaaaggtgtatttaaactatcttgtgtgattaacttatttagagatgctgtaacttaaaataggggatatttaaggtagcttcagctagcttttaggaaaatcactttgtctaactcagaattatttttaaaaagaaatctggtcttgttagaaaacaaaattttattttgtgctcatttaagtttcaaacttactattttgacagttattttgataacaatgacactagaaaacttgactccatttcatcattgtttctgcatgaatatcatacaaatcagttagtttttaggtcaagggcttactatttctgggtcttttgctactaagttcacattagaattagtgccagaattttaggaacttcagagatcgtgtattgagatttcttaaataatgcttcagatattattgctttattgcttttttgtattggttaaaactgtacatttaaaattgctatgttactattttctacaattaatagtttgtctattttaaaataaattagttgttaagagtcttaaaaaaaaaaaaaaaaaaaaaaaaaaaaaaaaaaaaaaaaaaaaaaaaaaaaaaaaaaaaaaaaaaaaaaaaaaaaaaaaaaaaaaaaaaaaaaaaaaaaaaaaaaaaaaaaaaaaaaaaaaaaagaaaaaaaaaagaacacaaaaaaaaaaacacagcggagagaaaaaataaaaaaagaaaaacaacgaaaagagaaaaaaaaaaagaaaaaacacaacaagaaaacaaaaaggagaaaaaaaacacacgaaaagaaaaaaaagagaaaagaaaaaaaaagagaaaaaaaaaagaaaaaaaaagaaaaaaaaaagacgagagaaaaaaaaaagaaaaagagagaaggaaagaaaagaaaaagaaagagaaacgagaaaaaagagagagaagagaagaaaagaggaaaaaaggagagaaaagaaaaagaaaaagagaaagaaaaaaaaagagacaggacaaagagaagaaacaaaagaaaagaaaagtgaagaaaagaaagacggacgatgaaaagagaaagaaaaggacaaaggaaaggaaagagagaaaagaagaaaaaagaaagaagaaaagagtaggaaaggagaaggaagaaagaagagaagggagaagaaaagagaagcaagaagaggaagggcagagaagagagaagaaagaaagaaagagagagaaagaaagaggaaggtaagaacaagaaaaaaggagaagtgtagcgaaaatagaaaaagaa

SEQ ID NO: 440776 - DNA, 4744 bp, Homo sapiens
cccgcggttggacgcggcgctcagttgccgggcgggggagggcgcgtccggtttttctcaggggacgttgaaattatttttgtaacgggagtcgggagaggacggggcgtgccccgacgtgcgcgcgcgtcgtcctccccggcgctcctccacagctcgctggctcccgccgcggaaaggcgtcatgccgcccaaaaccccccgaaaaacggccgccaccgccgccgctgccgccgcggaacccccggcaccgccgccgccgccccctcctgaggaggacccagagcaggacagcggcccggaggacctgcctctcgtcaggcttgagtttgaagaaacagaagaacctgattttactgcattatgtcagaaattaaagataccagatcatgtcagagagagagcttggttaacttgggagaaagtttcatctgtggatggagtattgggaggttatattcaaaagaaaaaggaactgtggggaatctgtatctttattgcagcagttgacctagatgagatgtcgttcacttttactgagctacagaaaaacatagaaatcagtgtccataaattctttaacttactaaaagaaattgataccagtaccaaagttgataatgctatgtcaagactgttgaagaagtatgatgtattgtttgcactcttcagcaaattggaaaggacatgtgaacttatatatttgacacaacccagcagttcgatatctactgaaataaattctgcattggtgctaaaagtttcttggatcacatttttattagctaaaggggaagtattacaaatggaagatgatctggtgatttcatttcagttaatgctatgtgtccttgactattttattaaactctcacctcccatgttgctcaaagaaccatataaaacagctgttatacccattaatggttcacctcgaacacccaggcgaggtcagaacaggagtgcacggatagcaaaacaactagaaaatgatacaagaattattgaagttctctgtaaagaacatgaatgtaatatagatgaggtgaaaaatgtttatttcaaaaattttataccttttatgaattctcttggacttgtaacatctaatggacttccagaggttgaaaatctttctaaacgatacgaagaaatttatcttaaaaataaagatctagatgcaagattatttttggatcatgataaaactcttcagactgattctatagacagttttgaaacacagagaacaccacgaaaaagtaaccttgatgaagaggtgaatgtaattcctccacacactccagttaggactgttatgaacactatccaacaattaatgatgattttaaattcagcaagtgatcaaccttcagaaaatctgatttcctattttaacaactgcacagtgaatccaaaagaaagtatactgaaaagagtgaaggatataggatacatctttaaagagaaatttgctaaagctgtgggacagggttgtgtcgaaattggatcacagcgatacaaacttggagttcgcttgtattaccgagtaatggaatccatgcttaaatcagaagaagaacgattatccattcaaaattttagcaaacttctgaatgacaacatttttcatatgtctttattggcgtgcgctcttgaggttgtaatggccacatatagcagaagtacatctcagaatcttgattctggaacagatttgtctttcccatggattctgaatgtgcttaatttaaaagcctttgatttttacaaagtgatcgaaagttttatcaaagcagaaggcaacttgacaagagaaatgataaaacatttagaacgatgtgaacatcgaatcatggaatcccttgcatggctctcagattcacctttatttgatcttattaaacaatcaaaggaccgagaaggaccaactgatcaccttgaatctgcttgtcctcttaatcttcctctccagaataatcacactgcagcagatatgtatctttctcctgtaagatctccaaagaaaaaaggttcaactacgcgtgtaaattctactgcaaatgcagagacacaagcaacctcagccttccagacccagaagccattgaaatctacctctctttcactgttttataaaaaagtgtatcggctagcctatctccggctaaatacactttgtgaacgccttctgtctgagcacccagaattagaacatatcatctggacccttttccagcacaccctgcagaatgagtatgaactcatgagagacaggcatttggaccaaattatgatgtgttccatgtatggcatatgcaaagtgaagaatatagaccttaaattcaaaatcattgtaacagcatacaaggatcttcctcatgctgttcaggagacattcaaacgtgttttgatcaaagaagaggagtatgattctattatagtattctataactcggtcttcatgcagagactgaaaacaaatattttgcagtatgcttccaccaggccccctaccttgtcaccaatacctcacattcctcgaagcccttacaagtttcctagttcacccttacggattcctggagggaacatctatatttcacccctgaagagtccatataaaatttcagaaggtctgccaacaccaacaaaaatgactccaagatcaagaatcttagtatcaattggtgaatcattcgggacttctgagaagttccagaaaataaatcagatggtatgtaacagcgaccgtgtgctcaaaagaagtgctgaaggaagcaaccctcctaaaccactgaataaacatctcccaggagagtccaaatttcagcagaaactggcagaaatgacttctactcgaacacgaatgcaaaagcagaaaatgaatgatagcatggatacctcaaacaaggaagagaaatgaggatctcaggaccttggtggacactgtgtacacctctggattcattgtctctcacagatgtgactgtataactttcccaggttctgtttatggccacatttaatatcttcagctctttttgtggatataaaatgtgcagatgcaattgtttgggtgattcctaagccacttgaaatgttagtcattgttatttatacaagattgaaaatcttgtgtaaatcctgccatttaaaaagttgtagcagattgtttcctcttccaaagtaaaattgctgtgctttatggatagtaagaatggccctagagtgggagtcctgataacccaggcctgtctgactactttgccttcttttgtagcatataggtgatgtttgctcttgtttttattaatttatatgtatatttttttaatttaacatgaacacccttagaaaatgtgtcctatctatcttccaaatgcaatttgattgactgcccattcaccaaaattatcctgaactcttctgcaaaaatggatattattagaaattagaaaaaaattactaattttacacattagattttattttactattggaatctgatatactgtgtgcttgttttataaaattttgcttttaattaaataaaagctggaagcaaagtataaccatatgatactatcatactactgaaacagatttcatacctcagaatgtaaaagaacttactgattattttcttcatccaacttatgtttttaaatgaggattattgatagtactcttggtttttataccattcagatcactgaatttataaagtacccatctagtacttgaaaaagtaaagtgttctgccagatcttaggtatagaggaccctaacacagtatatcccaagtgcactttctaatgtttctgggtcctgaagaattaagatacaaattaattttactccataaacagactgttaattataggagccttaatttttttttcatagagatttgtctaattgcatctcaaaattattctgccctccttaatttgggaaggtttgtgttttctctggaatggtacatgtcttccatgtatcttttgaactggcaattgtctatttatcttttatttttttaagtcagtatggtctaacactggcatgttcaaagccacattatttctagtccaaaattacaagtaatcaagggtcattatgggttaggcattaatgtttctatctgattttgtgcaaaagcttcaaattaaaacagctgcattagaaaaagaggcgcttctccccttcccctacacctaaaggtgtatttaaactatcttgtgtgattaacttatttagagatgctgtaacttaaaataggggatatttaaggtagcttcagctagcttttaggaaaatcactttgtctaactcagaattatttttaaaaagaaatctggtcttgttagaaaacaaaattttattttgtgctcatttaagtttcaaacttactattttgacagttattttgataacaatgacactagaaaacttgactccatttcatcattgtttctgcatgaatatcatacaaatcagttagtttttaggtcaagggcttactatttctgggtcttttgctactaagttcacattagaattagtgccagaattttaggaacttcagagatcgtgtattgagatttcttaaataatgcttcagatattattgctttattgcttttttgtattggttaaaactgtacatttaaaattgctatgttactattttctacaattaatagtttgtctattttaaaataaattagttgttaagagtctt

SEQ ID NO: 440777 - DNA, 2340 bp, Homo sapiens
ggaggaagaatgtgagctgcatgggaaaagacaggaggatttacaaagagtgggtgtttaattggggatggaattaggtagttattctgatttttagatttttcatatcttttatttggtccaatgaagcagaaaatttaaatgaagttattacctttgcctgatttttgacacacctcaaactataacttgaggttgctaactatgaaacactggcatttaatgatttaaagtaaagaattctgtaatttgtagacttctgagaagttccagaaaataaatcagatggtatgtaacagcgaccgtgtgctcaaaagaagtgctgaaggaagcaaccctcctaaaccactgaaaaaactacgctttgatattgaaggatcagatgaagcagatggaagtaaacatctcccaggagagtccaaatttcagcagaaactggcagaaatgacttctactcgaacacgaatgcaaaagcagaaaatgaatgatagcatggatacctcaaacaaggaagagaaatgaggatctcaggaccttggtggacactgtgtacacctctggattcattgtctctcacagatgtgactgtataactttcccaggttctgtttatggccacatttaatatcttcagctctttttgtggatataaaatgtgcagatgcaattgtttgggtgattcctaagccacttgaaatgttagtcattgttatttatacaagattgaaaatcttgtgtaaatcctgccatttaaaaagttgtagcagattgtttcctcttccaaagtaaaattgctgtgctttatggatagtaagaatggccctagagtgggagtcctgataacccaggcctgtctgactactttgccttcttttgtagcatataggtgatgtttgctcttgtttttattaatttatatgtatatttttttaatttaacatgaacacccttagaaaatgtgtcctatctatcttccaaatgcaatttgattgactgcccattcaccaaaattatcctgaactcttctgcaaaaatggatattattagaaattagaaaaaaattactaattttacacattagattttattttactattggaatctgatatactgtgtgcttgttttataaaattttgcttttaattaaataaaagctggaagcaaagtataaccatatgatactatcatactactgaaacagatttcatacctcagaatgtaaaagaacttactgattattttcttcatccaacttatgtttttaaatgaggattattgatagtactcttggtttttataccattcagatcactgaatttataaagtacccatctagtacttgaaaaagtaaagtgttctgccagatcttaggtatagaggaccctaacacagtatatcccaagtgcactttctaatgtttctgggtcctgaagaattaagatacaaattaattttactccataaacagactgttaattataggagccttaatttttttttcatagagatttgtctaattgcatctcaaaattattctgccctccttaatttgggaaggtttgtgttttctctggaatggtacatgtcttccatgtatcttttgaactggcaattgtctatttatcttttatttttttaagtcagtatggtctaacactggcatgttcaaagccacattatttctagtccaaaattacaagtaatcaagggtcattatgggttaggcattaatgtttctatctgattttgtgcaaaagcttcaaattaaaacagctgcattagaaaaagaggcgcttctccccttcccctacacctaaaggtgtatttaaactatcttgtgtgattaacttatttagagatgctgtaacttaaaataggggatatttaaggtagcttcagctagcttttaggaaaatcactttgtctaactcagaattatttttaaaaagaaatctggtcttgttagaaaacaaaattttattttgtgctcatttaagtttcaaacttactattttgacagttattttgataacaatgacactagaaaacttgactccatttcatcattgtttctgcatgaatatcatacaaatcagttagtttttaggtcaagggcttactatttctgggtcttttgctactaagttcacattagaattagtgccagaattttaggaacttcagagatcgtgtattgagatttcttaaataatgcttcagatattattgctttattgcttttttgtattggttaaaactgtacatttaaaattgctatgttactattttctacaattaatagtttgtctattttaaaataaattagttgttaagagtctt

SEQ ID NO: 440778 - DNA, 2792 bp, Homo sapiens
tctccgtgattaaatcgttcgggaatccatcgtttcagtcaagctgtgatgcttgtactgttggtactgagcgacgatgctaccacagcctgccatgagccagaccctgatggaaatctacctctctttcactgttttataaaaaagtgtatcggctagcctatctccggctaaatacactttgtgaacgccttctgtctgagcacccagaattagaacatatcatctggacccttttccagcacaccctgcagaatgagtatgaactcatgagagacaggcatttggaccaaattatgatgtgttccatgtatggcatatgcaaagtgaagaatatagaccttaaattcaaaatcattgtaacagcatacaaggatcttcctcatgctgttcaggagacattcaaacgtgttttgatcaaagaagaggagtatgattctattatagtattctataactcggtcttcatgcagagactgaaaacaaatattttgcagtatgcttccaccaggccccctaccttgtcaccaatacctcacattcctcgaagcccttacaagtttcctagttcacccttacggattcctggagggaacatctatatttcacccctgaagagtccatataaaatttcagaaggtctgccaacaccaacaaaaatgactccaagatcaagaatcttagtatcaattggtgaatcattcgggacttctgagaagttccagaaaataaatcagatggtatgtaacagcgaccgtgtgctcaaaagaagtgctgaaggaagcaaccctcctaaaccactgaaaaaactacgctttgatattgaaggatcagatgaagcagatggaagtaaacatctcccaggagagtccaaatttcagcagaaactggcagaaatgacttctactcgaacacgaatgcaaaagcagaaaatgaatgatagcatggatacctcaaacaaggaagagaaatgaggatctcaggaccttggtggacactgtgtacacctctggattcattgtctctcacagatgtgactgtataactttcccaggttctgtttatggccacatttaatatcttcagctctttttgtggatataaaatgtgcagatgcaattgtttgggtgattcctaagccacttgaaatgttagtcattgttatttatacaagattgaaaatcttgtgtaaatcctgccatttaaaaagttgtagcagattgtttcctcttccaaagtaaaattgctgtgctttatggatagtaagaatggccctagagtgggagtcctgataacccaggcctgtctgactactttgccttcttttgtagcatataggtgatgtttgctcttgtttttattaatttatatgtatatttttttaatttaacatgaacacccttagaaaatgtgtcctatctatcttccaaatgcaatttgattgactgcccattcaccaaaattatcctgaactcttctgcaaaaatggatattattagaaattagaaaaaaattactaattttacacattagattttattttactattggaatctgatatactgtgtgcttgttttataaaattttgcttttaattaaataaaagctggaagcaaagtataaccatatgatactatcatactactgaaacagatttcatacctcagaatgtaaaagaacttactgattattttcttcatccaacttatgtttttaaatgaggattattgatagtactcttggtttttataccattcagatcactgaatttataaagtacccatctagtacttgaaaaagtaaagtgttctgccagatcttaggtatagaggaccctaacacagtatatcccaagtgcactttctaatgtttctgggtcctgaagaattaagatacaaattaattttactccataaacagactgttaattataggagccttaatttttttttcatagagatttgtctaattgcatctcaaaattattctgccctccttaatttgggaaggtttgtgttttctctggaatggtacatgtcttccatgtatcttttgaactggcaattgtctatttatcttttatttttttaagtcagtatggtctaacactggcatgttcaaagccacattatttctagtccaaaattacaagtaatcaagggtcattatgggttaggcattaatgtttctatctgattttgtgcaaaagcttcaaattaaaacagctgcattagaaaaagaggcgcttctccccttcccctacacctaaaggtgtatttaaactatcttgtgtgattaacttatttagagatgctgtaacttaaaataggggatatttaaggtagcttcagctagcttttaggaaaatcactttgtctaactcagaattatttttaaaaagaaatctggtcttgttagaaaacaaaattttattttgtgctcatttaagtttcaaacttactattttgacagttattttgataacaatgacactagaaaacttgactccatttcatcattgtttctgcatgaatatcatacaaatcagttagtttttaggtcaagggcttactatttctgggtcttttgctactaagttcacattagaattagtgccagaattttaggaacttcagagatcgtgtattgagatttcttaaataatgcttcagatattattgctttattgcttttttgtattggttaaaactgtacatttaaaattgctatgttactattttctacaattaatagtttgtctattttaaaataaattagttgttaagagtctt

SEQ ID NO: 440779 - DNA, 2736 bp, Homo sapiens
cccgcggttggacgcggcgctcagttgccgggcgggggagggcgcgtccggtttttctcaggggacgttgaaattatttttgtaacgggagtcgggagaggacggggcgtgccccgacgtgcgcgcgcgtcgtcctccccggcgctcctccacagctcgctggctcccgccgcggaaaggcgtcatgccgcccaaaaccccccgaaaaacggccgccaccgccgccgctgccgccgcggaacccccggcaccgccgccgccgccccctcctgaggaggacccagagcaggacagcggcccggaggacctgcctctcgtcaggcttgagtttgaagaaacagaagaacctgattttactgcattatgtcagaaattaaagataccagatcatgtcagagagagagcttggttaacttgggagaaagtttcatctgtggatggagtattgggaggttatattcaaaagaaaaaggaactgtggggaatctgtatctttattgcagcagttgacctagatgagatgtcgttcacttttactgagctacagaaaaacatagaaatcagtgtccataaattctttaacttactaaaagaaattgataccagtaccaaagttgataatgctatgtcaagactgttgaagaagtatgatgtattgtttgcactcttcagcaaattggaaaggacatgtgaacttatatatttgacacaacccagcagttcgatatctactgaaataaattctgcattggtgctaaaagtttcttggatcacatttttattagctaaaggggaagtattacaaatggaagatgatctggtgatttcatttcagttaatgctatgtgtccttgactattttattaaactctcacctcccatgttgctcaaagaaccatataaaacagctgttatacccattaatggttcacctcgaacacccaggcgaggtcagaacaggagtgcacggatagcaaaacaactagaaaatgatacaagaattattgaagttctctgtaaagaacatgaatgtaatatagatgaggtgaaaaatgtttatttcaaaaattttataccttttatgaattctcttggacttgtaacatctaatggacttccagaggttgaaaatctttctaaacgatacgaagaaatttatcttaaaaataaagatctagatgcaagattatttttggatcatgataaaactcttcagactgattctatagacagttttgaaacacagagaacaccacgaaaaagtaaccttgatgaagaggtgaatgtaattcctccacacactccagttaggactgttatgaacactatccaacaattaatgatgattttaaattcagcaagtgatcaaccttcagaaaatctgatttcctattttaacaactgcacagtgaatccaaaagaaagtatactgaaaagagtgaaggatataggatacatctttaaagagaaatttgctaaagctgtgggacagggttgtgtcgaaattggatcacagcgatacaaacttggagttcgcttgtattaccgagtaatggaatccatgcttaaatcagaagaagaacgattatccattcaaaattttagcaaacttctgaatgacaacatttttcatatgtctttattggcgtgcgctcttgaggttgtaatggccacatatagcagaagtacatctcagaatcttgattctggaacagatttgtctttcccatggattctgaatgtgcttaatttaaaagcctttgatttttacaaagtgatcgaaagttttatcaaagcagaaggcaacttgacaagagaaatgataaaacatttagaacgatgtgaacatcgaatcatggaatcccttgcatggctctcagattcacctttatttgatcttattaaacaatcaaaggaccgagaaggaccaactgatcaccttgaatctgcttgtcctcttaatcttcctctccagaataatcacactgcagcagatatgtatctttctcctgtaagatctccaaagaaaaaaggttcaactacgcgtgtaaattctactgcaaatgcagagacacaagcaacctcagccttccagacccagaagccattgaaatctacctctctttcactgttttataaaaaagtgtatcggctagcctatctccggctaaatacactttgtgaacgccttctgtctgagcacccagaattagaacatatcatctggacccttttccagcacaccctgcagaatgagtatgaactcatgagagacaggcatttggaccaaattatgatgtgttccatgtatggcatatgcaaagtgaagaatatagaccttaaattcaaaatcattgtaacagcatacaaggatcttcctcatgctgttcaggagacattcaaacgtgttttgatcaaagaagaggagtatgattctattatagtattctataactcggtcttcatgcagagactgaaaacaaatattttgcagtatgcttccaccaggccccctaccttgtcaccaatacctcacattcctcgaagcccttacaagtttcctagttcacccttacggattcctggagggaacatctatatttcacccctgaagagtccatataaaatttcagaaggtctgccaacaccaacaaaaatgactccaagatcaaggtgtgtgttttctctttagggaagtagtaaagaatgagagggggattattttgatccaagaat

SEQ ID NO: 440780 - DNA, 2014 bp, Homo sapiens
cccgcggttggacgcggcgctcagttgccgggcgggggagggcgcgtccggtttttctcaggggacgttgaaattatttttgtaacgggagtcgggagaggacggggcgtgccccgacgtgcgcgcgcgtcgtcctccccggcgctcctccacagctcgctggctcccgccgcggaaaggcgtcatgccgcccaaaaccccccgaaaaacggccgccaccgccgccgctgccgccgcggaacccccggcaccgccgccgccgccccctcctgaggaggacccagagcaggacagcggcccggaggacctgcctctcgtcaggcttgagtttgaagaaacagaagaacctgattttactgcattatgtcagaaattaaagataccagatcatgtcagagagagagcttggttaacttgggagaaagtttcatctgtggatggagtattgggaggttatattcaaaagaaaaaggaactgtggggaatctgtatctttattgcagcagttgacctagatgagatgtcgttcacttttactgagctacagaaaaacatagaaatcagtgtccataaattctttaacttactaaaagaaattgataccagtaccaaagttgataatgctatgtcaagactgttgaagaagtatgatgtattgtttgcactcttcagcaaattggaaaggacatgtgaacttatatatttgacacaacccagcagttcgatatctactgaaataaattctgcattggtgctaaaagtttcttggatcacatttttattagctaaaggggaagtattacaaatggaagatgatctggtgatttcatttcagttaatgctatgtgtccttgactattttattaaactctcacctcccatgttgctcaaagaaccatataaaacagctgttatacccattaatggttcacctcgaacacccaggcgaggtcagaacaggagtgcacggatagcaaaacaactagaaaatgatacaagaattattgaagttctctgtaaagaacatgaatgtaatatagatgaggtgaaaaatgtttatttcaaaaattttataccttttatgaattctcttggacttgtaacatctaatggacttccagaggttgaaaatctttctaaacgatacgaagaaatttatcttaaaaataaagatctagatgcaagattatttttggatcatgataaaactcttcagactgattctatagacagttttgaaacacagagaacaccacgaaaaagtaaccttgatgaagaggtgaatgtaattcctccacacactccagttaggactgttatgaacactatccaacaattaatgatgattttaaattcagcaagtgatcaaccttcagaaaatctgatttcctattttaacaactgcacagtgaatccaaaagaaagtatactgaaaagagtgaaggatataggatacatctttaaagagaaatttgctaaagctgtgggacagggttgtgtcgaaattggatcacagcgatacaaacttggagttcgcttgtattaccgagtaatggaatccatgcttaaatcagaagaagaacgattatccattcaaaattttagcaaacttctgaatgacaacatttttcatatgtctttattggcgtgcgctcttgaggttgtaatggccacatatagcagaagtacatctcagaatcttgattctggaacagatttgtctttcccatggattctgaatgtgcttaatttaaaagcctttgatttttacaaagtgatcgaaagttttatcaaagcagaaggcaacttgacaagagaaatgataaaacatttagaacgatgtgaacatcgaatcatggaatcccttgcatggctctcagtgatcctgccttatcctggagaaagaaatgttatgcaagaggccaagaagaagctaaacaaacaagccatgatggattcccatctcagcttattaccattgggacatgtcctttttgtccaatcacatttctac

SEQ ID NO: 440781 - DNA, 744 bp, Homo sapiens
cccgcggttggacgcggcgctcagttgccgggcgggggagggcgcgtccggtttttctcaggggacgttgaaattatttttgtaacgggagtcgggagaggacggggcgtgccccgacgtgcgcgcgcgtcgtcctccccggcgctcctccacagctcgctggctcccgccgcggaaaggcgtcatgccgcccaaaaccccccgaaaaacggccgccaccgccgccgctgccgccgcggaacccccggcaccgccgccgccgccccctcctgaggaggacccagagcaggacagcggcccggaggacctgcctctcgtcaggcttgagtttgaagaaacagaagaacctgattttactgcattatgtcagaaattaaagataccagatcatgtcagagagagagcttggttaacttgggagaaagtttcatctgtggatggagtattggtaaggattttcttaaaacgttttgaaatttttttttctcattttaaaaacaacttcaaatcactatacaaaaattgaaagatagaaaaatataaagacaataaaagctaataataattccattacccagaggaaatttacctctgctaacattaaaaatgtttgaggccgggcacggtggttcatgcctgtaatcctaccactttgggaggctgaggcaggtggattgcctgagctcaggagttcgagaccagcctgggcaacatggtgaaaccctgtctctactaaaatacaaa

SEQ ID NO: 440782 - DNA, 721 bp, Homo sapiens
cttaaattcaaaatcattgtaacagcatacaaggatcttcctcatgctgttcaggaggtaggtaattttccatagtaagtttttttgataaatccatatccataacataacataggtaattcatttgatctcatttattcattaatgagatcatatattctgtctgaccttattatgtaaattcacaaataaaaacttttatattatttatttgtaacttaaatagaattggaaagataagggtaattatgaaattacccatattcatagttttttataaagttaataaataatattttatccctgtaataagcaggtatttgtaataaacttgacatgagtcatagaacattagatattctttgaagttatttttattactttataggaaaagccagtataaatgcagccttgcaaatcaataatacaaatgttcagtataaacacattttgtgtttccggtttaccttccctttagagaaatagtagtagtaaaatatacttggtatgacacatttcatattgttctgtggaaagtgagttgaggggtatttttcccatttattattggagttttcaaaagtaatacaaaccaagtcatttttgtttgtatgtttgaagttattttctaaattcaatcattttaattgtatatatcagaggcatctgatataacctctgtgtttttccctaaaatttgagtgaaatctaactatcacta

SEQ ID NO: 440783 - DNA, 695 bp, Homo sapiens
atacaaaaattctttaatgaaatctgtgcctctgtgtgctgagagatgtaatgacatgtaaaggataattgtcagtgacttttttctttcaaggttgaaaatctttctaaacgatacgaagaaatttatcttaaaaataaagatctagatgcaagattatttttggatcatgataaaactcttcagactgattctatagacaggtattgcacatggtatatttgattgatttgctttagatataggttgatactgatataggtagattatatagtctttagcttagtgacctttagatatcatttataacaaattactttcaaatgtctttatacaaagaaaagtttaacagtattttaagcatataacttatctacaaatatagatttaatgtgaattgtgtgtcctataacagttacctttttgcagttaactgaatataattttttaaaatgtgcaccaaaagataatggctaaagtaattagtttcttcaaatagtggtctctaccttatttctatcctttcatatactattgcctgcctggtttatttaaaaaagtttatacaaaagtgtagtctctgttattatcatgtagaaacctaaaattggaatggttgagagtgattgttaaaatttttgactgatcataagtaaagttaattttgtgtctttagcatgaactcttttaatatg

SEQ ID NO: 440784 - DNA, 385 bp, Homo sapiens
tttactttccttcacagaagtgttttgctgctttgaagtatatttgacttaccatgcaagcaaatatttttcactgtgtggtatccttattttggaatgaccatgaaaaagataatcatatgtttaaatttgaagtgtaatgtttttctaagataaaataagatcttaaagtatttaataatgttctttttcacagtagtgttatgtgcaaactattgaaacaagtatgtactgaatcaatttgatttataagtatatgccaattatatgattattttcatttggtaggcttgagtttgaagaaacagaagaacctgattttactgcattatgtcagaaattaaagataccagatcatgtcagagagagagcttggttaacttgg

SEQ ID NO: 440785 - DNA, 4887 bp, Homo sapiens
cccgcggttggacgcggcgctcagttgccgggcgggggagggcgcgtccggtttttctcaggggacgttgaaattatttttgtaacgggagtcgggagaggacggggcgtgccccgacgtgcgcgcgcgtcgtcctccccggcgctcctccacagctcgctggctcccgccgcggaaaggcgtcatgccgcccaaaaccccccgaaaaacggccgccaccgccgccgctgccgccgcggaacccccggcaccgccgccgccgccccctcctgaggaggacccagagcaggacagcggcccggaggacctgcctctcgtcaggcttgagtttgaagaaacagaagaacctgattttactgcattatgtcagaaattaaagataccagatcatgtcagagagagagcttggttaacttgggagaaagtttcatctgtggatggagtattgggaggttatattcaaaagaaaaaggaactgtggggaatctgtatctttattgcagcagttgacctagatgagatgtcgttcacttttactgagctacagaaaaacatagaaatcagtgtccataaattctttaacttactaaaagaaattgataccagtaccaaagttgataatgctatgtcaagactgttgaagaagtatgatgtattgtttgcactcttcagcaaattggaaaggacatgtgaacttatatatttgacacaacccagcagttcgatatctactgaaataaattctgcattggtgctaaaagtttcttggatcacatttttattagctaaaggggaagtattacaaatggaagatgatctggtgatttcatttcagttaatgctatgtgtccttgactattttattaaactctcacctcccatgttgctcaaagaaccatataaaacagctgttatacccattaatggttcacctcgaacacccaggcgaggtcagaacaggagtgcacggatagcaaaacaactagaaaatgatacaagaattattgaagttctctgtaaagaacatgaatgtaatatagatgaggtgaaaaatgtttatttcaaaaattttataccttttatgaattctcttggacttgtaacatctaatggacttccagaggttgaaaatctttctaaacgatacgaagaaatttatcttaaaaataaagatctagatgcaagattatttttggatcatgataaaactcttcagactgattctatagacagttttgaaacacagagaacaccacgaaaaagtaaccttgatgaagaggtgaatgtaattcctccacacactccagttaggactgttatgaacactatccaacaattaatgatgattttaaattcagcaagtgatcaaccttcagaaaatctgatttcctattttaacaactgcacagtgaatccaaaagaaagtatactgaaaagagtgaaggatataggatacatctttaaagagaaatttgctaaagctgtgggacagggttgtgtcgaaattggatcacagcgatacaaacttggagttcgcttgtattaccgagtaatggaatccatgcttaaatcagaagaagaacgattatccattcaaaattttagcaaacttctgaatgacaacatttttcatatgtctttattggcgtgcgctcttgaggttgtaatggccacatatagcagaagtacatctcagaatcttgattctggaacagatttgtctttcccatggattctgaatgtgcttaatttaaaagcctttgatttttacaaagtgatcgaaagttttatcaaagcagaaggcaacttgacaagagaaatgataaaacatttagaacgatgtgaacatcgaatcatggaatcccttgcatggctctcagattcacctttatttgatcttattaaacaatcaaaggaccgagaaggaccaactgatcaccttgaatctgcttgtcctcttaatcttcctctccagaataatcacactgcagcagatatgtatctttctcctgtaagatctccaaagaaaaaaggttcaactacgcgtgtaaattctactgcaaatgcagagacacaagcaacctcagccttccagacccagaagccattgaaatctacctctctttcactgttttataaaaaagtgtatcggctagcctatctccggctaaatacactttgtgaacgccttctgtctgagcacccagaattagaacatatcatctggacccttttccagcacaccctgcagaatgagtatgaactcatgagagacaggcatttggaccaaattatgatgtgttccatgtatggcatatgcaaagtgaagaatatagaccttaaattcaaaatcattgtaacagcatacaaggatcttcctcatgctgttcaggagacattcaaacgtgttttgatcaaagaagaggagtatgattctattatagtattctataactcggtcttcatgcagagactgaaaacaaatattttgcagtatgcttccaccaggccccctaccttgtcaccaatacctcacattcctcgaagcccttacaagtttcctagttcacccttacggattcctggagggaacatctatatttcacccctgaagagtccatataaaatttcagaaggtctgccaacaccaacaaaaatgactccaagatcaagaatcttagtatcaattggtgaatcattcgggacttctgagaagttccagaaaataaatcagatggtatgtaacagcgaccgtgtgctcaaaagaagtgctgaaggaagcaaccctcctaaaccactgaaaaaactacgctttgatattgaaggatcagatgaagcagatggaagtaaacatctcccaggagagtccaaatttcagcagaaactggcagaaatgacttctactcgaacacgaatgcaaaagcagaaaatgaatgatagcatggatacctcaaacaaggaagagaaatgaggatctcaggaccttggtggacactgtgtacacctctggattcattgtctctcacagatgtgactgtataactttcccaggttctgtttatggccacatttaatatcttcagctctttttgtggatataaaatgtgcagatgcaattgtttgggtgattcctaagccacttgaaatgttagtcattgttatttatacaagattgaaaatcttgtgtaaatcctgccatttaaaaagttgtagcagattgtttcctcttccaaagtaaaattgctgtgctttatggatagtaagaatggccctagagtgggagtcctgataacccaggcctgtctgactactttgccttcttttgtagcatataggtgatgtttgctcttgtttttattaatttatatgtatatttttttaatttaacatgaacacccttagaaaatgtgtcctatctatcttccaaatgcaatttgattgactgcccattcaccaaaattatcctgaactcttctgcaaaaatggatattattagaaattagaaaaaaattactaattttacacattagattttattttactattggaatctgatatactgtgtgcttgttttataaaattttgcttttaattaaataaaagctggaagcaaagtataaccatatgatactatcatactactgaaacagatttcatacctcagaatgtaaaagaacttactgattattttcttcatccaacttatgtttttaaatgaggattattgatagtactcttggtttttataccattcagatcactgaatttataaagtacccatctagtacttgaaaaagtaaagtgttctgccagatcttaggtatagaggaccctaacacagtatatcccaagtgcactttctaatgtttctgggtcctgaagaattaagatacaaattaattttactccataaacagactgttaattataggagccttaatttttttttcatagagatttgtctaattgcatctcaaaattattctgccctccttaatttgggaaggtttgtgttttctctggaatggtacatgtcttccatgtatcttttgaactggcaattgtctatttatcttttatttttttaagtcagtatggtctaacactggcatgttcaaagccacattatttctagtccaaaattacaagtaatcaagggtcattatgggttaggcattaatgtttctatctgattttgtgcaaaagcttcaaattaaaacagctgcattagaaaaagaggcgcttctccccttcccctacacctaaaggtgtatttaaactatcttgtgtgattaacttatttagagatgctgtaacttaaaataggggatatttaaggtagcttcagctagcttttaggaaaatcactttgtctaactcagaattatttttaaaaagaaatctggtcttgttagaaaacaaaattttattttgtgctcatttaagtttcaaacttactattttgacagttattttgataacaatgacactagaaaacttgactccatttcatcattgtttctgcatgaatatcatacaaatcagttagtttttaggtcaagggcttactatttctgggtcttttgctactaagttcacattagaattagtgccagaattttaggaacttcagagatcgtgtattgagatttcttaaataatgcttcagatattattgctttattgcttttttgtattggttaaaactgtacatttaaaattgctatgttactattttctacaattaatagtttgtctattttaaaataaattagttgttaagagtcttaatggtctgatgttgtgttctttgtattaagtacactaatgttctcttttctgtctaggagaagatagatagaagataactctcctagtatctcatcc

SEQ ID NO: 440786 - DNA, 4319 bp, Homo sapiens
cccgcggttggacgcggcgctcagttgccgggcgggggagggcgcgtccggtttttctcaggggacgttgaaattatttttgtaacgggagtcgggagaggacggggcgtgccccgacgtgcgcgcgcgtcgtcctccccggcgctcctccacagctcgctggctcccgccgcggaaaggcgtcatgccgcccaaaaccccccgaaaaacggccgccaccgccgccgctgccgccgcggaacccccggcaccgccgccgccgccccctcctgaggaggacccagagcaggacagcggcccggaggacctgcctctcgtcaggggaagtattacaaatggaagatgatctggtgatttcatttcagttaatgctatgtgtccttgactattttattaaactctcacctcccatgttgctcaaagaaccatataaaacagctgttatacccattaatggttcacctcgaacacccaggcgaggtcagaacaggagtgcacggatagcaaaacaactagaaaatgatacaagaattattgaagttctctgtaaagaacatgaatgtaatatagatgaggtgaaaaatgtttatttcaaaaattttataccttttatgaattctcttggacttgtaacatctaatggacttccagaggttgaaaatctttctaaacgatacgaagaaatttatcttaaaaataaagatctagatgcaagattatttttggatcatgataaaactcttcagactgattctatagacagttttgaaacacagagaacaccacgaaaaagtaaccttgatgaagaggtgaatgtaattcctccacacactccagttaggactgttatgaacactatccaacaattaatgatgattttaaattcagcaagtgatcaaccttcagaaaatctgatttcctattttaacaactgcacagtgaatccaaaagaaagtatactgaaaagagtgaaggatataggatacatctttaaagagaaatttgctaaagctgtgggacagggttgtgtcgaaattggatcacagcgatacaaacttggagttcgcttgtattaccgagtaatggaatccatgcttaaatcagaagaagaacgattatccattcaaaattttagcaaacttctgaatgacaacatttttcatatgtctttattggcgtgcgctcttgaggttgtaatggccacatatagcagaagtacatctcagaatcttgattctggaacagatttgtctttcccatggattctgaatgtgcttaatttaaaagcctttgatttttacaaagtgatcgaaagttttatcaaagcagaaggcaacttgacaagagaaatgataaaacatttagaacgatgtgaacatcgaatcatggaatcccttgcatggctctcagattcacctttatttgatcttattaaacaatcaaaggaccgagaaggaccaactgatcaccttgaatctgcttgtcctcttaatcttcctctccagaataatcacactgcagcagatatgtatctttctcctgtaagatctccaaagaaaaaaggttcaactacgcgtgtaaattctactgcaaatgcagagacacaagcaacctcagccttccagacccagaagccattgaaatctacctctctttcactgttttataaaaaagtgtatcggctagcctatctccggctaaatacactttgtgaacgccttctgtctgagcacccagaattagaacatatcatctggacccttttccagcacaccctgcagaatgagtatgaactcatgagagacaggcatttggaccaaattatgatgtgttccatgtatggcatatgcaaagtgaagaatatagaccttaaattcaaaatcattgtaacagcatacaaggatcttcctcatgctgttcaggagacattcaaacgtgttttgatcaaagaagaggagtatgattctattatagtattctataactcggtcttcatgcagagactgaaaacaaatattttgcagtatgcttccaccaggccccctaccttgtcaccaatacctcacattcctcgaagcccttacaagtttcctagttcacccttacggattcctggagggaacatctatatttcacccctgaagagtccatataaaatttcagaaggtctgccaacaccaacaaaaatgactccaagatcaagaatcttagtatcaattggtgaatcattcgggacttctgagaagttccagaaaataaatcagatggtatgtaacagcgaccgtgtgctcaaaagaagtgctgaaggaagcaaccctcctaaaccactgaaaaaactacgctttgatattgaaggatcagatgaagcagatggaagtaaacatctcccaggagagtccaaatttcagcagaaactggcagaaatgacttctactcgaacacgaatgcaaaagcagaaaatgaatgatagcatggatacctcaaacaaggaagagaaatgaggatctcaggaccttggtggacactgtgtacacctctggattcattgtctctcacagatgtgactgtataactttcccaggttctgtttatggccacatttaatatcttcagctctttttgtggatataaaatgtgcagatgcaattgtttgggtgattcctaagccacttgaaatgttagtcattgttatttatacaagattgaaaatcttgtgtaaatcctgccatttaaaaagttgtagcagattgtttcctcttccaaagtaaaattgctgtgctttatggatagtaagaatggccctagagtgggagtcctgataacccaggcctgtctgactactttgccttcttttgtagcatataggtgatgtttgctcttgtttttattaatttatatgtatatttttttaatttaacatgaacacccttagaaaatgtgtcctatctatcttccaaatgcaatttgattgactgcccattcaccaaaattatcctgaactcttctgcaaaaatggatattattagaaattagaaaaaaattactaattttacacattagattttattttactattggaatctgatatactgtgtgcttgttttataaaattttgcttttaattaaataaaagctggaagcaaagtataaccatatgatactatcatactactgaaacagatttcatacctcagaatgtaaaagaacttactgattattttcttcatccaacttatgtttttaaatgaggattattgatagtactcttggtttttataccattcagatcactgaatttataaagtacccatctagtacttgaaaaagtaaagtgttctgccagatcttaggtatagaggaccctaacacagtatatcccaagtgcactttctaatgtttctgggtcctgaagaattaagatacaaattaattttactccataaacagactgttaattataggagccttaatttttttttcatagagatttgtctaattgcatctcaaaattattctgccctccttaatttgggaaggtttgtgttttctctggaatggtacatgtcttccatgtatcttttgaactggcaattgtctatttatcttttatttttttaagtcagtatggtctaacactggcatgttcaaagccacattatttctagtccaaaattacaagtaatcaagggtcattatgggttaggcattaatgtttctatctgattttgtgcaaaagcttcaaattaaaacagctgcattagaaaaagaggcgcttctccccttcccctacacctaaaggtgtatttaaactatcttgtgtgattaacttatttagagatgctgtaacttaaaataggggatatttaaggtagcttcagctagcttttaggaaaatcactttgtctaactcagaattatttttaaaaagaaatctggtcttgttagaaaacaaaattttattttgtgctcatttaagtttcaaacttactattttgacagttattttgataacaatgacactagaaaacttgactccatttcatcattgtttctgcatgaatatcatacaaatcagttagtttttaggtcaagggcttactatttctgggtcttttgctactaagttcacattagaattagtgccagaattttaggaacttcagagatcgtgtattgagatttcttaaataatgcttcagatattattgctttattgcttttttgtattggttaaaactgtacatttaaaattgctatgttactattttctacaattaatagtttgtctattttaaaataaattagttgttaagagtctt

SEQ ID NO: 440787 - DNA, 5103 bp, Homo sapiens
cccgcggttggacgcggcgctcagttgccgggcgggggagggcgcgtccggtttttctcaggggacgttgaaattatttttgtaacgggagtcgggagaggacggggcgtgccccgacgtgcgcgcgcgtcgtcctccccggcgctcctccacagctcgctggctcccgccgcggaaaggcgtcatgccgcccaaaaccccccgaaaaacggccgccaccgccgccgctgccgccgcggaacccccggcaccgccgccgccgccccctcctgaggaggacccagagcaggacagcggcccggaggacctgcctctcgtcaggcttgagtttgaagaaacagaagaacctgattttactgcattatgtcagaaattaaagataccagatcatgtcagagagagagcttggttaacttgggagaaagtttcatctgtggatggagtattgggaggttatattcaaaagaaaaaggaactgtggggaatctgtatctttattgcagcagttgacctagatgagatgtcgttcacttttactgagctacagaaaaacatagaaatcagtgtccataaattctttaacttactaaaagaaattgataccagtaccaaagttgataatgctatgtcaagactgttgaagaagtatgatgtattgtttgcactcttcagcaaattggaaaggacatgtgaacttatatatttgacacaacccagcagttcgatatctactgaaataaattctgcattggtgctaaaagtttcttggatcacatttttattagctaaaggggaagtattacaaatggaagatgatctggtgatttcatttcagttaatgctatgtgtccttgactattttattaaactctcacctcccatgttgctcaaagaaccatataaaacagctgttatacccattaatggttcacctcgaacacccaggcgaggtcagaacaggagtgcacggatagcaaaacaactagaaaatgatacaagaattattgaagttctctgtaaagaacatgaatgtaatatagatgaggtgaaaaatgtttatttcaaaaattttataccttttatgaattctcttggacttgtaacatctaatggacttccagaggttgaaaatctttctaaacgatacgaagaaatttatcttaaaaataaagatctagatgcaagattatttttggatcatgataaaactcttcagactgattctatagacagttttgaaacacagagaacaccacgaaaaagtaaccttgatgaagaggtgaatgtaattcctccacacactccagttaggactgttatgaacactatccaacaattaatgatgattttaaattcagcaagtgatcaaccttcagaaaatctgatttcctattttaacaactgcacagtgaatccaaaagaaagtatactgaaaagagtgaaggatataggatacatctttaaagagaaatttgctaaagctgtgggacagggttgtgtcgaaattggatcacagcgatacaaacttggagttcgcttgtattaccgagtaatggaatccatgcttaaatcagaagaagaacgattatccattcaaaattttagcaaacttctgaatgacaacatttttcatatgtctttattggcgtgcgctcttgaggttgtaatggccacatatagcagaagtacatctcagaatcttgattctggaacagatttgtctttcccatggattctgaatgtgcttaatttaaaagcctttgatttttacaaagtgatcgaaagttttatcaaagcagaaggcaacttgacaagagaaatgataaaacatttagaacgatgtgaacatcgaatcatggaatcccttgcatggctctcagattcacctttatttgatcttattaaacaatcaaaggaccgagaaggaccaactgatcaccttgaatctgcttgtcctcttaatcttcctctccagaataatcacactgcagcagatatgtatctttctcctgtaagatctccaaagaaaaaaggttcaactacgcgtgtaaattctactgcaaatgcagagacacaagcaacctcagccttccagacccagaagccattgaaatctacctctctttcactgttttataaaaaagtgtatcggctagcctatctccggctaaatacactttgtgaacgccttctgtctgagcacccagaattagaacatatcatctggacccttttccagcacaccctgcagaatgagtatgaactcatgagagacaggcatttggaccaaattatgatgtgttccatgtatggcatatgcaaagtgaagaatatagaccttaaattcaaaatcattgtaacagcatacaaggatcttcctcatgctgttcaggagacattcaaacgtgttttgatcaaagaagaggagtatgattctattatagtattctataactcggtcttcatgcagagactgaaaacaaatattttgcagtatgcttccaccaggccccctaccttgtcaccaatacctcacattcctcgaagcccttacaagtttcctagttcacccttacggattcctggagggaacatctatatttcacccctgaagagtccatataaaatttcagaaggtctgccaacaccaacaaaaatgactccaagatcaagaatcttagtatcaattggtgaatcattcgggacttctgagaagttccagaaaataaatcagatggtatgtaacagcgaccgtgtgctcaaaagaagtgctgaaggaagcaaccctcctaaaccactgaaaaaactacgctttgatattgaaggatcagatgaagcagatggaagtaaacatctcccaggagagtccaaatttcagcagaaactggcagaaatgacttctactcgaacacgaatgcaaaagcagaaaatgaatgatagcatggatacctcaaacaaggaagagaaatgaggatctcaggaccttggtggacactgtgtacacctctggattcattgtctctcacagatgtgactgtataactttcccaggttctgtttatggccacatttaatatcttcagctctttttgtggatataaaatgtgcagatgcaattgtttgggtgattcctaagccacttgaaatgttagtcattgttatttatacaagattgaaaatcttgtgtaaatcctgccatttaaaaagttgtagcagattgtttcctcttccaaagtaaaattgctgtgctttatggatagtaagaatggccctagagtgggagtcctgataacccaggcctgtctgactactttgccttcttttgtagcatataggtgatgtttgctcttgtttttattaatttatatgtatatttttttaatttaacatgaacacccttagaaaatgtgtcctatctatcttccaaatgcaatttgattgactgcccattcaccaaaattatcctgaactcttctgcaaaaatggatattattagaaattagaaaaaaattactaattttacacattagattttattttactattggaatctgatatactgtgtgcttgttttataaaattttgcttttaattaaataaaagctggaagcaaagtataaccatatgatactatcatactactgaaacagatttcatacctcagaatgtaaaagaacttactgattattttcttcatccaacttatgtttttaaatgaggattattgatagtactcttggtttttataccattcagatcactgaatttataaagtacccatctagtacttgaaaaagtaaagtgttctgccagatcttaggtatagaggaccctaacacagtatatcccaagtgcactttctaatgtttctgggtcctgaagaattaagatacaaattaattttactccataaacagactgttaattataggagccttaatttttttttcatagagatttgtctaattgcatctcaaaattattctgccctccttaatttgggaaggtttgtgttttctctggaatggtacatgtcttccatgtatcttttgaactggcaattgtctatttatcttttatttttttaagtcagtatggtctaacactggcatgttcaaagccacattatttctagtccaaaattacaagtaatcaagggtcattatgggttaggcattaatgtttctatctgattttgtgcaaaagcttcaaattaaaacagctgcattagaaaaagaggcgcttctccccttcccctacacctaaaggtgtatttaaactatcttgtgtgattaacttatttagagatgctgtaacttaaaataggggatatttaaggtagcttcagctagcttttaggaaaatcactttgtctaactcagaattatttttaaaaagaaatctggtcttgttagaaaacaaaattttattttgtgctcatttaagtttcaaacttactattttgacagttattttgataacaatgacactagaaaacttgactccatttcatcattgtttctgcatgaatatcatacaaatcagttagtttttaggtcaagggcttactatttctgggtcttttgctactaagttcacattagaattagtgccagaattttaggaacttcagagatcgtgtattgagatttcttaaataatgcttcagatattattgctttattgcttttttgtattggttaaaactgtacatttaaaattgctatgttactattttctacaattaatagtttgtctattttaaaataaattagttgttaagagtcttaaaaaaaaaaaaaaaaaaaaaaaaaaaatttgtggggggcttggggccctgagaaaaaggttcttctagaaccattccggttggggcgcgcgcgggggcgcccagtagggtaagtagacctcggggccaaaagcggggtcccaaggagaaacccgggcgcaaatgcaataggggctgggattctcccccaaattaaaaaaggcccggggggcaaccgcgacgcgttcgtgaaaaaatcccaaagggagtccggaggccaataccgggccctttcacccgggggccccaggagaaccccgattataatttgccga

SEQ ID NO: 440788 - DNA, 3309 bp, Homo sapiens
aaattagagtcctgccttggaacaggttaaaggagggcaagagaaggtccgaggcctgcccctgaggcctaccacaccaaacgttataacaacacaacagtttttatatattttcagttttgcataatatgaagttaaagacttaagtaaattgagtaaatagtagtttttttttttttaatttcacagatcaatagagttaactcctgagttatatgcatacaaccccaaagttgtttgctgtctggagctgtgcctacacccgcctggcatattcttgagacattggagctaggaagttggaaattgatagaaaattttgtcacttgtaacagagctaaagcaatatggattatggtggaccctatcacttggaatactttcctgaaagcaacacaggattcacctttatttgatcttattaaacaatcaaaggaccgagaaggaccaactgatcaccttgaatctgcttgtcctcttaatcttcctctccagaataatcacactgcagcagatatgtatctttctcctgtaagatctccaaagaaaaaaggttcaactacgcgtgtaaattctactgcaaatgcagagacacaagcaacctcagccttccagacccagaagccattgaaatctacctctctttcactgttttataaaaaagtgtatcggctagcctatctccggctaaatacactttgtgaacgccttctgtctgagcacccagaattagaacatatcatctggacccttttccagcacaccctgcagaatgagtatgaactcatgagagacaggcatttggaccaaattatgatgtgttccatgtatggcatatgcaaagtgaagaatatagaccttaaattcaaaatcattgtaacagcatacaaggatcttcctcatgctgttcaggagacattcaaacgtgttttgatcaaagaagaggagtatgattctattatagtattctataactcggtcttcatgcagagactgaaaacaaatattttgcagtatgcttccaccaggccccctaccttgtcaccaatacctcacattcctcgaagcccttacaagtttcctagttcacccttacggattcctggagggaacatctatatttcacccctgaagagtccatataaaatttcagaaggtctgccaacaccaacaaaaatgactccaagatcaagaatcttagtatcaattggtgaatcattcgggacttctgagaagttccagaaaataaatcagatggtatgtaacagcgaccgtgtgctcaaaagaagtgctgaaggaagcaaccctcctaaaccactgaaaaaactacgctttgatattgaaggatcagatgaagcagatggaagtaaacatctcccaggagagtccaaatttcagcagaaactggcagaaatgacttctactcgaacacgaatgcaaaagcagaaaatgaatgatagcatggatacctcaaacaaggaagagaaatgaggatctcaggaccttggtggacactgtgtacacctctggattcattgtctctcacagatgtgactgtataactttcccaggttctgtttatggccacatttaatatcttcagctctttttgtggatataaaatgtgcagatgcaattgtttgggtgattcctaagccacttgaaatgttagtcattgttatttatacaagattgaaaatcttgtgtaaatcctgccatttaaaaagttgtagcagattgtttcctcttccaaagtaaaattgctgtgctttatggatagtaagaatggccctagagtgggagtcctgataacccaggcctgtctgactactttgccttcttttgtagcatataggtgatgtttgctcttgtttttattaatttatatgtatatttttttaatttaacatgaacacccttagaaaatgtgtcctatctatcttccaaatgcaatttgattgactgcccattcaccaaaattatcctgaactcttctgcaaaaatggatattattagaaattagaaaaaaattactaattttacacattagattttattttactattggaatctgatatactgtgtgcttgttttataaaattttgcttttaattaaataaaagctggaagcaaagtataaccatatgatactatcatactactgaaacagatttcatacctcagaatgtaaaagaacttactgattattttcttcatccaacttatgtttttaaatgaggattattgatagtactcttggtttttataccattcagatcactgaatttataaagtacccatctagtacttgaaaaagtaaagtgttctgccagatcttaggtatagaggaccctaacacagtatatcccaagtgcactttctaatgtttctgggtcctgaagaattaagatacaaattaattttactccataaacagactgttaattataggagccttaatttttttttcatagagatttgtctaattgcatctcaaaattattctgccctccttaatttgggaaggtttgtgttttctctggaatggtacatgtcttccatgtatcttttgaactggcaattgtctatttatcttttatttttttaagtcagtatggtctaacactggcatgttcaaagccacattatttctagtccaaaattacaagtaatcaagggtcattatgggttaggcattaatgtttctatctgattttgtgcaaaagcttcaaattaaaacagctgcattagaaaaagaggcgcttctccccttcccctacacctaaaggtgtatttaaactatcttgtgtgattaacttatttagagatgctgtaacttaaaataggggatatttaaggtagcttcagctagcttttaggaaaatcactttgtctaactcagaattatttttaaaaagaaatctggtcttgttagaaaacaaaattttattttgtgctcatttaagtttcaaacttactattttgacagttattttgataacaatgacactagaaaacttgactccatttcatcattgtttctgcatgaatatcatacaaatcagttagtttttaggtcaagggcttactatttctgggtcttttgctactaagttcacattagaattagtgccagaattttaggaacttcagagatcgtgtattgagatttcttaaataatgcttcagatattattgctttattgcttttttgtattggttaaaactgtacatttaaaattgctatgttactattttctacaattaatagtttgtctattttaaaataaattagttgttaagagtctt

SEQ ID NO: 440789 - DNA, 5468 bp, Homo sapiens
cccgcggttggacgcggcgctcagttgccgggcgggggagggcgcgtccggtttttctcaggggacgttgaaattatttttgtaacgggagtcgggagaggacggggcgtgccccgacgtgcgcgcgcgtcgtcctccccggcgctcctccacagctcgctggctcccgccgcggaaaggcgtcatgccgcccaaaaccccccgaaaaacggccgccaccgccgccgctgccgccgcggaacccccggcaccgccgccgccgccccctcctgaggaggacccagagcaggacagcggcccggaggacctgcctctcgtcaggcttgagtttgaagaaacagaagaacctgattttactgcattatgtcagaaattaaagataccagatcatgtcagagagagagcttggttaacttgggagaaagtttcatctgtggatggagtattgggaggttatattcaaaagaaaaaggaactgtggggaatctgtatctttattgcagcagttgacctagatgagatgtcgttcacttttactgagctacagaaaaacatagaaatcagtgtccataaattctttaacttactaaaagaaattgataccagtaccaaagttgataatgctatgtcaagactgttgaagaagtatgatgtattgtttgcactcttcagcaaattggaaaggacatgtgaacttatatatttgacacaacccagcagttcgatatctactgaaataaattctgcattggtgctaaaagtttcttggatcacatttttattagctaaaggggaagtattacaaatggaagatgatctggtgatttcatttcagttaatgctatgtgtccttgactattttattaaactctcacctcccatgttgctcaaagaaccatataaaacagctgttatacccattaatggttcacctcgaacacccaggcgaggtcagaacaggagtgcacggatagcaaaacaactagaaaatgatacaagaattattgaagttctctgtaaagaacatgaatgtaatatagatgaggtgaaaaatgtttatttcaaaaattttataccttttatgaattctcttggacttgtaacatctaatggacttccagaggttgaaaatctttctaaacgatacgaagaaatttatcttaaaaataaagatctagatgcaagattatttttggatcatgataaaactcttcagactgattctatagacagttttgaaacacagagaacaccacgaaaaagtaaccttgatgaagaggtgaatgtaattcctccacacactccagttaggactgttatgaacactatccaacaattaatgatgattttaaattcagcaagtgatcaaccttcagaaaatctgatttcctattttaacaactgcacagtgaatccaaaagaaagtatactgaaaagagtgaaggatataggatacatctttaaagagaaatttgctaaagctgtgggacagggttgtgtcgaaattggatcacagcgatacaaacttggagttcgcttgtattaccgagtaatggaatccatgcttaaatcagaagaagaacgattatccattcaaaattttagcaaacttctgaatgacaacatttttcatatgtctttattggcgtgcgctcttgaggttgtaatggccacatatagcagaagtacatctcagaatcttgattctggaacagatttgtctttcccatggattctgaatgtgcttaatttaaaagcctttgatttttacaaagtgatcgaaagttttatcaaagcagaaggcaacttgacaagagaaatgataaaacatttagaacgatgtgaacatcgaatcatggaatcccttgcatggctctcagattcacctttatttgatcttattaaacaatcaaaggaccgagaaggaccaactgatcaccttgaatctgcttgtcctcttaatcttcctctccagaataatcacactgcagcagatatgtatctttctcctgtaagatctccaaagaaaaaaggttcaactacgcgtgtaaattctactgcaaatgcagagacacaagcaacctcagccttccagacccagaagccattgaaatctacctctctttcactgttttataaaaaagtgtatcggctagcctatctccggctaaatacactttgtgaacgccttctgtctgagcacccagaattagaacatatcatctggacccttttccagcacaccctgcagaatgagtatgaactcatgagagacaggcatttggaccaaattatgatgtgttccatgtatggcatatgcaaagtgaagaatatagaccttaaattcaaaatcattgtaacagcatacaaggatcttcctcatgctgttcaggagacattcaaacgtgttttgatcaaagaagaggagtatgattctattatagtattctataactcggtcttcatgcagagactgaaaacaaatattttgcagtatgcttccaccaggccccctaccttgtcaccaatacctcacattcctcgaagcccttacaagtttcctagttcacccttacggattcctggagggaacatctatatttcacccctgaagagtccatataaaatttcagaaggtctgccaacaccaacaaaaatgactccaagatcaagaatcttagtatcaattggtgaatcattcgggacttctgagaagttccagaaaataaatcagatggtatgtaacagcgaccgtgtgctcaaaagaagtgctgaaggaagcaaccctcctaaaccactgaaaaaactacgctttgatattgaaggatcagatgaagcagatggaagtaaacatctcccaggagagtccaaatttcagcagaaactggcagaaatgacttctactcgaacacgaatgcaaaagcagaaaatgaatgatagcatggatacctcaaacaaggaagagaaatgaggatctcaggaccttggtggacactgtgtacacctctggattcattgtctctcacagatgtgactgtataactttcccaggttctgtttatggccacatttaatatcttcagctctttttgtggatataaaatgtgcagatgcaattgtttgggtgattcctaagccacttgaaatgttagtcattgttatttatacaagattgaaaatcttgtgtaaatcctgccatttaaaaagttgtagcagattgtttcctcttccaaagtaaaattgctgtgctttatggatagtaagaatggccctagagtgggagtcctgataacccaggcctgtctgactactttgccttcttttgtagcatataggtgatgtttgctcttgtttttattaatttatatgtatatttttttaatttaacatgaacacccttagaaaatgtgtcctatctatcttccaaatgcaatttgattgactgcccattcaccaaaattatcctgaactcttctgcaaaaatggatattattagaaattagaaaaaaattactaattttacacattagattttattttactattggaatctgatatactgtgtgcttgttttataaaattttgcttttaattaaataaaagctggaagcaaagtataaccatatgatactatcatactactgaaacagatttcatacctcagaatgtaaaagaacttactgattattttcttcatccaacttatgtttttaaatgaggattattgatagtactcttggtttttataccattcagatcactgaatttataaagtacccatctagtacttgaaaaagtaaagtgttctgccagatcttaggtatagaggaccctaacacagtatatcccaagtgcactttctaatgtttctgggtcctgaagaattaagatacaaattaattttactccataaacagactgttaattataggagccttaatttttttttcatagagatttgtctaattgcatctcaaaattattctgccctccttaatttgggaaggtttgtgttttctctggaatggtacatgtcttccatgtatcttttgaactggcaattgtctatttatcttttatttttttaagtcagtatggtctaacactggcatgttcaaagccacattatttctagtccaaaattacaagtaatcaagggtcattatgggttaggcattaatgtttctatctgattttgtgcaaaagcttcaaattaaaacagctgcattagaaaaagaggcgcttctccccttcccctacacctaaaggtgtatttaaactatcttgtgtgattaacttatttagagatgctgtaacttaaaataggggatatttaaggtagcttcagctagcttttaggaaaatcactttgtctaactcagaattatttttaaaaagaaatctggtcttgttagaaaacaaaattttattttgtgctcatttaagtttcaaacttactattttgacagttattttgataacaatgacactagaatttttaggtcaagggcttactatttctgggtcttttgctactaagttcacattagaattagtgccagaattttaggaacttcagagatcgtgtattgagatttcttaaataatgcttcagatattattgctttattgcttttttgtattggttaaaactgtacatttaaaattgctatgttactattttctacaattaatagtttgtctattttaaaataaattagttgttaagagtcttaaaaaaaaaaaaaaaaaaaaaaaaaaaaaaaaaaaaaaaaaaaaaaaaaaaaaaaaaaaaaaaaaaaaaaaaaaaaaaaaaaaaaaaaaaaaaaaaaaaaaaaaaaaaaaaaaaaaaaaaaaaaagaaaaaaaaaagaacacaaaaaaaaaaacacagcggagagaaaaaataaaaaaagaaaaacaacgaaaagagaaaaaaaaaaagaaaaaacacaacaagaaaacaaaaaggagaaaaaaaacacacgaaaagaaaaaaaagagaaaagaaaaaaaaagagaaaaaaaaaagaaaaaaaaagaaaaaaaaaagacgagagaaaaaaaaaagaaaaagagagaaggaaagaaaagaaaaagaaagagaaacgagaaaaaagagagagaagagaagaaaagaggaaaaaaggagagaaaagaaaaagaaaaagagaaagaaaaaaaaagagacaggacaaagagaagaaacaaaagaaaagaaaagtgaagaaaagaaagacggacgatgaaaagagaaagaaaaggacaaaggaaaggaaagagagaaaagaagaaaaaagaaagaagaaaagagtaggaaaggagaaggaagaaagaagagaagggagaagaaaagagaagcaagaagaggaagggcagagaagagagaagaaagaaagaaagagagagaaagaaagaggaaggtaagaacaagaaaaaaggagaagtgtagcgaaaatagaaaaagaa

SEQ ID NO: 440790 - DNA, 1634 bp, Homo sapiens
cccgcggttggacgcggcgctcagttgccgggcgggggagggcgcgtccggtttttctcaggggacgttgaaattatttttgtaacgggagtcgggagaggacggggcgtgccccgacgtgcgcgcgcgtcgtcctccccggcgctcctccacagctcgctggctcccgccgcggaaaggcgtcatgccgcccaaaaccccccgaaaaacggccgccaccgccgccgctgccgccgcggaacccccggcaccgccgccgccgccccctcctgaggaggacccagagcaggacagcggcccggaggacctgcctctcgtcaggcttgagtttgaagaaacagaagaacctgattttactgcattatgtcagaaattaaagataccagatcatgtcagagagagagcttggttaacttgggagaaagtttcatctgtggatggagtattgggaggttatattcaaaagaaaaaggaactgtggggaatctgtatctttattgcagcagttgacctagatgagatgtcgttcacttttactgagctacagaaaaacatagaaatcagtgtccataaattctttaacttactaaaagaaattgataccagtaccaaagttgataatgctatgtcaagactgttgaagaagtatgatgtattgtttgcactcttcagcaaattggaaaggacatgtgaacttatatatttgacacaacccagcagttcgatatctactgaaataaattctgcattggtgctaaaagtttcttggatcacatttttattagctaaaggggaagtattacaaatggaagatgatctggtgatttcatttcagttaatgctatgtgtccttgactattttattaaactctcacctcccatgttgctcaaagaaccatataaaacagctgttatacccattaatggttcacctcgaacacccaggcgaggtcagaacaggagtgcacggatagcaaaacaactagaaaatgatacaagaattattgaagttctctgtaaagaacatgaatgtaatatagatgaggtgaaaaatgtttatttcaaaaattttataccttttatgaattctcttggacttgtaacatctaatggacttccagaggttgaaaatctttctaaacgatacgaagaaatttatcttaaaaataaagatctagatgcaagattatttttggatcatgataaaactcttcagactgattctatagacagttttgaaacacagagaacaccacgaaaaagtaaccttgatgaagaggtgaatgtaattcctccacacactccagttaggactgttatgaacactatccaacaattaatgatgattttaaattcagcaagtgatcaaccttcagaaaatctgatttcctattttaacaactgcacagtgaatccaaaagaaagtatactgaaaagagtgaaggatataggatacatctttaaagagaaatttgctaaagctgtgggacagggttgtgtcgaaattggatcacagcgatacaaacttggagttcgcttgtattaccgagtaatggaatccatgcttaaatcagaagaagaacgattatccattcaaattctagcaaacttctgcatcacgatacgatttcggg

SEQ ID NO: 440791 - DNA, 4518 bp, Homo sapiens
gggagctggtaggagtccctgtccacaggtcctggctaccctgggaagagacaagaagtaaatgaagaaagaggaagattccaggacctagatatgatttctgtggacacccttcactggtgactgaagtttctaaatagaaatttaaggcagatccagaggagacaaagacagagtatcccaggtgctggccatttcccacaacagaagaaaatgatcaatgcccaggaattgctgacactggaggatgttactgtggagttcacctgggaggagtggcagctcctgggcccttttcagaaggatttgtaccgggatgtgatgttggagatctacagcaacctgctatcaatgggttatcaagtcagcaaaccagatgcactctccaagttggaacgaggagaagaaccatggacaatggaagatgaaaggcacagtcgaatctgtccagaaaacaacgaagttgatgatcatctgcaggatcacttggaaaatcaaaggatgctgaagagtgtggaacaataccatgaacataatgcatttggaaatactgcctctcaaaccaaaagcctttgtcttttcagggaaaatcatgatacatttgagttatatataaaaactttgaaatcaaatttaagtttagtcaaccagaacaaaagctgtgaaattaacaactctactaaatttagtggagatgggaaatcatttcttcatggtaactatgaagaactttattctgcagctaaattctctgtaagtacaaaagccaatagcactaaatcccaagtcagtaagcatcagagaactcatgaaatagaaaaaaaccacgtatgcagtgaatgtgggaaagcgtttgtcaagaagtctcagctcactgatcatgagagagttcatacaggagaaaaaccttatggatgtactttgtgtgcaaaagtgttctccagaaagtccaggctaaatgaacatcaaagaattcataaaagagagaaatcttttatatgcagtgaatgtggaaaagtcttcactatgaagagccgtctgattgaacatcagcgaactcatactggagagaaaccctacatatgcaatgaatgtggaaaaggcttcccaggcaagcgtaatctcattgtacatcagcgaaatcatactggagagaaatcctatatatgtagtgaatgtggaaaaggcttcactgggaagagcatgcttattatacatcagcgaactcatacaggagagaagccctacatctgtagtgaatgtgggaaaggcttcaccacaaaacactatgtcatcatacatcaacgaaatcatacaggagagaaaccatatatatgcaatgaatgtgggaaaggcttcaccatgaagagccgtatgatcgaacatcaacgaactcatacaggagagaaaccctacatatgcagtgaatgtggaaaaggctttcccaggaagagtaatcttattgtacatcagagaaatcatacagtagagaagtcatatctatgtagtgaatgtggaaaaggttttactgtgaaaagcatgctcatcatacatcagcgaactcatacaggagagaagccctacacatgcagtgaatgtgggaaaggcttccccttgaagagtcggctgattgtacatcagcgaactcatactggagagaaaccttacaggtgcagtgaatgtgggaaaggtttcattgtgaatagcggactgatgttacatcagcgaactcatactggagagaaaccgtacatatgcaatgaatgtggaaaaggttttgcctttaagagcaatcttgttgtacaccagcgaactcatactggagagaaaccctttatgtgcagtgaatgtggaaaaggcttcaccatgaaacgctatctcattgtacatcagcaaattcatacagaagagaaatcttgtatatgtagtgaatgtggaagaggctttgccaaggaaacagagcttgctttacataagcaagttcatactggagaaaaaccttatggatgtaatgaatgtggtaaaggcttcactatgaagagccgtctaattgttcatcaacgaactcatacaggagagaaaccctttgtatgcagtgaatgtagaaaagccttctcctcaaagagaaatctcattgtacatcagcgaactcataatggaaacaaaccctgacaatgcagtggacatgttcatgcctttgggaagaaaatctgccttgtacaacatcagagatttcacagtatagattttctacatgtgtactgagtatgaaaaatcatatttcaaaatccagtgttattcactaggatgaatgctatcaatgtcagaaaggcttcaacatgaattcaggctctgaattctttgatgtaccaatgtatagaaaattactcatctgagagagagtctgtggattgggggtaacctttcatttgtcaaccttcattaaaactatgacaacgtccacatgacaaatgtgtaaggtacatagtccttttgcagagaatctgaactgattacatacaaacaaattcatgcagagagaaaaccacgttagtaatgtgaactgattaaacagcagtgtgctcctagcatacatgcatataggcagtgtagagcagcctgttgctagattttcacccttggaagacaatgcaatttccaggagcgaattttaatgaatgcagagaatgcactagtgccttcggtgattaattacctcatattttatgtcacaataaacatgtaggaaataaacttgatacatccaatgcagaaaagtcttgaaaattttctaagtaactatgtcttgaaaagtatttactgagataaatcttacaaaggagtaggctaggaaagccttctatgggaagaaagaccctatctcttcagtgatcataatagatcatcaatgaacttacacatactagcagcattatcatgggaaagcctttgcccagaaataaaaccttaacagttggcagatatatttcatactggagaacaagtttcagatggcagtgaatacacgaggatttcagtgatacatgctgcctcatcatcattacttcatacagaaataaaacttatatgaagagtaactttaaaaaggatcaggaaattcatgaagtaaaaaagtctcatgaaaatgatacataatgccgggcatggtggcttgcacctgtaatcccagcactttgggaggccaaggtgggtggatcacttgaggtcgggagttcgagaccagcctgaccaacatggtgaggcccccctctctgctaaaaatacaaaattagccgagcatggtggctcacgcttgtaatcccagctactctggaggctgggctggagaatcacttgaacctgggaggcagaggtttcagtgagccaagattgcgccattgcattccagcctgggcaacaagagcgaaactctgcctcaaaaaaaaaaaaaaaaaaaaaaccatatttgaggactgtcacaaatctaaactcatgatacacttgatatctattctgtgacagcataccttgcatcatattatcaatgattccataattgtaaagcgggctgttcttatcactgattaaattttaatcctatatataacacaggtgttttctgtgccaatctggtgttatttattagttcttacatattataggccccaaatttatttttttcaatttactgataaatgtaattcagtatatttggatgtgtttatccaagttactaggtaccattatgtagtttacaaaaatgccttaaatgttatttttctaaaatttgttttgaaataattctagattcacaagagattacaaaatatacaaaagtttcctgagtattctttgcttagcatcatcaatgttatcttacataaccataataataaaaaccacggagttctgctcttgttgcccaggttggagtgtaatagcacgatcttggctcactgcaaccccgcctcccaggttcaagagattttcctgcctcagcctcctaagtagctgggattacaggcacccacgaccacgctcgactaatttttgtatttttggtagagacggggtttcactgtgttggccaggctggccttgaactctcgaccccgggcggtccacccgcctcagcctcccaaagtgctgggattacaggcatgagccaccacgcctggcctcctcttgctacctctttatactcacactgtcctcccaatatgacccatggtagccactgatcccattaccctaattttgttatttcaagaatgctattaaaatggaatcgtaaggtacgcaagctttgagatagggctttgttcactcagcaaattacccttaagatctatccaagttgttaggtgtctaaatagttttaatttttgttactgagttagtattcttttaaatggatgcaccagggtttgtgtatccattcactgttgatggacatttgggttgtttccagtgttttgctgttataaataaagatgctgtgactatttgtgtacccga

SEQ ID NO: 440792 - DNA, 335 bp, Homo sapiens
gaattcccgggtcgactactattactaaattcgcggccgcgtagacggtagccactgatcccattaccctaattttgttatttcaagaatgctattaaaatggaatcgtaaggtacgcaagctttgagatagggctttgttcactcagcaaattacccttaagatctatccaagttgttaggtgtctaaatagttttaatttttgttactgagttagtattcttttaaatggatgcaccagggtttgtgtatccattcactgttgatggacatttgggttgtttccagtgttttgctgttataaataaagatgctgtgactatttgtgtacccga

SEQ ID NO: 440793 - DNA, 5177 bp, Homo sapiens
ctgctgaataggtctattctcatagtatttctctatttggcttgactttatttatgtgaacactcctacccatagggcacttgtcaaaaaacaatcagcagcaattgtttaacactagagtgtttaggggagtgacagtgtgtgtctgcgtgatagatggaagtaataagagggcacaggggaaaggggccatacgcataagatgatggaacagagagcctggagggtggggtatagagagtgtaggggaagggagaaggcagacaggtaaaaggaaaaagaatgttaagtgttgttcagcctcaagactgacatgatgaaagtacctttattgtggtttttgtaaattagaatgcatgctttattattaaaaaaaacacaattgaaaatgttaaggaccttttcctccttgcttcttataagaaaccatcataagacataacttgtaataattctgtagaaatatacatatataaagatatatgtatatatatattttaaaatagtatgtttttattgcaaaatattcattagtgtcatcatatcatagccagatctacaaccccagagtaattcccatggttatgttacatggcaaaaaggactctgcattgtaattaagtttattaatcagctgactttagcattgggagattattctggattgcccaagcacttaagaataggagaaaccggagagatgcagcagcaatagtcagtggtttcaaatatgaaagggatttcacatactattgttggctttaaagataggaagtcgtgggggcaaggaaactctctaaaggaaattaatctggcaacaacctaaataattctagaaaaggattcttttccagagtcaagaacagagccaggtggttcttctcttctaaagacatttccatgggccagttccaccgcaagcttctcagagagaatatgttctgccgtacggacaccgaacgtcccctaagatggccgcccccatgatgctctcccctaagggctctggctccgttacctgcaacgcaccgctcgcttattttttgttctagtctctcttgcttcagtttttatacggcttctaaaacgcttcgcatttacaatagtgactgaggtgcccagaggtgactttaattttccattgagctgagacgtcacagccatcataaccgctaagaagggatgccgcgcctttgtggtaataatgggttctggcctttgagaagtttgcgccgttcactgtcccctgcgaggagaagactaacttatttctgttccgtgtctgttcagaggactttacccccacgccgtgtctgcctgtgtgaactcaagcctctgataagctctccattttctgccagggctgaggtgtctggaaatcggacagtttaagaggcctccgtccaccgcgtctcccggccgctgtgccttctgtacgtcacgtactcaaagatggccgcccccagagcggcgaggcgacgccggcgcggacgcgtctcctcctgaggaaaagccggaaggccgcattccgctctccatggaaacgcggctgaccgtctctggaggtttagagggggagggagttgggcgaggggcccagaagtggaagaagtttagggaagtaagttcagcttttaagaggtcgcggcgattccaaggagagtcagtccacaggtcctggctaccctgggaagagacaagaagtaaatgaagaaagaggaagattccaggacctagatatgatttctgtggacacccttcactggtgactgaagtttctaaatagaaatttaaggcagatccagaggagacaaagacagagtatcccaggtgctggccatttcccacaacagaagaaaatgatcaatgcccaggaattgctgacactggaggatgttactgtggagttcacctgggaggagtggcagctcctgggcccttttcagaaggatttgtaccgggatgtgatgttggagatctacagcaacctgctatcaatgggttatcaagtcagcaaaccagatgcactctccaagttggaacgaggagaagaaccatggacaatggaagatgaaaggcacagtcgaatctgtccagaaaacaacgaagttgatgatcatctgcaggatcacttggaaaatcaaaggatgctgaagagtgtggaacaataccatgaacataatgcatttggaaatactgcctctcaaaccaaaagcctttgtcttttcagggaaaatcatgatacatttgagttatatataaaaactttgaaatcaaatttaagtttagtcaaccagaacaaaagctgtgaaattaacaactctactaaatttagtggagatgggaaatcatttcttcatggtaactatgaagaactttattctgcagctaaattctctgtaagtacaaaagccaatagcactaaatcccaagtcagtaagcatcagagaactcatgaaatagaaaaaaaccacgtatgcagtgaatgtgggaaagcgtttgtcaagaagtctcagctcactgatcatgagagagttcatacaggagaaaaaccttatggatgtactttgtgtgcaaaagtgttctccagaaagtccaggctaaatgaacatcaaagaattcataaaagagagaaatcttttatatgcagtgaatgtggaaaagtcttcactatgaagagccgtctgattgaacatcagcgaactcatactggagagaaaccctacatatgcaatgaatgtggaaaaggcttcccaggcaagcgtaatctcattgtacatcagcgaaatcatactggagagaaatcctatatatgtagtgaatgtggaaaaggcttcactgggaagagcatgcttattatacatcagcgaactcatacaggagagaagccctacatctgtagtgaatgtgggaaaggcttcaccacaaaacactatgtcatcatacatcaacgaaatcatacaggagagaaaccatatatatgcaatgaatgtgggaaaggcttcaccatgaagagccgtatgatcgaacatcaacgaactcatacaggagagaaaccctacatatgcagtgaatgtggaaaaggctttcccaggaagagtaatcttattgtacatcagagaaatcatacagtagagaagtcatatctatgtagtgaatgtggaaaaggttttactgtgaaaagcatgctcatcatacatcagcgaactcatacaggagagaagccctacacatgcagtgaatgtgggaaaggcttccccttgaagagtcggctgattgtacatcagcgaactcatactggagagaaaccttacaggtgcagtgaatgtgggaaaggtttcattgtgaatagcggactgatgttacatcagcgaactcatactggagagaaaccgtacatatgcaatgaatgtggaaaaggttttgcctttaagagcaatcttgttgtacaccagcgaactcatactggagagaaaccctttatgtgcagtgaatgtggaaaaggcttcaccatgaaacgctatctcattgtacatcagcaaattcatacagaagagaaatcttgtatatgtagtgaatgtggaagaggctttgccaaggaaacagagcttgctttacataagcaagttcatactggagaaaaaccttatggatgtaatgaatgtggtaaaggcttcactatgaagagccgtctaattgttcatcaacgaactcatacaggagagaaaccctttgtatgcagtgaatgtagaaaagccttctcctcaaagagaaatctcattgtacatcagcgaactcataatggaaacaaaccctgacaatgcagtggacatgttcatgcctttgggaagaaaatctgccttgtacaacatcagagatttcacagtatagattttctacatgtgtactgagtatgaaaaatcatatttcaaaatccagtgttattcactaggatgaatgctatcaatgtcagaaaggcttcaacatgaattcaggctctgaattctttgatgtaccaatgtatagaaaattactcatctgagagagagtctgtggattgggggtaacctttcatttgtcaaccttcattaaaactatgacaacgtccacatgacaaatgtgtaaggtacatagtccttttgcagagaatctgaactgattacatacaaacaaattcatgcagagagaaaaccacgttagtaatgtgaactgattaaacagcagtgtgctcctagcatacatgcatataggcagtgtagagcagcctgttgctagattttcacccttggaagacaatgcaatttccaggagcgaattttaatgaatgcagagaatgcactagtgccttcggtgattaattacctcatattttatgtcacaataaacatgtaggaaataaacttgatacatccaatgcagaaaagtcttgaaaattttctaagtaactatgtcttgaaaagtatttactgagataaatcttacaaaggagtaggctaggaaagccttctatgggaagaaagaccctatctcttcagtgatcataatagatcatcaatgaacttacacatactagcagcattatcatgggaaagcctttgcccagaaataaaaccttaacagttggcagatatatttcatactggagaacaagtttcagatggcagtgaatacacgaggatttcagtgatacatgctgcctcatcatcattacttcatacagaaataaaacttatatgaagagtaactttaaaaaggatcaggaaattcatgaagtaaaaaagtctcatgaaaatgatacataattgctgggattacaggcatgagccaccacgcctggcctcctcttgctacctctttatactcacactgtcctcccaatatgacccatggtagccactgatcccattaccctaattttgttatttcaagaatgctattaaaatggaatcgtaaggtacgcaagctttgagatagggctttgttcactcagcaaattacccttaagatctatccaagttgttaggtgtctaaatagttttaatttttgttactgagttagtattcttttaaatggatgcaccagggtttgtgtatccattcactgttgatggacatttgggttgtttccagtgttttgctgttataaataaagatgctgtgactatttgtgtacccga

SEQ ID NO: 440794 - DNA, 2221 bp, Homo sapiens
ctgctgaataggtctattctcatagtatttctctatttggcttgactttatttatgtgaacactcctacccatagggcacttgtcaaaaaacaatcagcagcaattgtttaacactagagtgtttaggggagtgacagtgtgtgtctgcgtgatagatggaagtaataagagggcacaggggaaaggggccatacgcataagatgatggaacagagagcctggagggtggggtatagagagtgtaggggaagggagaaggcagacaggtaaaaggaaaaagaatgttaagtgttgttcagcctcaagactgacatgatgaaagtacctttattgtggtttttgtaaattagaatgcatgctttattattaaaaaaaacacaattgaaaatgttaaggaccttttcctccttgcttcttataagaaaccatcataagacataacttgtaataattctgtagaaatatacatatataaagatatatgtatatatatattttaaaatagtatgtttttattgcaaaatattcattagtgtcatcatatcatagccagatctacaaccccagagtaattcccatggttatgttacatggcaaaaaggactctgcattgtaattaagtttattaatcagctgactttagcattgggagattattctggattgcccaagcacttaagaataggagaaaccggagagatgcagcagcaatagtcagtggtttcaaatatgaaagggatttcacatactattgttggctttaaagataggaagtcgtgggggcaaggaaactctctaaaggaaattaatctggcaacaacctaaataattctagaaaaggattcttttccagagtcaagaacagagccaggtggttcttctcttctaaagacatttccatgggccagttccaccgcaagcttctcagagagaatatgttctgccgtacggacaccgaacgtcccctaagatggccgcccccatgatgctctcccctaagggctctggctccgttacctgcaacgcaccgctcgcttattttttgttctagtctctcttgcttcagtttttatacggcttctaaaacgcttcgcatttacaatagtgactgaggtgcccagaggtgactttaattttccattgagctgagacgtcacagccatcataaccgctaagaagggatgccgcgcctttgtggtaataatgggttctggcctttgagaagtttgcgccgttcactgtcccctgcgaggagaagactaacttatttctgttccgtgtctgttcagaggactttacccccacgccgtgtctgcctgtgtgaactcaagcctctgataagctctccattttctgccagggctgaggtgtctggaaatcggacagtttaagaggcctccgtccaccgcgtctcccggccgctgtgccttctgtacgtcacgtactcaaagatggccgcccccagagcggcgaggcgacgccggcgcggacgcgtctcctcctgaggaaaagccggaaggccgcattccgctctccatggaaacgcggctgaccgtctctggaggtttagagggggagggagttgggcgaggggcccagaagtggaagaagtttagggaagtaagttcagcttttaagaggtcgcggcgattccaaggagagtcagtccacaggtcctggctaccctgggaagagacaagaagtaaatgaagaaagaggaagattccaggacctagatatgatttctgtggacacccttcactggtgactgaagtttctaaatagaaatttaaggcagatccagaggagacaaagacagagtatcccaggtgctggccatttcccacaacagaagaaaatgatcaatgcccaggaattgctgacactggaggatgttactgtggagttcacctgggaggagtggcagctcctgggcccttttcagaaggatttgtaccgggatgtgatgttggagatctacagcaacctgctatcaatgggttatcaagtcagcaaaccagatgcactctccaagttggaacgaggagaagaaccatggacaatggaagatgaaaggcacagtcgaatctgtccaggtatgtgagaagcagcaagatgcgtaagtaatattatagtcagtgaaagaaggctctgtgggtgtctgaggacacagaagcagtgcctacattaggaatgggaatcgttttccctccacaagaa

SEQ ID NO: 440795 - DNA, 4532 bp, Homo sapiens
ggcgtctgcgttgttggtggcgctatatggtggagtccacaggtcctggctaccctgggaagagacaagaagtaaatgaagaaagaggaagattccaggacctagatatgatttctgtggacacccttcactggtgactgaagtttctaaatagaaatttaaggcagatccagaggagacaaagacagagtatcccaggtgctggccatttcccacaacagaagaaaatgatcaatgcccaggaattgctgacactggaggatgttactgtggagttcacctgggaggagtggcagctcctgggcccttttcagaaggatttgtaccgggatgtgatgttggagatctacagcaacctgctatcaatgggttatcaagtcagcaaaccagatgcactctccaagttggaacgaggagaagaaccatggacaatggaagatgaaaggcacagtcgaatctgtccagaaaacaacgaagttgatgatcatctgcaggatcacttggaaaatcaaaggatgctgaagagtgtggaacaataccatgaacataatgcatttggaaatactgcctctcaaaccaaaagcctttgtcttttcagggaaaatcatgatacatttgagttatatataaaaactttgaaatcaaatttaagtttagtcaaccagaacaaaagctgtgaaattaacaactctactaaatttagtggagatgggaaatcatttcttcatggtaactatgaagaactttattctgcagctaaattctctgtaagtacaaaagccaatagcactaaatcccaagtcagtaagcatcagagaactcatgaaatagaaaaaaaccacgtatgcagtgaatgtgggaaagcgtttgtcaagaagtctcagctcactgatcatgagagagttcatacaggagaaaaaccttatggatgtactttgtgtgcaaaagtgttctccagaaagtccaggctaaatgaacatcaaagaattcataaaagagagaaatcttttatatgcagtgaatgtggaaaagtcttcactatgaagagccgtctgattgaacatcagcgaactcatactggagagaaaccctacatatgcaatgaatgtggaaaaggcttcccaggcaagcgtaatctcattgtacatcagcgaaatcatactggagagaaatcctatatatgtagtgaatgtggaaaaggcttcactgggaagagcatgcttattatacatcagcgaactcatacaggagagaagccctacatctgtagtgaatgtgggaaaggcttcaccacaaaacactatgtcatcatacatcaacgaaatcatacaggagagaaaccatatatatgcaatgaatgtgggaaaggcttcaccatgaagagccgtatgatcgaacatcaacgaactcatacaggagagaaaccctacatatgcagtgaatgtggaaaaggctttcccaggaagagtaatcttattgtacatcagagaaatcatacagtagagaagtcatatctatgtagtgaatgtggaaaaggttttactgtgaaaagcatgctcatcatacatcagcgaactcatacaggagagaagccctacacatgcagtgaatgtgggaaaggcttccccttgaagagtcggctgattgtacatcagcgaactcatactggagagaaaccttacaggtgcagtgaatgtgggaaaggtttcattgtgaatagcggactgatgttacatcagcgaactcatactggagagaaaccgtacatatgcaatgaatgtggaaaaggttttgcctttaagagcaatcttgttgtacaccagcgaactcatactggagagaaaccctttatgtgcagtgaatgtggaaaaggcttcaccatgaaacgctatctcattgtacatcagcaaattcatacagaagagaaatcttgtatatgtagtgaatgtggaagaggctttgccaaggaaacagagcttgctttacataagcaagttcatactggagaaaaaccttatggatgtaatgaatgtggtaaaggcttcactatgaagagccgtctaattgttcatcaacgaactcatacaggagagaaaccctttgtatgcagtgaatgtagaaaagccttctcctcaaagagaaatctcattgtacatcagcgaactcataatggaaacaaaccctgacaatgcagtggacatgttcatgcctttgggaagaaaatctgccttgtacaacatcagagatttcacagtatagattttctacatgtgtactgagtatgaaaaatcatatttcaaaatccagtgttattcactaggatgaatgctatcaatgtcagaaaggcttcaacatgaattcaggctctgaattctttgatgtaccaatgtatagaaaattactcatctgagagagagtctgtggattgggggtaacctttcatttgtcaaccttcattaaaactatgacaacgtccacatgacaaatgtgtaaggtacatagtccttttgcagagaatctgaactgattacatacaaacaaattcatgcagagagaaaaccacgttagtaatgtgaactgattaaacagcagtgtgctcctagcatacatgcatataggcagtgtagagcagcctgttgctagattttcacccttggaagacaatgcaatttccaggagcgaattttaatgaatgcagagaatgcactagtgccttcggtgattaattacctcatattttatgtcacaataaacatgtaggaaataaacttgatacatccaatgcagaaaagtcttgaaaattttctaagtaactatgtcttgaaaagtatttactgagataaatcttacaaaggagtaggctaggaaagccttctatgggaagaaagaccctatctcttcagtgatcataatagatcatcaatgaacttacacatactagcagcattatcatgggaaagcctttgcccagaaataaaaccttaacagttggcagatatatttcatactggagaacaagtttcagatggcagtgaatacacgaggatttcagtgatacatgctgcctcatcatcattacttcatacagaaataaaacttatatgaagagtaactttaaaaaggatcaggaaattcatgaagtaaaaaagtctcatgaaaatgatacataatgccgggcatggtggcttgcacctgtaatcccagcactttgggaggccaaggtgggtggatcacttgaggtcgggagttcgagaccagcctgaccaacatggtgaggcccccctctctgctaaaaatacaaaattagccgagcatggtggctcacgcttgtaatcccagctactctggaggctgggctggagaatcacttgaacctgggaggcagaggtttcagtgagccaagattgcgccattgcattccagcctgggcaacaagagcgaaactctgcctcaaaaaaaaaaaaaaaaaaaaaaccatatttgaggactgtcacaaatctaaactcatgatacacttgatatctattctgtgacagcataccttgcatcatattatcaatgattccataattgtaaagcgggctgttcttatcactgattaaattttaatcctatatataacacaggtgttttctgtgccaatctggtgttatttattagttcttacatattataggccccaaatttatttttttcaatttactgataaatgtaattcagtatatttggatgtgtttatccaagttactaggtaccattatgtagtttacaaaaatgccttaaatgttatttttctaaaatttgttttgaaataattctagattcacaagagattacaaaatatacaaaagtttcctgagtattctttgcttagcatcatcaatgttatcttacataaccataataataaaaaccacggagttctgctcttgttgcccaggttggagtgtaatagcacgatcttggctcactgcaaccccgcctcccaggttcaagagattttcctgcctcagcctcctaagtagctgggattacaggcacccacgaccacgctcgactaatttttgtatttttggtagagacggggtttcactgtgttggccaggctggccttgaactctcgaccccgggcggtccacccgcctcagcctcccaaagtgctgggattacaggcatgagccaccacgcctggcctcctcttgctacctctttatactcacactgtcctcccaatatgacccatggtagccactgatcccattaccctaattttgttatttcaagaatgctattaaaatggaatcgtaaggtacgcaagctttgagatagggctttgttcactcagcaaattacccttaagatctatccaagttgttaggtgtctaaatagttttaatttttgttactgagttagtattcttttaaatggatgcaccagggtttgtgtatccattcactgttgatggacatttgggttgtttccagtgttttgctgttataaataaagatgctgtgactatttgtgtacccga

SEQ ID NO: 440796 - DNA, 4113 bp, Homo sapiens
ctgctgaataggtctattctcatagtatttctctatttggcttgactttatttatgtgaacactcctacccatagggcacttgtcaaaaaacaatcagcagcaattgtttaacactagagtgtttaggggagtgacagtgtgtgtctgcgtgatagatggaagtaataagagggcacaggggaaaggggccatacgcataagatgatggaacagagagcctggagggtggggtatagagagtgtaggggaagggagaaggcagacaggtaaaaggaaaaagaatgttaagtgttgttcagcctcaagactgacatgatgaaagtacctttattgtggtttttgtaaattagaatgcatgctttattattaaaaaaaacacaattgaaaatgttaaggaccttttcctccttgcttcttataagaaaccatcataagacataacttgtaataattctgtagaaatatacatatataaagatatatgtatatatatattttaaaatagtatgtttttattgcaaaatattcattagtgtcatcatatcatagccagatctacaaccccagagtaattcccatggttatgttacatggcaaaaaggactctgcattgtaattaagtttattaatcagctgactttagcattgggagattattctggattgcccaagcacttaagaataggagaaaccggagagatgcagcagcaatagtcagtggtttcaaatatgaaagggatttcacatactattgttggctttaaagataggaagtcgtgggggcaaggaaactctctaaaggaaattaatctggcaacaacctaaataattctagaaaaggattcttttccagagtcaagaacagagccaggtggttcttctcttctaaagacatttccatgggccagttccaccgcaagcttctcagagagaatatgttctgccgtacggacaccgaacgtcccctaagatggccgcccccatgatgctctcccctaagggctctggctccgttacctgcaacgcaccgctcgcttattttttgttctagtctctcttgcttcagtttttatacggcttctaaaacgcttcgcatttacaatagtgactgaggtgcccagaggtgactttaattttccattgagctgagacgtcacagccatcataaccgctaagaagggatgccgcgcctttgtggtaataatgggttctggcctttgagaagtttgcgccgttcactgtcccctgcgaggagaagactaacttatttctgttccgtgtctgttcagaggactttacccccacgccgtgtctgcctgtgtgaactcaagcctctgataagctctccattttctgccagggctgaggtgtctggaaatcggacagtttaagaggcctccgtccaccgcgtctcccggccgctgtgccttctgtacgtcacgtactcaaagatggccgcccccagagcggcgaggcgacgccggcgcggacgcgtctcctcctgaggaaaagccggaaggccgcattccgctctccatggaaacgcggctgaccgtctctggaggtttagagggggagggagttgggcgaggggcccagaagtggaagaagtttagggaagtaagttcagcttttaagaggtcgcggcgattccaaggagagtcagtccacaggtcctggctaccctgggaagagacaagaagtaaatgaagaaagaggaagattccaggacctagatatgatttctgtggacacccttcactggtgactgaagtttctaaatagaaatttaaggcagatccagaggagacaaagacagagtatcccaggtgctggccatttcccacaacagaagaaaatgatcaatgcccaggaattgctgacactggaggatgttactgtggagttcacctgggaggagtggcagctcctgggcccttttcagaaggatttgtaccgggatgtgatgttggagatctacagcaacctgctatcaatgggttatcaagtcagcaaaccagatgcactctccaagttggaacgaggagaagaaccatggacaatggaagatgaaaggcacagtcgaatctgtccagaaaacaacgaagttgatgatcatctgcaggatcacttggaaaatcaaaggatgctgaagagtgtggaacaataccatgaacataatgcatttggaaatactgcctctcaaaccaaaagcctttgtcttttcagggaaaatcatgatacatttgagttatatataaaaactttgaaatcaaatttaagtttagtcaaccagaacaaaagctgtgaaattaacaactctactaaatttagtggagatgggaaatcatttcttcatggtaactatgaagaactttattctgcagctaaattctctgtaagtacaaaagccaatagcactaaatcccaagtcagtaagcatcagagaactcatgaaatagaaaaaaaccacgtatgcagtgaatgtgggaaagcgtttgtcaagaagtctcagctcactgatcatgagagagttcatacaggagaaaaaccttatggatgtactttgtgtgcaaaagtgttctccagaaagtccaggctaaatgaacatcaaagaattcataaaagagagaaatcttttatatgcagtgaatgtggaaaagtcttcactatgaagagccgtctgattgaacatcagcgaactcatactggagagaaaccctacatatgcaatgaatgtggaaaaggcttcccaggcaagcgtaatctcattgtacatcagcgaaatcatactggagagaaatcctatatatgtagtgaatgtggaaaaggcttcactgggaagagcatgcttattatacatcagcgaactcatacaggagagaagccctacatctgtagtgaatgtgggaaaggcttcaccacaaaacactatgtcatcatacatcaacgaaatcatacaggagagaaaccatatatatgcaatgaatgtgggaaaggcttcaccatgaagagccgtatgatcgaacatcaacgaactcatacaggagagaaaccctacatatgcagtgaatgtggaaaaggctttcccaggaagagtaatcttattgtacatcagagaaatcatacagtagagaagtcatatctatgtagtgaatgtggaaaaggttttactgtgaaaagcatgctcatcatacatcagcgaactcatacaggagagaagccctacacatgcagtgaatgtgggaaaggcttccccttgaagagtcggctgattgtacatcagcgaactcatactggagagaaaccttacaggtgcagtgaatgtgggaaaggtttcattgtgaatagcggactgatgttacatcagcgaactcatactggagagaaaccgtacatatgcaatgaatgtggaaaaggttttgcctttaagagcaatcttgttgtacaccagcgaactcatactggagagaaaccctttatgtgcagtgaatgtggaaaaggcttcaccatgaaacgctatctcattgtacatcagcaaattcatacagaagagaaatcttgtatatgtagtgaatgtggaagaggctttgccaaggaaacagagcttgctttacataagcaagttcatactggagaaaaaccttatggatgtaatgaatgtggtaaaggcttcactatgaagagccgtctaattgttcatcaacgaactcatacaggagagaaaccctttgtatgcagtgaatgtagaaaagccttctcctcaaagagaaatctcattgtacatcagcgaactcataatggaaacaaaccctgacaatgcagtggacatgttcatgcctttgggaagaaaatctgccttgtacaacatcagagatttcacagtatagattttctacatgtgtactgagtatgaaaaatcatatttcaaaatccagtgttattcactaggatgaatgctatcaatgtcagaaaggcttcaacatgaattcaggctctgaattctttgatgtaccaatgtatagaaaattactcatctgagagagagtctgtggattgggggtaacctttcatttgtcaaccttcattaaaactatgacaacgtccacatg

SEQ ID NO: 440797 - DNA, 1287 bp, Homo sapiens
tccactgagttgacacgcagacgcagcctcaggaccctaaactctacgccccagcacaccctaccaagcgagcgcccgcggccgcgtgacgtcatctaccccaaacgctgtggccccggccacgcacggcttcggggcgggactacgcggtgacgtcgaggtgcgcggcgcagcgcgcggcgtcagtcttggctggcagacctgtactccgtactccgtacttcgtagtcgcagcggcgcggtcttcggcagtctagtcatccaccgccatcctgggccccacgtgttgcctgaccattcctgagcccaggtgggagccgtggctgaggtgacggtctcaaagtggaagagcttactgtcacagcaactcctttgcaagatgccccggccaggaatagttgctgaacaccccaggcctgctgaggtccctccttgagtctcatgttcaagcagtcttgtgagtaaagcactggctaccccttttcacttactatcttttcaagcatgttctaccaccttggaaggtaagaggttagtaccttcttccagagcagagggcaggcattcttgctgtgcgttgtgaaagggtagagtcctgcgctcctttcttgtagtagtccaatggctcatgcaggtgcctctgactcccctatgggaactggggcttgggagggtggtggaaaatgctgatgctctggctattgctattgttttgaataatcagtggtcccttgtccctaatcgaggaattttgtattttctaccagtgtccatgaaactgggaggcgaccgtgttagctgccagttcctgacagccacctctcaccagtggcttcactctgtgtccctgacccagcacatggcacaagagtgcctgccatccgtcagtgtttctacagcagcaatcccaagatgctggagctagaggggacctgacctgagagaagataccttcagtggctgccaggctgttccttggaacctgtgcagggatgaggcctgcctgtgttaatacacctagtgaggagtggagctgaatttgaatgcaagccttggcaccttaattgagcaagtttgaaacctcgcttgttgcccttctggaaggagtcaggaatttccagttctgggcctgggctgtgggtctggcagacagacctctggccctaggtttgggtgccaggttctctgcttccagaatgagaagctttgctgtgcaccaggacctgggcccttctggtatctcctgaatgaaaaacaagggatatttaataaatatggatttaaata

SEQ ID NO: 440798 - DNA, 744 bp, Homo sapiens
tccactgagttgacacgcagacgcagcctcaggaccctaaactctacgccccagcacaccctaccaagcgagcgcccgcggccgcgtgacgtcatctaccccaaacgctgtggccccggccacgcacggcttcggggcgggactacgcggtgacgtcgaggtgcgcggcgcagcgcgcggcgtcagtcttggctggcagacctgtactccgtactccgtacttcgtagtcgcagcggcgcggtcttcggcagtctagtcatccaccgccatcctgggccccacgtgttgcctgaccattcctgagcccaggtgggagccgtggctgaggtgacggtctcaaagtggaagagcttactgtcacagcaactcctttgcaagatgccccggccaggaatagttgctgaacaccccaggcctgctgaggtccctccttgagtctcatgttcaagcagtctttgtccatgaaactgggaggcgaccgtgttagctgccagttcctgacagccacctctcaccagtggcttcactctgtgtccctgacccagcacatggcacaagagtgcctgccatccgtcagtgtttctacagcagcaatcccaagatgctggagctagaggggacctgacctgagagaagataccttcagtggctgccaggctgttccttggaacctgtgcagggatgaggcctgccctgttttcctcccagtgacgatcccagctgcatctcatcgcgctttgcct

SEQ ID NO: 440799 - DNA, 464 bp, Homo sapiens
caggcctctcagctcatggtgggagtgggttcaggagttggtaagtagggttcagttctgttgttgccaccgatggcaacaggggtttgtaataatccctagttgtgtcaattatgtcacttaattttcacaacaggtctctgaagtgtttctcatctcatttttacagatgaggcctgcctgtgttaatacacctagtgaggagtggagctgaatttgaatgcaagccttggcaccttaattgagcaagtttgaaacctcgcttgttgcccttctggaaggagtcaggaatttccagttctgggcctgggctgtgggtctggcagacagacctctggccctaggtttgggtgccaggttctctgcttccagaatgagaagctttgctgtgcaccaggacctgggcccttctggtatctcctgaatgaaaaacaagggatatttaataaatatggatttaaata

SEQ ID NO: 440800 - DNA, 1436 bp, Homo sapiens
  misc_feature (1436)..(1436): n is a, c, g, or t
tccactgagttgacacgcagacgcagcctcaggaccctaaactctacgccccagcacaccctaccaagcgagcgcccgcggccgcgtgacgtcatctaccccaaacgctgtggccccggccacgcacggcttcggggcgggactacgcggtgacgtcgaggtgcgcggcgcagcgcgcggcgtcagtcttggctggcagacctgtactccgtactccgtacttcgtagtcgcagcggcgcggtcttcggcagtctagtcatccaccgccatcctgggccccacgtgttgcctgaccattcctgagcccaggtgggagccgtggctgaggtgacggtctcaaagtggaagagcttactgtcacagcaactcctttgcaagatgccccgtgtccatgaaactgggaggcgaccgtgttagctgccagttcctgacagccacctctcaccagtggcttcactctgtgtccctgacccagcacatggcacaagagtgcctgccatccgtcagtgtttctacagcagcaatcccaagatgctggagctagaggggacctgacctgagagaagataccttcagtggctgccaggctgttccttggaacctgtgcagggatgaggcctgcctgtgttaatacacctagtgaggagtggagctgaatttgaatgcaagccttggcaccttaattgagcaagtttgaaacctcgcttgttgcccttctggaaggagtcaggaatttccagttctgggcctgggctgtgggtctggcagacagacctctggccctaggtttgggtgccaggttctctgcttccagaatgagaagctttgctgtgcaccaggacctgggcccttctggtatctcctgaatgaaaaacaagggatatttaataaatatggatttaaataaaaaaaagaaaaaaaaaaaaaaaaaaaaaaaaaaaagaaaaagaaaaaaaaaaaaaacacacacagaaaacaaaaaaaaagacggggacacacaaacaaactccacagaggagacacaaacagcacaacacaaatgagaaaaaagagcacacaaaggagataaaaaaaacaagcgaaggctacaaacactgagaggaacaaagccgacaggaaaacatagagagagacacaaacaggcgcgggcgaaacacgcgaaccacccgagaataagacccccacggagaacaacactcacagagatcgtaggaacaccaacaatcgctgggcaacaacacgcgccgcagatatctaatacgggaggcgagcgactatgcaagggagcagaaggacgacggcacgcacgcgagaaagagcagcaggcagcacgacagagcgaggaggacgacgcgagacagatacacgagcaaggaaagacgagagatacgtataagagaacaaaaaccgacaaccagtgaggtccgcacagggn

SEQ ID NO: 440801 - DNA, 591 bp, Homo sapiens
tccactgagttgacacgcagacgcagcctcaggaccctaaactctacgccccagcacaccctaccaagcgagcgcccgcggccgcgtgacgtcatctaccccaaacgctgtggccccggccacgcacggcttcggggcgggactacgcggtgacgtcgaggtgcgcggcgcagcgcgcggcgtcagtcttggctggcagacctgtactccgtactccgtacttcgtagtcgcagcggcgcggtcttcggcagtctagtcatccaccgccatcctgggccccacgtgttgcctgaccattcctgagcccaggtaggggtcctgggggattgggttcagtggcgggcggcgtgggaggctgggccgcagtgagtgggggcaccagtgattcttggagaccaagccttcactacacgtgctacttcctctcaagaggcggttgagcgcgttcggaacattttacccggaggagactcggggattacttgatgagtaacctcgtgcttctctttcagccgagaagtggggcttctgcatgacctgggtggaccccagtaggtgggatgggacgtgtggtcaggagggacctcacc

SEQ ID NO: 440802 - DNA, 835 bp, Homo sapiens
tccactgagttgacacgcagacgcagcctcaggaccctaaactctacgccccagcacaccctaccaagcgagcgcccgcggccgcgtgacgtcatctaccccaaacgctgtggccccggccacgcacggcttcggggcgggactacgcggtgacgtcgaggtgcgcggcgcagcgcgcggcgtcagtcttggctggcagacctgtactccgtactccgtacttcgtagtcgcagcggcgcggtcttcggcagtctagtcatccaccgccatcctgggccccacgtgttgcctgaccattcctgagcccaggtgggagccgtggctgaggtgacggtctcaaagtggaagagcttactgtcacagcaactcctttgcaagatgccccggtaaatcacgttgcagagaccccaactctgccttcctggaactaggcctgcgttttctctgaaccattatttcatggggaaaatgaaatctacttcatgtgcctggtctacttactccttcagaagtgatttctgagccgtaagatacatgagaaaaaaatgaaggggaaaaggcagtatttatattaactacatgatgataaggatgtttctggtcacagtgaaaagccatgctagaattgtagtgtcatagaataatgtggaagtttagttcgtgttgtctgatctatttaataatttaataaggttatctcttccaagacaccttcccttcttcctcagccagaaaggatctttccctgagagtcattagtagctctgggctcctggaaccaagctcaggtgcctaattgaactctggtctcttcccacagcccccagcagggac

SEQ ID NO: 440803 - DNA, 1968 bp, Homo sapiens
ggtgcttgggtctgcggtgaccctatgcattccttcagtgcttgctagaacagttttgaaacggtttgaggccttgccctgctccatccagagcaaggttatagaaatttcagacaatgacttcctccctcctggatctagtgtcctgggccttgtatagatccgtgccatctaatgtggtagccacttggcacacatgattaaattaaatttggagttctatttcattttcacactagccacatttcagatgatcagtagccacaggtggccagtggctaccatatggaccgcacagattagagggcatttctgtcgctgtggaagtgttttggacaatgctggtgtgaaaggtgaagggaatcctgagtgtttgctgtgctccaggctcagtacaaattttattttattatacacttaaagcaaaagtcttataaaagttgaggatgaagccaagagtggtggtaagggtaggagttgaaacagtgaagaggaataacagggaagagtcctgccctgagagactcatggaataggatatttacaaggcaaagcaaagagaaccaaagtctcagttctgcagaggagctgagtgccccaggagctagtggagggtgaggtcaatgtgtgctcatcttaaaggaaaaactcatggaagaggaaggtgctaatgttgaacacctattttgcgccagacctcttaattgttttaaatctttgaggtatcatcatgaggtcgtttttaagttcagtacagatgaggggcccaaggtcagaattatgtgtccagggttgcccagccacaaaccagcagatcagggtttgatgccaggcctctctaaccctgcatcctgagtggaatatagaagccggtgggaagtttggatgggaaggagatggatgccttcaagttcttgtcttggtgttaggtgtgttaaaggactggctgggatgagaagagtgttgctggcttgagcatagcacgagcagcacagctcctgtgttcctctgggtggtggggtcacctctcttaaaggtagaggctttcagctgattctgtcttttcaggccaggaatagttgctgaacaccccaggcctgctgaggtccctccttgagtctcatgttcaagcagtcttgtgagtaaagcactggctaccccttttcacttactatcttttcaagcatgttctaccaccttggaaggtaagaggttagtaccttcttccagagcagagggcaggcattcttgctgtgcgttgtgaaagggtagagtcctgcgctcctttcttgtagtagtccaatggctcatgcaggtgcctctgactcccctatgggaactggggcttgggagggtggtggaaaatgctgatgctctggctattgctattgttttgaataatcagtggtcccttgtccctaatcgaggaattttgtattttctaccagtgtccatgaaactgggaggcgaccgtgttagctgccagttcctgacagccacctctcaccagtggcttcactctgtgtccctgacccagcacatggcacaagagtgcctgccatccgtcagtgtttctacagcagcaatcccaagatgctggagctagaggggacctgacctgagagaagataccttcagtggctgccaggctgttccttggaacctgtgcagggatgaggcctgcctgtgttaatacacctagtgaggagtggagctgaatttgaatgcaagccttggcaccttaattgagcaagtttgaaacctcgcttgttgcccttctggaaggagtcaggaatttccagttctgggcctgggctgtgggtctggcagacagacctctggccctaggtttgggtgccaggttctctgcttccagaatgagaagctttgctgtgcaccaggacctgggcccttctggtatctcctgaatgaaaaacaagggatatttaataaatatggatttaaata

SEQ ID NO: 440804 - DNA, 1881 bp, Homo sapiens
tctaccataaccgtgctattaaaaattgtcggtatggggcgaccgtcggagcatgaacccaacctctcgagctagtacatgctatagacttcacctagtcaatagcgaactagctatactgcaattgatcctaataatcttgactcagcggaacagagttacgcctacgggataacgagctgcaatccgtattgctagagtccatatcgaacgatgagggtttacgacctcgatgttggatcaggacatcccggtggtatcagcaggtgaagggaatcctgagtgtttgctgtgctccaggctcagtacaaattttattttattatacacttaaagcaaaagtcttataaaagttgaggatgaagccaagagtggtggtaagggtaggagttgaaacagtgaagaggaataacagggaagagtcctgccctgagagactcatggaataggatatttacaaggcaaagcaaagagaaccaaagtctcagttctgcagaggagctgagtgccccaggagctagtggagggtgaggtcaatgtgtgctcatcttaaaggaaaaactcatggaagaggaaggtgctaatgttgaacacctattttgcgccagacctcttaattgttttaaatctttgaggtatcatcatgaggtcgtttttaagttcagtacagatgaggggcccaaggtcagaattatgtgtccagggttgcccagccacaaaccagcagatcagggtttgatgccaggcctctctaaccctgcatcctgagtggaatatagaagccggtgggaagtttggatgggaaggagatggatgccttcaagttcttgtcttggtgttaggtgtgttaaaggactggctgggatgagaagagtgttgctggcttgagcatagcacgagcagcacagctcctgtgttcctctgggtggtggggtcacctctcttaaaggtagaggctttcagctgattctgtcttttcaggccaggaatagttgctgaacaccccaggcctgctgaggtccctccttgagtctcatgttcaagcagtcttgtgagtaaagcactggctaccccttttcacttactatcttttcaagcatgttctaccaccttggaaggtaagaggttagtaccttcttccagagcagagggcaggcattcttgctgtgcgttgtgaaagggtagagtcctgcgctcctttcttgtagtagtccaatggctcatgcaggtgcctctgactcccctatgggaactggggcttgggagggtggtggaaaatgctgatgctctggctattgctattgttttgaataatcagtggtcccttgtccctaatcgaggaattttgtattttctaccagtgtccatgaaactgggaggcgaccgtgttagctgccagttcctgacagccacctctcaccagtggcttcactctgtgtccctgacccagcacatggcacaagagtgcctgccatccgtcagtgtttctacagcagcaatcccaagatgctggagctagaggggacctgacctgagagaagataccttcagtggctgccaggctgttccttggaacctgtgcagggatgaggcctgcctgtgttaatacacctagtgaggagtggagctgaatttgaatgcaagccttggcaccttaattgagcaagtttgaaacctcgcttgttgcccttctggaaggagtcaggaatttccagttctgggcctgggctgtgggtctggcagacagacctctggccctaggtttgggtgccaggttctctgcttccagaatgagaagctttgctgtgcaccaggacctgggcccttctggtatctcctgaatgaaaaacaagggatatttaataaatatggatttaaata

SEQ ID NO: 440805 - DNA, 1816 bp, Homo sapiens
  misc_feature (1754)..(1754): n is a, c, g, or t
  misc_feature (1760)..(1760): n is a, c, g, or t
  misc_feature (1762)..(1762): n is a, c, g, or t
  misc_feature (1766)..(1766): n is a, c, g, or t
ggtgcttgggtctgcggtgaccctatgcattccttcagtgcttgctagaacagttttgaaacggtttgaggccttgccctgctccatccagagcaaggttatagaaatttcagacaatgacttcctccctcctggatctagtgtcctgggccttgtatagatccgtgccatctaatgtggtagccacttggcacacatgattaaattaaatttggagttctatttcattttcacactagccacatttcagatgatcagtagccacaggtggccagtggctaccatatggaccgcacagattagagggcatttctgtcgctgtggaagtgttttggacaatgctggtgtgaaaggtgaagggaatcctgagtgtttgctgtgctccaggctcagtacaaattttattttattatacacttaaagcaaaagtcttataaaagttgaggatgaagccaagagtggtggtaagggtaggagttgaaacagtgaagaggaataacagggaagagtcctgccctgagagactcatggaataggatatttacaaggcaaagcaaagagaaccaaagtctcagttctgcagaggagctgagtgccccaggagctagtggagggtgaggtcaatgtgtgctcatcttaaaggaaaaactcatggaagaggaaggtgctaatgttgaacacctattttgcgccagacctcttaattgttttaaatctttgaggtatcatcatgaggtcgtttttaagttcagtacagatgaggggcccaaggtcagaattatgtgtccagggttgcccagccacaaaccagcagatcagggtttgatgccaggcctctctaaccctgcatcctgagtggaatatagaagccggtgggaagtttggatgggaaggagatggatgccttcaagttcttgtcttggtgttaggtgtgttaaaggactggctgggatgagaagagtgttgctggcttgagcatagcacgagcagcacagctcctgtgttcctctgggtggtggggtcacctctcttaaaggtagaggctttcagctgattctgtcttttcaggccaggaatagttgctgaacaccccaggcctgctgaggtccctccttgagtctcatgttcaagcagtcttgtgagtaaagcactggctaccccttttcacttactatcttttcaagcatgttctaccaccttggaaggtaagaggttagtaccttcttccagagcagagggcaggcattcttgctgtgcgttgtgaaagggtagagtcctgcgctcctttcttgtagtagtccaatggctcatgcaggtgcctctgactcccctatgggaactggggcttgggagggtggtggaaaatgctgatgctctggctattgctattgttttgaataatcagtggtcccttgtccctaatcgaggaattttgtattttctaccagtgtccatgaaactgggaggcgaccgtgttagctgccagttcctgacagccacctctcaccagtggcttcactctgtgtccctgacccagcacatggcacaagagtgcctgccatccgtcagtgtttctacagcagcaatcccaagatgctggagctagaggggacctgacctgagagaagataccttcagtggctgccaggctgttccttggaacctgtgcaggggtaagtgtgcaggaaggtctgacctggcaagtcacttcactcctgttttatttagagtcacctggctaagagaaagttcanaaaccntnaccntatctctcgacccttcccgtatgatcagagtcagtcgattggatcccgga

SEQ ID NO: 440806 - DNA, 977 bp, Homo sapiens
tccactgagttgacacgcagacgcagcctcaggaccctaaactctacgccccagcacaccctaccaagcgagcgcccgcggccgcgtgacgtcatctaccccaaacgctgtggccccggccacgcacggcttcggggcgggactacgcggtgacgtcgaggtgcgcggcgcagcgcgcggcgtcagtcttggctggcagacctgtactccgtactccgtacttcgtagtcgcagcggcgcggtcttcggcagtctagtcatccaccgccatcctgggccccacgtgttgcctgaccattcctgagcccaggtgggagccgtggctgaggtgacggtctcaaagtggaagagcttactgtcacagcaactcctttgcaagatgccccggccaggaatagttgctgaacaccccaggcctgctgaggtccctccttgagtctcatgttcaagcagtctttgtccatgaaactgggaggcgaccgtgttagctgccagttcctgacagccacctctcaccagtggcttcactctgtgtccctgacccagcacatggcacaagagtgcctgccatccgtcagtgtttctacagcagcaatcccaagatgctggagctagaggggacctgacctgagagaagataccttcagtggctgccaggctgttccttggaacctgtgcagggatgaggcctgcctgtgttaatacacctagtgaggagtggagctgaatttgaatgcaagccttggcaccttaattgagcaagtttgaaacctcgcttgttgcccttctggaaggagtcaggaatttccagttctgggcctgggctgtgggtctggcagacagacctctggccctaggtttgggtgccaggttctctgcttccagaatgagaagctttgctgtgcaccaggacctgggcccttctggtatctcctgaatgaaaaacaagggatatttaataaatatggatttaaata

SEQ ID NO: 440807 - DNA, 1135 bp, Homo sapiens
  misc_feature (1073)..(1073): n is a, c, g, or t
  misc_feature (1079)..(1079): n is a, c, g, or t
  misc_feature (1081)..(1081): n is a, c, g, or t
  misc_feature (1085)..(1085): n is a, c, g, or t
tccactgagttgacacgcagacgcagcctcaggaccctaaactctacgccccagcacaccctaccaagcgagcgcccgcggccgcgtgacgtcatctaccccaaacgctgtggccccggccacgcacggcttcggggcgggactacgcggtgacgtcgaggtgcgcggcgcagcgcgcggcgtcagtcttggctggcagacctgtactccgtactccgtacttcgtagtcgcagcggcgcggtcttcggcagtctagtcatccaccgccatcctgggccccacgtgttgcctgaccattcctgagcccaggtgggagccgtggctgaggtgacggtctcaaagtggaagagcttactgtcacagcaactcctttgcaagatgccccggccaggaatagttgctgaacaccccaggcctgctgaggtccctccttgagtctcatgttcaagcagtcttgtgagtaaagcactggctaccccttttcacttactatcttttcaagcatgttctaccaccttggaaggtaagaggttagtaccttcttccagagcagagggcaggcattcttgctgtgcgttgtgaaagggtagagtcctgcgctcctttcttgtagtagtccaatggctcatgcaggtgcctctgactcccctatgggaactggggcttgggagggtggtggaaaatgctgatgctctggctattgctattgttttgaataatcagtggtcccttgtccctaatcgaggaattttgtattttctaccagtgtccatgaaactgggaggcgaccgtgttagctgccagttcctgacagccacctctcaccagtggcttcactctgtgtccctgacccagcacatggcacaagagtgcctgccatccgtcagtgtttctacagcagcaatcccaagatgctggagctagaggggacctgacctgagagaagataccttcagtggctgccaggctgttccttggaacctgtgcaggggtaagtgtgcaggaaggtctgacctggcaagtcacttcactcctgttttatttagagtcacctggctaagagaaagttcanaaaccntnaccntatctctcgacccttcccgtatgatcagagtcagtcgattggatcccgga

SEQ ID NO: 440808 - DNA, 830 bp, Homo sapiens
tccactgagttgacacgcagacgcagcctcaggaccctaaactctacgccccagcacaccctaccaagcgagcgcccgcggccgcgtgacgtcatctaccccaaacgctgtggccccggccacgcacggcttcggggcgggactacgcggtgacgtcgaggtgcgcggcgcagcgcgcggcgtcagtcttggctggcagacctgtactccgtactccgtacttcgtagtcgcagcggcgcggtcttcggcagtctagtcatccaccgccatcctgggccccacgtgttgcctgaccattcctgagcccagtgtccatgaaactgggaggcgaccgtgttagctgccagttcctgacagccacctctcaccagtggcttcactctgtgtccctgacccagcacatggcacaagagtgcctgccatccgtcagtgtttctacagcagcaatcccaagatgctggagctagaggggacctgacctgagagaagataccttcagtggctgccaggctgttccttggaacctgtgcagggatgaggcctgcctgtgttaatacacctagtgaggagtggagctgaatttgaatgcaagccttggcaccttaattgagcaagtttgaaacctcgcttgttgcccttctggaaggagtcaggaatttccagttctgggcctgggctgtgggtctggcagacagacctctggccctaggtttgggtgccaggttctctgcttccagaatgagaagctttgctgtgcaccaggacctgggcccttctggtatctcctgaatgaaaaacaagggatatttaataaatatggatttaaata

SEQ ID NO: 440809 - DNA, 778 bp, Homo sapiens
cttgctgcagcattattctgggaatttatgccatgggcccactttctattgatagatgaacctgtcagttggttcattcctcatgcattccaaaaacatgcattgagcttgggtcaagggccaggcatgaggataggcatagttcctgccctcaagaagttcatgagcataggaggtgtatagacaaattgcaaaacaggcaagggtaccaaggtggcataagaaagcatcaattaactatcttggggaccagagaaaccctgagagaagcaatggctgctaaggttttaaaacaaagagtaaatttccagtagaatgaaaggattggcagggcatgccacaatgagggaagaatgtgcaaaggtgtggacgcatgaaatgccatgatgggttccgctgagcaacgtggcattgccagagcatgatgtggaagctcaggggttgaggggtcccttcataggtaggcagggctgaatcctaaggaaactggtaggaagtgtggaggagctagacttgtcatggaaggggtttggagccactggagcctttaaatcaggatagagtcatgatcagaattgcattttaggaaaatccctttggtggctgaatggagactgtggactggatgggcgtgggatggtggcatgggagctatgaggcctttttgaaatgtcaatactaaaacatagttgatggcctgctttacacgatgtttcctctacagcagatagtgagtttccaacacaaaatttatttccataaaagtctttggataaag

SEQ ID NO: 440810 - DNA, 939 bp, Homo sapiens
cttgctgcagcattattctgggaatttatgccatgggcccactttctattgatagatgaacctgtcagttggttcattcctcatgcattccaaaaacatgcattgagcttgggtcaagggccaggcatgaggataggcatagttcctgccctcaagaagttcatgagcataggaggtgtatagacaaattgcaaaacaggcaagggtaccaaggtggcataagaaagcatcaattaactatcttggggaccagagaaaccctgagagaagcaatggctgctaaggttttaaaacaaagagtaaatttccagtagaatgaaaggattggcagggcatgccacaatgagggaagaatgtgcaaaggtgtggacgcatgaaatgccatgatgggttccgctgagcaacgtggcattgccagagcatgatgtggaagctcaggggttgaggggtcccttcataggtaggcagggctgaatcctaaggaaactggtaggaagtgtggaggagctagacttgtcatggaaggggtttggagccactggagcctttaaatcaggatagagtcatgatcagaattgcattttaggaaaatccctttggtggctgaatggagactgtggactggatgggcgtgggatggtggcatgggagctatgaggcctttttgaaatgtcaatactaaaacatagttgatggcctgctttacacgatgtttcctctacagcagatagtgagtttccaacacaaaatttatttccataaaagtctttggataaagcaccttaagagggattttcaacaaggagaggggagcattcaaagagctaatgtttccagttttattttgtcttggtgtagaattgctgggagaggtgtccagccatcctgccatttcttcttcccttgcacagaatgtggcacatttagctccaggcttga

SEQ ID NO: 440811 - DNA, 581 bp, Homo sapiens
ctggagaaaggttaaagaatgatcttgtggcagtcaagaccttctctctaataggcacaatgtaattaattatgattctgttctaggtttcctgtggcataatgtgatggtcaattttctgcatcaacttgactgggctaagggatgctcagatggcaggtaaaatcattgtgcttgtgagggtgtttccagaagagatttgcctttgaatcagaagacagcaaagatttccttcagcaatgaaggaggcatccaccaaactgtcagggcccagagagaagaaaaagacaggaagggtgaatttgacctctctgactgggacatccatctctgcctatcctgggacctccacactcctggttctctggccttcagacttgatcagggactaacaccatcgcctcccacccccacctttgttctgaggcctttagcctctgaatgataccactggctttcctgcttctctatcctgcagtcggcagatcatgggacttcttcactccaaaattgtgtgagccaattcccataacagatagataaatttataaataaacacacaaatttcctacagaaaaaaa

SEQ ID NO: 440812 - DNA, 1424 bp, Homo sapiens
agctggcgaggccgagcccctcctagtgcttccggaccttgctccctgaacactcggaggtggcggtggatcttactccttccagccagtgaggatccagcaacctgctccgtgcctcccgcgcctgttggttggaagtgacgaccttgaagatcggccggttggaagtgacgaccttgaagatcggcgggcgcagcggggccgagggggcgggtctggcgctaggtccagcccctgcgtgccgggaaccccagaggaggtcgcagttcagcccagctgaggcctgtctgcagaatcgacaccaaccagcatcatgtccatgacactggggtactgggacatccgcgggctggcccacgccatccgcctgctcctggaatacacagactcaagctacgaggaaaagaagtatacgatgggggacgctcctgactatgacagaagccagtggctgaatgaaaaattcaagctgggcctggactttcccaatctgccctacttgattgatggggctcacaagatcacccagagcaacgccatcctgtgctacattgcccgcaagcacaacctgtgtggggagacagaagaggagaagattcgtgtggacattttggagaaccaggctatggacagctcctatgcagctggccagagtctgctacagcccagactttgagaaactgaagccagaatacttggaggaactccctgacaatgctgaagctctactcacagtttctggggaagcaggccatggtttgttggagacaagatcacctttgtagatttcctcgcctatgatgtccttgacctccaccgtatatttgagcccaactgcttggacgccttcccaaatctgaaggacttcatctcccgctttgagggcttggagaagatctctgcctacatgaagtccagccgcttcctcccaagacctgtgttcacaaagatggctgtctggggcaacaagtagggccttgaaggccaggaggtgggagtgaggagcccatactcagcctgctgcccaggctgtgcagcgcagctggactctgcatcccagcacctgcctcctcgttcctttctcctgtttattcccatctttactcccaagacttcattgtccctcttcactccccctaaacccctgtcccatgcaggccctttgaagcctcagctacccactatccttcgtgaacatccccctcccatcattacccttccctgcactaaagccagcctgaccttccttcctgttagtggttgtatctgctttgaagggcctacctggcccctcgcctgtggagctcagccctgagctgtccccgtgttgcataaggagcagcattgactggtttacaggccctgctcctgcagcatggcccctgccttaggcctacctgatcaaaataaagcctcagccacat

SEQ ID NO: 440813 - DNA, 703 bp, Homo sapiens
gtgttccaagtgttccccctgtgagatgagtagcacactgattttactgctattcaccgaccttctcctctgcatgaggcagggtgtgaggcacagtgggagttgcatagatgactgccccatcctggaaatgagtgcagtgagaggcctgcaggcagagcagcctgtgagggcttggagaagatctctgcctacatgaagtccagccgcttcctcccaaaacctctgtacacaagggtggctgtctggggcaacaagtaatgccttgaaggccaggaggtgggagtgaggagcccatactcagcctgctgcccaggctgtgcagcgcagctggactctgcatcccagcacctgcctcctcgttcctttctcctgtttattcccatctttacccccaagactttattgggcctcttcacttcccctaaacccctgtcccatgcaggccctttgaagcctcagctacccactttccttcatgaacatccccctcccaacactacccttccctgcactaaagccagcctgaccttccttcctgttagtggttgtatctgctttgaagggcctacctggcccctcgcctgtggagctcagccctgagctgtccccgtgttgcatgacagcattgactggtttacaggccctgctcctgcagcatggcccctgccttaggcctacctgatcaaaataaagcctcagc

SEQ ID NO: 440814 - DNA, 239 bp, Homo sapiens
gacctgcgggccatctctcccagctggcccacgccatccgcctgctcctggaatacacagactcaagctatgaggaaaagaagtacacgatgggggacgctggcccctcgcctgtggagctcagccccgagctgtccccgtgttgcatgaaggagcagcattgactggtttacaggccctgctcctgcagcatggtccctgccttaggcctacctgatggaagtaaagcctcaaccaca

SEQ ID NO: 440815 - DNA, 452 bp, Homo sapiens
ttgacagctgttttctgcctcaggagaaactgaaaccagaatacctgcaggcactccctgaaatgctgaagctctactcacagtttctggggaagcagccatggtttcttggggacaagatcacctttgtggatttcatcgcttatgatgtccttgagagaaaccaagtatttgagcccagctgcctggatgccttcccaaacctgaaggacttcatctcccgatttgagggcttggagaagatctctgcctacatgaagtccagccgcttcctcccaagacctgtgttcacaaagatggctgtctggggaggaagcggctggacttcatgtaggcagagatcttctccaagccaaattctggattgtagcagatcatgcccagctgcatatggttgtccatggtctggttctccaaaatgtccacacgaagcttctccccttctgtctccc

SEQ ID NO: 440816 - DNA, 1509 bp, Homo sapiens
  misc_feature (1461)..(1461): n is a, c, g, or t
  misc_feature (1471)..(1471): n is a, c, g, or t
agctggcgaggccgagcccctcctagtgcttccggaccttgctccctgaacactcggaggtggcggtggatcttactccttccagccagtgaggatccagcaacctgctccgtgcctcccgcgcctgttggttggaagtgacgaccttgaagatcggccggttggaagtgacgaccttgaagatcggcgggcgcagcggggccgagggggcgggtctggcgctaggtccagcccctgcgtgccgggaaccccagaggaggtcgcagttcagcccagctgaggcctgtctgcagaatcgacaccaaccagcatcatgtccatgacactggggtactgggacatccgcgggctggcccacgccatccgcctgctcctggaatacacagactcaagctacgaggaaaagaagtatacgatgggggacgctcctgactatgacagaagccagtggctgaatgaaaaattcaagctgggcctggactttcccaatctgccctacttgattgatggggctcacaagatcacccagagcaacgccatcctgtgctacattgcccgcaagcacaacctgtgtggggagacagaagaggagaagattcgtgtggacattttggagaaccaggctatggacagctcctatgcagctggccagagtctgctacagcccagactttgagaaactgaagccagaatacttggaggaactccctgacaatgctgaagctctactcacagtttctggggaagcaggccatggtttgttggagacaagatcacctttgtagatttcctcgcctatgatgtccttgacctccaccgtatatttgagcccaactgcttggacgccttcccaaatctgaaggacttcatctcccgctttgagggcttggagaagatctctgcctacatgaagtccagccgcttcctcccaagacctgtgttcacaaagatggctgtctggggcaacaagtagggccttgaaggccaggaggtgggagtgaggagcccatactcagcctgctgcccaggctgtgcagcgcagctggactctgcatcccagcacctgcctcctcgttcctttctcctgtttattcccatctttactcccaagacttcattgtccctcttcactccccctaaacccctgtcccatgcaggccctttgaagcctcagctacccactatccttcgtgaacatccccctcccatcattacccttccctgcactaaagccagcctgaccttccttcctgttagtggttgtatctgctttgaagggcctacctggcccctcgcctgtggagctcagccctgagctgtccccgtgttgcataaggagcagcattgactggtttacaggccctgctcctgcagcatggcccctgccttaggcctacctgatcaaaataaagcctcagccacataaaaaaaatattttattctcctcatttttactttctnttttctactntccctcttacctctccccctttcatttcacctaaaaaa

SEQ ID NO: 440817 - DNA, 1560 bp, Homo sapiens
agctggcgaggccgagcccctcctagtgcttccggaccttgctccctgaacactcggaggtggcggtggatcttactccttccagccagtgaggatccagcaacctgctccgtgcctcccgcgcctgttggttggaagtgacgaccttgaagatcggccggttggaagtgacgaccttgaagatcggcgggcgcagcggggccgagggggcgggtctggcgctaggtccagcccctgcgtgccgggaaccccagaggaggtcgcagttcagcccagctgaggcctgtctgcagaatcgacaccaaccagcatcatgtccatgacactggggtactgggacatccgcgggctggcccacgccatccgcctgctcctggaatacacagactcaagctacgaggaaaagaagtatacgatgggggacgctcctgactatgacagaagccagtggctgaatgaaaaattcaagctgggcctggactttcccaatctgccctacttgattgatggggctcacaagatcacccagagcaacgccatcctgtgctacattgcccgcaagcacaacctgtgtggggagacagaagaggagaagattcgtgtggacattttggagaaccaggctatggacagctcctatgcagctggccagagtctgctacagcccagactttgagaaactgaagccagaatacttggaggaactccctgacaatgctgaagctctactcacagtttctggggaagcaggccatggtttgttggagacaagatcacctttgtagatttcctcgcctatgatgtccttgacctccaccgtatatttgagcccaactgcttggacgccttcccaaatctgaaggacttcatctcccgctttgagggcttggagaagatctctgcctacatgaagtccagccgcttcctcccaagacctgtgttcacaaagatggctgtctggggcaacaagtagggccttgaaggccaggaggtgggagtgaggagcccatactcagcctgctgcccaggctgtgcagcgcagctggactctgcatcccagcacctgcctcctcgttcctttctcctgtttattcccatctttactcccaagacttcattgtccctcttcactccccctaaacccctgtcccatgcaggccctttgaagcctcagctacccactatccttcgtgaacatccccctcccatcattacccttccctgcactaaagccagcctgaccttccttcctgttagtggttgtatctgctttgaagggcctacctggcccctcgcctgtggagctcagccctgagctgtccccgtgttgcataaggagcagcattgactggtttacaggccctgctcctgcagcatggcccctgccttaggcctacctgatcaaaataaagcctcagccacataaaaagaaaaaaaaaaaaaaaaaaaaagaaaaaacaatgggggggcccaatacaaaaattaaaaataaaaaacctcgggggggggcccggtccccaattggccttatagggagcggtttaacaatccatgggcggt

SEQ ID NO: 440818 - DNA, 1851 bp, Homo sapiens
agctggcgaggccgagcccctcctagtgcttccggaccttgctccctgaacactcggaggtggcggtggatcttactccttccagccagtgaggatccagcaacctgctccgtgcctcccgcgcctgttggttggaagtgacgaccttgaagatcggccggttggaagtgacgaccttgaagatcggcgggcgcagcggggccgagggggcgggtctggcgctaggtccagcccctgcgtgccgggaaccccagaggaggtcgcagttcagcccagctgaggcctgtctgcagaatcgacaccaaccagcatcatgtccatgacactggggtactgggacatccgcgggctggcccacgccatccgcctgctcctggaatacacagactcaagctacgaggaaaagaagtatacgatgggggacggtaatgacacccttgtgtccgggctctgcccactcacgctgagttggcaccaagcaacccatggtggccacctgtggctacctctgcaggcctcccctgctggagctgcaggctgtcccttccctgagccccggtgagggagtcctgtggccttgcaaggcagaatgctggggcgggatgctgggccccctgtttaattgggttgggtgtccctcagagcttccctaaaccctggaagccttagccgtgtggggtccagagccctcagcgggattctttgtccctgaaccctgggatgtgggactgagtggtcagattctagatccacctgtctcagggatcttgccactggttccttgggagggtccccgggaaggagggctgggctctggggaggtttgttttcacttcttcttccccacggcagctcctgactatgacagaagccagtggctgaatgaaaaattcaagctgggcctggactttcccaatctgccctacttgattgatggggctcacaagatcacccagagcaacgccatcctgtgctacattgcccgcaagcacaacctgtgtggggagacagaagaggagaagattcgtgtggacattttggagaaccaggctatggacagctcctatgcagctggccagagtctgctacagcccagactttgagaaactgaagccagaatacttggaggaactccctgacaatgctgaagctctactcacagtttctggggaagcaggccatggtttgttggagacaagatcacctttgtagatttcctcgcctatgatgtccttgacctccaccgtatatttgagcccaactgcttggacgccttcccaaatctgaaggacttcatctcccgctttgagggcttggagaagatctctgcctacatgaagtccagccgcttcctcccaagacctgtgttcacaaagatggctgtctggggcaacaagtagggccttgaaggccaggaggtgggagtgaggagcccatactcagcctgctgcccaggctgtgcagcgcagctggactctgcatcccagcacctgcctcctcgttcctttctcctgtttattcccatctttactcccaagacttcattgtccctcttcactccccctaaacccctgtcccatgcaggccctttgaagcctcagctacccactatccttcgtgaacatccccctcccatcattacccttccctgcactaaagccagcctgaccttccttcctgttagtggttgtatctgctttgaagggcctacctggcccctcgcctgtggagctcagccctgagctgtccccgtgttgcataaggagcagcattgactggtttacaggccctgctcctgcagcatggcccctgccttaggcctacctgatcaaaataaagcctcagccacat

SEQ ID NO: 440819 - DNA, 1201 bp, Homo sapiens
agcaaggcttcccctctaccctctctgggcctctcacaaacgctgagccccgccccgctgaggcctgtctgcagaatccacagcaaccagcaccatgcccatgacactggggtactggaacatccgcgggctggcccacgccatccgcctgctcctggaatacacagactcaagctatgaggaaaagaagtacacgatgggggacgctcctgattatgacagaagccagtggctgaatgaaaaattcaagctgggcctggactttcccaatctgccctacttgattgatggggctcacaagatcacccagagcaacgccatcttgtgctacattgcccgcaagcacaacctgtgtggggagacagaagaggagaagattcgtgtggacattttggagaaccagaccatggacaaccatatgcagctgggcatgatctgctacaatccagaatttgagaaactgaagccaaagtacttggaggaactccctgaaaagctaaagctctactcagagtttctggggaagcggccatggtttgcaggaaacaagatcacttttgtagattttctcgtctatgatgtccttgacctccaccgtatatttgagcccaagtgcttggacgccttcccaaatctgaaggacttcatctcccgctttgagggcttggagaagatctctgcctacatgaagtccagccgcttcctcccaagacctgtgttctcaaagatggctgtctggggcaacaagtagggccttgaaggccaggaggtgggagtgaggagcccatactcagcctgctgcccaggctgtgcagcgcagctggactctgcatcccagcacctgcctcctcgttcctttctcctgtttattcccatctttactcccaagacttcattgtccctcttcactccccctaaacccctgtcccatgcaggccctttgaagcctcagctacccactatccttcgtgaacatcccctcccatcattacccttccctgcactaaagccagcctgaccttccttcctgttagtggttgtgtctgctttaaagggcctgcctggcccctcgcctgtggagctcagccccgagctgtccccgtgttgcatgaaggagcagcattgactggtttacaggccctgctcctgcagcatggtccctgccttaggcctacctgatggaagtaaagcctcaaccaca

SEQ ID NO: 440820 - DNA, 1415 bp, Homo sapiens
agctggcgaggccgagcccctcctagtgcttccggaccttgctccctgaacactcggaggtggcggtggatcttactccttccagccagtgaggatccagcaacctgctccgtgcctcccgcgcctgttggttggaagtgacgaccttgaagatcggccggttggaagtgacgaccttgaagatcggcgggcgcagcggggccgagggggcgggtctggcgctaggtccagcccctgcgtgccgggaaccccagaggaggtcgcagttcagcccagctgaggcctgtctgcagaatcgacaccaaccagcatcatgtccatgacactggggtactgggacatccgcgggctggcccacgccatccgcctgctcctggaatacacagactcaagctacgaggaaaagaagtatacgatgggggacgctcctgactatgacagaagccagtggctgaatgaaaaattcaagctgggcctggactttcccaatctgccctacttgattgatggggctcacaagatcacccagagcaacgccatcctgtgctacattgcccgcaagcacaacctgtgtggggagacagaagaggagaagattcgtgtggacattttggagaaccaggctatggacagctcctatgcagctggccagagtctgctacagcccagactttgagaaactgaagccagaatacttggaggaactccctgacaatgctgaagctctactcacagtttctggggaagcaggccatggtttgttggagacaagatcacctttgtagatttcctcgcctatgatgtccttgacctccaccgtatatttgagcccaactgcttggacgccttcccaaatctgaaggacttcatctcccgctttgagggcttggagaagatctctgcctacatgaagtccagccgcttcctcccaaaacctctgtacacaagggtggctgtctggggcaacaagtaatgccttgaaggccaggaggtgggagtgaggagcccatactcagcctgctgcccaggctgtgcagcgcagctggactctgcatcccagcacctgcctcctcgttcctttctcctgtttattcccatctttacccccaagactttattgggcctcttcacttcccctaaacccctgtcccatgcaggccctttgaagcctcagctacccactttccttcatgaacatccccctcccaacactacccttccctgcactaaagccagcctgaccttccttcctgttagtggttgtatctgctttgaagggcctacctggcccctcgcctgtggagctcagccctgagctgtccccgtgttgcatgacagcattgactggtttacaggccctgctcctgcagcatggcccctgccttaggcctacctgatcaaaataaagcctcagc

SEQ ID NO: 440821 - DNA, 1201 bp, Homo sapiens
agcaaggcttcccctctaccctctctgggcctctcacaaacgctgagccccgccccgctgaggcctgtctgcagaatccacagcaaccagcaccatgcccatgacactggggtactggaacatccgcgggctggcccattccatccgcctgctcctggaatacacagactcaagctacgaggaaaagaagtacacgatgggggacgctcctgattatgacagaagccagtggctgaatgaaaaattcaagctgggcctggactttcccaatctgccctacttgattgatgggactcacaagatcacccagagcaacgccatcctgcggtacattgcccgcaagcacaacctgtgcggggaatcagaaaaggagcagattcgcgaagacattttggagaaccagtttatggacagccgtatgcagctggccaaactctgctatgacccagattttgagaaactgaagccaaagtacttggaggaactccctgaaaagctaaagctctactcagagtttctggggaagcggccatggtttgcaggaaacaagatcacttttgtagattttctcgtctatgatgtccttgacctccaccgtatatttgagcccaagtgcttggacgccttcccaaatctgaaggacttcatctcccgctttgagggcttggagaagatctctgcctacatgaagtccagccgcttcctcccaagacctgtgttctcaaagatggctgtctggggcaacaagtagggccttgaaggccaggaggtgggagtgaggagcccatactcagcctgctgcccaggctgtgcagcgcagctggactctgcatcccagcacctgcctcctcgttcctttctcctgtttattcccatctttactcccaagacttcattgtccctcttcactccccctaaacccctgtcccatgcaggccctttgaagcctcagctacccactatccttcgtgaacatcccctcccatcattacccttccctgcactaaagccagcctgaccttccttcctgttagtggttgtgtctgctttaaagggcctgcctggcccctcgcctgtggagctcagccccgagctgtccccgtgttgcatgaaggagcagcattgactggtttacaggccctgctcctgcagcatggtccctgccttaggcctacctgatggaagtaaagcctcaaccaca

SEQ ID NO: 440822 - DNA, 1027 bp, Homo sapiens
acgccatcctgtgctacattgcccgcaagcacaacctgtgtggggagacagaagaggagaagattcgtgtggacattttggacaaccagcatcatgtccatgacactggggtactgggacatccgcgggctggcccacgccatccgcctgctcctggaatacacagactcaagctacgaggaaaagaagtatacgatgggggacgctcctgactatgacagaagccagtggctgaatgatcacaagatcacccagagtctgctacagccctgactttgagaaactgaagccagaatacttggaggaactccctgacaatgctgaagctctactcacagtttctggggaagcaggccatggtttgttggagacaagatcacctttgtagatttcctcgcctatgatgtccttgacctccaccgtatatttgagcccaactgcttggacgccttcccaaatctgaaggacttcatctcccgctttgagggcttggagaagatctctgcctacatgaagtccagccgcttcctcccaagacctgtgttcacaaagatggctgtctggggcaacaagtagggccttgaaggccaggaggtgggagtgaggagcccatactcagcctgctgcccaggctgtgcagcgcagctggactctgcatcccagcacctgcctcctcgttcctttctcctgtttattcccatctttactcccaagacttcattgtccctcttcactccccctaaacccctgtcccatgcaggccctttgaagcctcagctacccactatccttcgtgaacatccccctcccatcattacccttccctgcactaaagccagcctgaccttccttcctgttagtggttgtatctgctttgaagggcctacctggcccctcgcctgtggagctcagccctgagctgtccccgtgttgcataaggagcagcattgactggtttacaggccctgctcctgcagcatggcccctgccttaggcctacctgatcaaaataaagcctcagccacat

SEQ ID NO: 440823 - DNA, 1342 bp, Homo sapiens
agctggcgaggccgagcccctcctagtgcttccggaccttgctccctgaacactcggaggtggcggtggatcttactccttccagccagtgaggatccagcaacctgctccgtgcctcccgcgcctgttggttggaagtgacgaccttgaagatcggccggttggaagtgacgaccttgaagatcggcgggcgcagcggggccgagggggcgggtctggcgctaggtccagcccctgcgtgccgggaaccccagaggaggtcgcagttcagcccagctgaggcctgtctgcagaatcgacaccaaccagcatcatgtccatgacactggggtactgggacatccgcgggctggcccacgccatccgcctgctcctggaatacacagactcaagctacgaggaaaagaagtatacgatgggggacgctcctgactatgacagaagccagtggctgaatgaaaaattcaagctgggcctggactttcccaatgtggggagacagaagaggagaagattcgtgtggacattttggagaaccaggctatggacagctcctatgcagctggccagagtctgctacagcccagactttgagaaactgaagccagaatacttggaggaactccctgacaatgctgaagctctactcacagtttctggggaagcaggccatggtttgttggagacaagatcacctttgtggatttcatcgcttatgatgtccttgagagaaaccaagtatttgagcccagctgcctggatgccttcccaaacctgaaggacttcatctcccgatttgagggcttggagaagatctctgcctacatgaagtccagccgcttcctcccaagacctgtgttcacaaagatggctgtctggggcaacaagtagggccttgaaggccaggaggtgggagtgaggagcccatactcagcctgctgcccaggctgtgcagcgcagctggactctgcatcccagcacctgcctcctcgttcctttctcctgtttattcccatctttactcccaagacttcattgtccctcttcactccccctaaacccctgtcccatgcaggccctttgaagcctcagctacccactatccttcgtgaacatccccctcccatcattacccttccctgcactaaagccagcctgaccttccttcctgttagtggttgtatctgctttgaagggcctacctggcccctcgcctgtggagctcagccctgagctgtccccgtgttgcataaggagcagcattgactggtttacaggccctgctcctgcagcatggcccctgccttaggcctacctgatcaaaataaagcctcagccacat

SEQ ID NO: 440824 - DNA, 1573 bp, Homo sapiens
ggtttaggcctgtctgcggaatccgcaccaaccagcaccatgcccatgatactggggtactgggacatccgcgggctggcccacgccatccgcctgctcctggaatacacagactcaagctatgaggaaaagaagtacacgatgggggacggtaatggcaccctcgtgttcgggctctgcccactcacgctaagttggcaccaagcaacccatggtggccacctgtggctgcctctgcaggcctcccctgctggagctgcaggctgtctcttccctgagccccggtgagggagccctctggccttgcaaggcagaatgctggggtgggatgctgggccccctgtctaattgggacgggtgtccctcagggcttgcctaaaccctggaagccttagctgtgtggggtccagagccctcagcgggattctttgtccctgaaccctgggatgtgggactgagtggtcagattctagatccacctgtctcagggatcttgccactggctccgtgggagggtccccgggaaggagggctgggctctggggaggtttgttttcacttcttcttccccaccacagctcctgattatgacagaagccagtggctgaatgaaaaattcaagctgggcctggactttcccaatctgccctacttgattgatggggctcacaagatcacccagagcaacgccatcttgtgctacattgcccgcaagcacaacctgtgtggggagacagaagaggagaagattcgtgtggacattttggagaaccagaccatggacaaccatatgcagctgggcatgatctgctacaatccagaatttgagaaactgaagccaaagtacttggaggaactccctgaaaagctaaagctctactcagagtttctggggaagcggccatggtttgcaggaaacaagatcacttttgtagattttctcgtctatgatgtccttgacctccaccgtatatttgagcccaagtgcttggacgccttcccaaatctgaaggacttcatctcccgctttgagggcttggagaagatctctgcctacatgaagtccagccgcttcctcccaagacctgtgttctcaaagatggctgtctggggcaacaagtagggccttgaaggccaggaggtgggagtgaggagcccatactcagcctgctgcccaggctgtgcagcgcagctggactctgcatcccagcacctgcctcctcgttcctttctcctgtttattcccatctttactcccaagacttcattgtccctcttcactccccctaaacccctgtcccatgcaggccctttgaagcctcagctacccactatccttcgtgaacatcccctcccatcattacccttccctgcactaaagccagcctgaccttccttcctgttagtggttgtgtctgctttaaagggcctgcctggcccctcgcctgtggagctcagccccgagctgtccccgtgttgcatgaaggagcagcattgactggtttacaggccctgctcctgcagcatggtccctgccttaggcctacctgatggaagtaaagcctcaaccaca

SEQ ID NO: 440825 - DNA, 1092 bp, Homo sapiens
ggtttaggcctgtctgcggaatccgcaccaaccagcaccatgcccatgatactggggtactgggacatccgcgggctggcccacgccatccgcctgctcctggaatacacagactcaagctatgaggaaaagaagtacacgatgggggacgctcctgattatgacagaagccagtggctgaatgatcacaagatcacccagagcaacgccatcttgtgctacattgcccgcaagcacaacctgtgtggggagacagaagaggagaagattcgtgtggacattttggagaaccagaccatggacaaccatatgcagctgggcatgatctgctacaatccagaatttgagaaactgaagccaaagtacttggaggaactccctgaaaagctaaagctctactcagagtttctggggaagcggccatggtttgcaggaaacaagatcacttttgtagattttctcgtctatgatgtccttgacctccaccgtatatttgagcccaagtgcttggacgccttcccaaatctgaaggacttcatctcccgctttgagggcttggagaagatctctgcctacatgaagtccagccgcttcctcccaagacctgtgttctcaaagatggctgtctggggcaacaagtagggccttgaaggccaggaggtgggagtgaggagcccatactcagcctgctgcccaggctgtgcagcgcagctggactctgcatcccagcacctgcctcctcgttcctttctcctgtttattcccatctttactcccaagacttcattgtccctcttcactccccctaaacccctgtcccatgcaggccctttgaagcctcagctacccactatccttcgtgaacatcccctcccatcattacccttccctgcactaaagccagcctgaccttccttcctgttagtggttgtgtctgctttaaagggcctgcctggcccctcgcctgtggagctcagccccgagctgtccccgtgttgcatgaaggagcagcattgactggtttacaggccctgctcctgcagcatggtccctgccttaggcctacctgatggaagtaaagcctcaaccaca

SEQ ID NO: 440826 - DNA, 1492 bp, Homo sapiens
agcaaggcttcccctctaccctctctgggcctctcacaaacgctgagccccgccccgctgaggcctgtctgcagaatccacagcaaccagcaccatgcccatgacactggggtactggaacatccgcgggctggcccacgccatccgcctgctcctggaatacacagactcaagctatgaggaaaagaagtacacgatgggggacgctcctgattatgacagaagccagtggctgaatgaaaaattcaagctgggcctggactttcccaatctgccctacttgattgatggggctcacaagatcacccagagcaacgccatcttgtgctacattgcccgcaagcacaacctgtgtggggagacagaagaggagaagattcgtgtggacattttggagaaccagaccatggacaaccatatgcagctgggcatgatctgctacaatccagaatttgagaaactgaagccaaagtacttggaggaactccctgaaaagctaaagctctactcagagtttctggggaagcggccatggtttgcaggaaacaagatcacttttgtagattttctcgtctatgatgtccttgacctccaccgtatatttgagcccaagtgcttggacgccttcccaaatctgaaggacttcatctcccgctttgagggcttggagaagatctctgcctacatgaagtccagccgcttcctcccaagacctgtgttctcaaagatggctgtctggggcaacaagtagggccttgaaggccaggaggtgggagtgaggagcccatactcagcctgctgcccaggctgtgcagcgcagctggactctgcatcccagcacctgcctcctcgttcctttctcctgtttattcccatctttactcccaagacttcattgtccctcttcactccccctaaacccctgtcccatgcaggccctttgaagcctcagctacccactatccttcgtgaacatcccctcccatcattacccttccctgcactaaagccagcctgaccttccttcctgttagtggttgtgtctgctttaaagggcctgcctggcccctcgcctgtggagctcagccccgagctgtccccgtgttgcatgaaggagcagcattgactggtttacaggccctgctcctgcagcatggtccctgccttaggcctacctgatggaagtaaagcctcaaccacaaaaaaaaaagagcaagctaacaacacagaaccaggcgcaacaaccaaccacgaacctggccacccggcggaagacacaacaagacgaccgcagccggacagaaaccaacacgtacacggaacgacacaagcgagaggggggcagcgcaaaaatagtacccgcgggggggcgcaacaagtagccccccacacgtcggtaaaacaggcgcacccaagtgagaatcctaatacaaacagccccgcgcgcgaaacaccccgcgacaggaacaaagcgccacgggccagtggcggc

SEQ ID NO: 440827 - DNA, 1202 bp, Homo sapiens
agcaaggcttcccctctaccctctctgggcctctcacaaacgctgagccccgccccgctgaggcctgtctgcagaatccacagcaaccagcaccatgcccatgacactggggtactggaacatccgcgggctggcccattccatccgcctgctcctggaatacacagactcaagctacgaggaaaagaagtacacgatgggggacgctcctgattatgacagaagccagtggctgaatgaaaaattcaagctgggcctggactttcccaatctgccctacttgattgatgggactcacaagatcacccagagcaacgccatcctgcggtacattgcccgcaagcacaacctgtgcggggaatcagaaaaggagcagattcgcgaagacattttggagaaccagtttatggacagccgtatgcagctggccaaactctgctatgacccagattttgagaaactgaaaccagaatacctgcaggcactccctgaaatgctgaagctctactcacagtttctggggaagcagccatggtttcttggggacaagatcacctttgtggatttcatcgcttatgatgtccttgagagaaaccaagtatttgagcccagctgcctggatgccttcccaaacctgaaggacttcatctcccgatttgagggcttggagaagatctctgcctacatgaagtccagccgcttcctcccaagacctgtgttcacaaagatggctgtctggggcaacaagtagggccttgaaggccaggaggtgggagtgaggagcccatactcagcctgctgcccaggctgtgcagcgcagctggactctgcatcccagcacctgcctcctcgttcctttctcctgtttattcccatctttactcccaagacttcattgtccctcttcactccccctaaacccctgtcccatgcaggccctttgaagcctcagctacccactatccttcgtgaacatccccctcccatcattacccttccctgcactaaagccagcctgaccttccttcctgttagtggttgtatctgctttgaagggcctacctggcccctcgcctgtggagctcagccctgagctgtccccgtgttgcataaggagcagcattgactggtttacaggccctgctcctgcagcatggcccctgccttaggcctacctgatcaaaataaagcctcagccacat

SEQ ID NO: 440828 - DNA, 1736 bp, Homo sapiens
agctggcgaggccgagcccctcctagtgcttccggaccttgctccctgaacactcggaggtggcggtggatcttactccttccagccagtgaggatccagcaacctgctccgtgcctcccgcgcctgttggttggaagtgacgaccttgaagatcggccggttggaagtgacgaccttgaagatcggcgggcgcagcggggccgagggggcgggtctggcgctaggtccagcccctgcgtgccgggaaccccagaggaggtcgcagttcagcccagctgaggcctgtctgcagaatcgacaccaaccagcatcatgtccatgacactggggtactgggacatccgcgggctggcccacgccatccgcctgctcctggaatacacagactcaagctacgaggaaaagaagtatacgatgggggacggtaatgacacccttgtgtccgggctctgcccactcacgctgagttggcaccaagcaacccatggtggccacctgtggctacctctgcaggcctcccctgctggagctgcaggctgtcccttccctgagccccggtgagggagtcctgtggccttgcaaggcagaatgctggggcgggatgctgggccccctgtttaattgggttgggtgtccctcagagcttccctaaaccctggaagccttagccgtgtggggtccagagccctcagcgggattctttgtccctgaaccctgggatgtgggactgagtggtcagattctagatccacctgtctcagggatcttgccactggttccttgggagggtccccgggaaggagggctgggctctggggaggtttgttttcacttcttcttccccacggcagctcctgactatgacagaagccagtggctgaatgaaaaattcaagctgggcctggactttcccaatctgccctacttgattgatggggctcacaagatcacccagagcaacgccatcttgtgctacattgcccgcaagcacaacctgtgtggggagacagaagaggagaagattcgtgtggacattttggagaaccagaccatggacaaccatatgcagctgggcatgatctgctacaatccagaatttgagaaactgaagccaaagtacttggaggaactccctgaaaagctaaagctctactcagagtttctggggaagcggccatggtttgcaggaaacaagggcttggagaagatctctgcctacatgaagtccagccgcttcctcccaagacctgtgttctcaaagatggctgtctggggcaacaagtagggccttgaaggccaggaggtgggagtgaggagcccatactcagcctgctgcccaggctgtgcagcgcagctggactctgcatcccagcacctgcctcctcgttcctttctcctgtttattcccatctttactcccaagacttcattgtccctcttcactccccctaaacccctgtcccatgcaggccctttgaagcctcagctacccactatccttcgtgaacatcccctcccatcattacccttccctgcactaaagccagcctgaccttccttcctgttagtggttgtgtctgctttaaagggcctgcctggcccctcgcctgtggagctcagccccgagctgtccccgtgttgcatgaaggagcagcattgactggtttacaggccctgctcctgcagcatggtccctgccttaggcctacctgatggaagtaaagcctcaaccaca

SEQ ID NO: 440829 - DNA, 1509 bp, Homo sapiens
  misc_feature (1461)..(1461): n is a, c, g, or t
  misc_feature (1471)..(1471): n is a, c, g, or t
agctggcgaggccgagcccctcctagtgcttccggaccttgctccctgaacactcggaggtggcggtggatcttactccttccagccagtgaggatccagcaacctgctccgtgcctcccgcgcctgttggttggaagtgacgaccttgaagatcggccggttggaagtgacgaccttgaagatcggcgggcgcagcggggccgagggggcgggtctggcgctaggtccagcccctgcgtgccgggaaccccagaggaggtcgcagttcagcccagctgaggcctgtctgcagaatcgacaccaaccagcatcatgtccatgacactggggtactgggacatccgcgggctggcccacgccatccgcctgctcctggaatacacagactcaagctacgaggaaaagaagtatacgatgggggacgctcctgactatgacagaagccagtggctgaatgaaaaattcaagctgggcctggactttcccaatctgccctacttgattgatggggctcacaagatcacccagagcaacgccatcctgtgctacattgcccgcaagcacaacctgtgtggggagacagaagaggagaagattcgtgtggacattttggagaaccaggctatggacagctcctatgcagctggccagagtctgctacagcccagactttgagaaactgaagccagaatacttggaggaactccctgacaatgctgaagctctactcacagtttctggggaagcaggccatggtttgttggagacaagatcacctttgtggatttcatcgcttatgatgtccttgagagaaaccaagtatttgagcccagctgcctggatgccttcccaaacctgaaggacttcatctcccgatttgagggcttggagaagatctctgcctacatgaagtccagccgcttcctcccaagacctgtgttcacaaagatggctgtctggggcaacaagtagggccttgaaggccaggaggtgggagtgaggagcccatactcagcctgctgcccaggctgtgcagcgcagctggactctgcatcccagcacctgcctcctcgttcctttctcctgtttattcccatctttactcccaagacttcattgtccctcttcactccccctaaacccctgtcccatgcaggccctttgaagcctcagctacccactatccttcgtgaacatccccctcccatcattacccttccctgcactaaagccagcctgaccttccttcctgttagtggttgtatctgctttgaagggcctacctggcccctcgcctgtggagctcagccctgagctgtccccgtgttgcataaggagcagcattgactggtttacaggccctgctcctgcagcatggcccctgccttaggcctacctgatcaaaataaagcctcagccacataaaaaaaatattttattctcctcatttttactttctnttttctactntccctcttacctctccccctttcatttcacctaaaaaa

SEQ ID NO: 440830 - DNA, 1640 bp, Homo sapiens
agctggcgaggccgagcccctcctagtgcttccggaccttgctccctgaacactcggaggtggcggtggatcttactccttccagccagtgaggatccagcaacctgctccgtgcctcccgcgcctgttggttggaagtgacgaccttgaagatcggccggttggaagtgacgaccttgaagatcggcgggcgcagcggggccgagggggcgggtctggcgctaggtccagcccctgcgtgccgggaaccccagaggaggtcgcagttcagcccagctgaggcctgtctgcagaatcgacaccaaccagcatcatgtccatgacactggggtactgggacatccgcgggctggcccacgccatccgcctgctcctggaatacacagactcaagctacgaggaaaagaagtatacgatgggggacggtaatgacacccttgtgtccgggctctgcccactcacgctgagttggcaccaagcaacccatggtggccacctgtggctacctctgcaggcctcccctgctggagctgcaggctgtcccttccctgagccccggtgagggagtcctgtggccttgcaaggcagaatgctggggcgggatgctgggccccctgtttaattgggttgggtgtccctcagagcttccctaaaccctggaagccttagccgtgtggggtccagagccctcagcgggattctttgtccctgaaccctgggatgtgggactgagtggtcagattctagatccacctgtctcagggatcttgccactggttccttgggagggtccccgggaaggagggctgggctctggggaggtttgttttcacttcttcttccccacggcagctcctgactatgacagaagccagtggctgaatgaaaaattcaagctgggcctggactttcccaatctgccctacttgattgatggggctcacaagatcacccagagcaacgccatcttgtgctacattgcccgcaagcacaacctgtgtggggagacagaagaggagaagattcgtgtggacattttggagaaccagaccatggacaaccatatgcagctgggcatgatctgctacaatccagaatttggcttggagaagatctctgcctacatgaagtccagccgcttcctcccaagacctgtgttctcaaagatggctgtctggggcaacaagtagggccttgaaggccaggaggtgggagtgaggagcccatactcagcctgctgcccaggctgtgcagcgcagctggactctgcatcccagcacctgcctcctcgttcctttctcctgtttattcccatctttactcccaagacttcattgtccctcttcactccccctaaacccctgtcccatgcaggccctttgaagcctcagctacccactatccttcgtgaacatcccctcccatcattacccttccctgcactaaagccagcctgaccttccttcctgttagtggttgtgtctgctttaaagggcctgcctggcccctcgcctgtggagctcagccccgagctgtccccgtgttgcatgaaggagcagcattgactggtttacaggccctgctcctgcagcatggtccctgccttaggcctacctgatggaagtaaagcctcaaccaca

SEQ ID NO: 440831 - DNA, 887 bp, Homo sapiens
tccttttaatccctttatttggccccacccacatgcagattggtccattttacagagagctgattggtccattttacagagtgctgattggtccgttttacagagtgctgattggtctgtttttacagagtgctgattggagaaactgaaaccagaatacctgcaggcactccctgaaatgctgaagctctactcacagtttctggggaagcagccatggtttcttggggacaagatcacctttgtggatttcatcgcttatgatgtccttgagagaaaccaagtatttgagcccagctgcctggatgccttcccaaacctgaaggacttcatctcccgatttgagggcttggagaagatctctgcctacatgaagtccagccgcttcctcccaagacctgtgttcacaaagatggctgtctggggcaacaagtagggccttgaaggccaggaggtgggagtgaggagcccatactcagcctgctgcccaggctgtgcagcgcagctggactctgcatcccagcacctgcctcctcgttcctttctcctgtttattcccatctttactcccaagacttcattgtccctcttcactccccctaaacccctgtcccatgcaggccctttgaagcctcagctacccactatccttcgtgaacatccccctcccatcattacccttccctgcactaaagccagcctgaccttccttcctgttagtggttgtatctgctttgaagggcctacctggcccctcgcctgtggagctcagccctgagctgtccccgtgttgcataaggagcagcattgactggtttacaggccctgctcctgcagcatggcccctgccttaggcctacctgatcaaaataaagcctcagccacat

SEQ ID NO: 440832 - DNA, 1175 bp, Homo sapiens
agcaaggcttcccctctaccctctctgggcctctcacaaacgctgagccccgccccgctgaggcctgtctgcagaatccacagcaaccagcaccatgcccatgacactggggtactggaacatccgcgggctggcccattccatccgcctgctcctggaatacacagactcaagctacgaggaaaagaagtacacgatgggggacgctcctgattatgacagaagccagtggctgaatgaaaaattcaagctgggcctggactttcccaatctgccctacttgattgatgggactcacaagatcacccagagcaacgccatcctgcggtacattgcccgcaagcacaacctgtgcggggaatcagaaaaggagcagattcgcgaagacattttggagaaccagtttatggacagccgtatgcagctggccaaactctgctatgacccagattttgcactccctgaaatgctgaagctctactcacagtttctggggaagcagccatggtttcttggggacaagatcacctttgtggatttcatcgcttatgatgtccttgagagaaaccaagtatttgagcccagctgcctggatgccttcccaaacctgaaggacttcatctcccgatttgagggcttggagaagatctctgcctacatgaagtccagccgcttcctcccaagacctgtgttcacaaagatggctgtctggggcaacaagtagggccttgaaggccaggaggtgggagtgaggagcccatactcagcctgctgcccaggctgtgcagcgcagctggactctgcatcccagcacctgcctcctcgttcctttctcctgtttattcccatctttactcccaagacttcattgtccctcttcactccccctaaacccctgtcccatgcaggccctttgaagcctcagctacccactatccttcgtgaacatccccctcccatcattacccttccctgcactaaagccagcctgaccttccttcctgttagtggttgtatctgctttgaagggcctacctggcccctcgcctgtggagctcagccctgagctgtccccgtgttgcataaggagcagcattgactggtttacaggccctgctcctgcagcatggcccctgccttaggcctacctgatcaaaataaagcctcagccacat

SEQ ID NO: 440833 - DNA, 1618 bp, Homo sapiens
agcaaggcttcccctctaccctctctgggcctctcacaaacgctgagccccgccccgctgaggcctgtctgcagaatccacagcaaccagcaccatgcccatgacactggggtactggaacatccgcgggctggcccattccatccgcctgctcctggaatacacagactcaagctacgaggaaaagaagtacacgatgggggacgctcctgattatgacagaagccagtggctgaatgaaaaattcaagctgggcctggactttcccaatctgccctacttgattgatgggactcacaagatcacccagagcaacgccatcctgcggtacattgcccgcaagcacaacctgtgcggggaatcagaaaaggagcagattcgcgaagacattttggagaaccagtttatggacagccgtatgcagctggccaaactctgctatgacccagattttgtaagtccccccaccccactcccagtctccccttccctactcccagtctcccctttccctgcagagtttgtgtccaaaattgattccttctggtgagttcttggtcttgctgactctaagaatgaagccgcggtcctacacggtgagtgttacagttcttaaagatggtgtgtccggagtttgttccttcagatgttcagatgtgtccgcagtttcttccttccggtgggtttgtggtcttgctgacttcaggggtgaagccgcagaccttcgcagtgagtgctacagctcttaaaggtggcgcgtctggagttgtttattcctcttggtgggttcatggtctggctggcttcaggagtgaagctgcagaccttcatagtgaatgttatagctcataaaggtagttcaaacccaaagagtgagcaacagcaggatttatggtgacgagtgaaagaaaatacacttccacagcctggaagacaacctgagcagagtgctgattggtccgttttacagagtgctgattggtctgtttttacagagtgctgattggagaaactgaaaccagaatacctgcaggcactccctgaaatgctgaagctctactcacagtttctggggaagcagccatggtttcttggggacaagatcacctttgtggatttcatcgcttatgatgtccttgagagaaaccaagtatttgagcccagctgcctggatgccttcccaaacctgaaggacttcatctcccgatttgagggcttggagaagatctctgcctacatgaagtccagccgcttcctcccaagacctgtgttcacaaagatggctgtctggggcaacaagtagggccttgaaggccaggaggtgggagtgaggagcccatactcagcctgctgcccaggctgtgcagcgcagctggactctgcatcccagcacctgcctcctcgttcctttctcctgtttattcccatctttactcccaagacttcattgtccctcttcactccccctaaacccctacctggcccctcgcctgtggagctcagccctgagctgtccccgtgttgcataaggagcagcattgactggtttacaggccctgctcctgcagcatggcccctgccttaggcctacctgatcaaaataaagcctcagccacat

SEQ ID NO: 440834 - DNA, 747 bp, Homo sapiens
gttagctgttactgtggtacaacattacttaaaggaagttggaagagttaactccgcagatctggggaccctaagaggctgtgtgatgcctcagcacttgagcccacgtggaaaggctgtggccagggccctgacctgctgtgtctgcagtggggttgtcccagccctcatgggcagctgaccttgagttctggccttattttcccccctctcagggcttggagaagatctctgcctacatgaagtccagccgcttcctcccaaaacctctgtacacaagggtggctgtctggggcaacaagtaatgccttgaaggccaggaggtgggagtgaggagcccatactcagcctgctgcccaggctgtgcagcgcagctggactctgcatcccagcacctgcctcctcgttcctttctcctgtttattcccatctttacccccaagactttattgggcctcttcacttcccctaaacccctgtcccatgcaggccctttgaagcctcagctacccactttccttcatgaacatccccctcccaacactacccttccctgcactaaagccagcctgaccttccttcctgttagtggttgtatctgctttgaagggcctacctggcccctcgcctgtggagctcagccctgagctgtccccgtgttgcatgacagcattgactggtttacaggccctgctcctgcagcatggcccctgccttaggcctacctgatcaaaataaagcctcagc

SEQ ID NO: 440835 - DNA, 907 bp, Homo sapiens
agctggcgaggccgagcccctcctagtgcttccggaccttgctccctgaacactcggaggtggcggtggatcttactccttccagccagtgaggatccagcaacctgctccgtgcctcccgcgcctgttggttggaagtgacgaccttgaagatcggccggttggaagtgacgaccttgaagatcggcgggcgcagcggggccgagggggcgggtctggcgctaggtccagcccctgcgtgccgggaaccccagaggaggtcgcagttcagcccagctgaggcctgtctgcagaatcgacaccaaccagcatcatgtccatgacactggggtactgggacatccgcgggctggcccacgccatccgcctgctcctggaatacacagactcaagctacgaggaaaagaagtatacgatgggggacgctcctgactatgacagaagccagtggctgaatgaaaaattcaagctgggcctggactttcccaatattagaggtgttcggatcaggagtcttctgcccaattcctctcactcctggttgtctacacagcccctgcatgatgttctgtgtcccagctcatttgttcatgtgacagtatttctatgtcaggcctgccatgagcgggcacagtgagtgcctggtctcccctctgcccttgcatatgggaaggggatgctggggagcctgctggcccaactgagcttccccggtttcccatctatccagctgccctacttgattgatggggctcacaagatcacccagagcaacgccatcctgtgctacattgcccgcaagcacaacctgtgtgagtgtggttggctgcagtgtgtggggggaaggtggcatcctccttggctggattggggtgctatgctcagagtgagtctgtattaactgctt

SEQ ID NO: 440836 - DNA, 1269 bp, Homo sapiens
agctggcgaggccgagcccctcctagtgcttccggaccttgctccctgaacactcggaggtggcggtggatcttactccttccagccagtgaggatccagcaacctgctccgtgcctcccgcgcctgttggttggaagtgacgaccttgaagatcggccggttggaagtgacgaccttgaagatcggcgggcgcagcggggccgagggggcgggtctggcgctaggtccagcccctgcgtgccgggaaccccagaggaggtcgcagttcagcccagctgaggcctgtctgcagaatcgacaccaaccagcatcatgtccatgacactggggtactgggacatccgcgggctggcccacgccatccgcctgctcctggaatacacagactcaagctacgaggaaaagaagtatacgatgggggacggtaatgacacccttgtgtccgggctctgcccactcacgctgagttggcaccaagcaacccatggtggccacctgtggctacctctgcaggcctcccctgctggagctgcaggctgtcccttccctgagccccggtgagggagtcctgtggccttgcaaggcagaatgctggggcgggatgctgggccccctgtttaattgggttgggtgtccctcagagcttccctaaaccctggaagccttagccgtgtggggtccagagccctcagcgggattctttgtccctgaaccctgggatgtgggactgagtggtcagattctagatccacctgtctcagggatcttgccactggttccttgggagggtccccgggaaggagggctgggctctggggaggtttgttttcacttcttcttccccacggcagctcctgactatgacagaagccagtggctgaatgaaaaattcaagctgggcctggactttcccaatctgccctacttgattgatggggctcacaagatcacccagagcaacgccatcttgtgctacattgcccgcaagcacaacctgtgtggggagacagaagaggagaagattcgtgtggacattttggagaaccagaccatggacaaccatatgcagctgggcatgatctgctacaatccagaatttgagaaactgaagccaaagtacttggaggaactccctgaaaagctaaagctctactcagagtttctggggaagcggccatggtttgcaggaaacaagatcacttttgtagattttctcgtctatgatgtcctcttttcttcctttcaagggatttcctagattattcatc

SEQ ID NO: 440837 - DNA, 892 bp, Homo sapiens
ggtttaggcctgtctgcggaatccgcaccaaccagcaccatgcccatgatactggggtactgggacatccgcgggctggcccacgccatccgcctgctcctggaatacacagactcaagctatgaggaaaagaagtacacgatgggggacggtaatggcaccctcgtgttcgggctctgcccactcacgctaagttggcaccaagcaacccatggtggccacctgtggctgcctctgcaggcctcccctgctggagctgcaggctgtctcttccctgagccccggtgagggagccctctggccttgcaaggcagaatgctggggtgggatgctgggccccctgtctaattgggacgggtgtccctcagggcttgcctaaaccctggaagccttagctgtgtggggtccagagccctcagcgggattctttgtccctgaaccctgggatgtgggactgagtggtcagattctagatccacctgtctcagggatcttgccactggctccgtgggagggtccccgggaaggagggctgggctctggggaggtttgttttcacttcttcttccccaccacagctcctgattatgacagaagccagtggctgaatgaaaaattcaagctgggcctggactttcccaatgtaggtgcaggggaaggggcggttttgggggaaagtgcaacgtgtctctgactgcatctcctctccccagcttagaggtgttaagatcaggagtcttctgcccaattcctctcactcctggctgtctaaacagtccttccatgatgttctgtgtccacctgcattcgttcatgtgacagtattcttatttcagtcctgccatgagcaggcacagtgagtgcccggtctcctctctgctcttgcttatgg

SEQ ID NO: 440838 - DNA, 1016 bp, Homo sapiens
agctggcgaggccgagcccctcctagtgcttccggaccttgctccctgaacactcggaggtggcggtggatcttactccttccagccagtgaggatccagcaacctgctccgtgcctcccgcgcctgttggttggaagtgacgaccttgaagatcggccggttggaagtgacgaccttgaagatcggcgggcgcagcggggccgagggggcgggtctggcgctaggtccagcccctgcgtgccgggaaccccagaggaggtcgcagttcagcccagctgaggcctgtctgcagaatcgacaccaaccagcatcatgtccatgacactggggtactgggacatccgcgggctggcccacgccatccgcctgctcctggaatacacagactcaagctacgaggaaaagaagtatacgatgggggacgctcctgactatgacagaagccagtggctgaatgaaaaattcaagctgggcctggactttcccaatgtggggagacagaagaggagaagattcgtgtggacattttggagaaccaggctatggacagctcctatgcagctggccagagtctgctacagcccagactttgagaaactgaagccagaatacttggaggaactccctgacaatgctgaagctctactcacagtttctggggaagcaggccatggtttgttggagacaagatcacctttgtagatttcctcgcctatgatgtccttgacctccaccgtatatttgagcccaactgcttggacgccttcccaaatctgaaggacttcatctcccgctttgaggtgatgcccccatcctcctttctctttgatgccccttgttccgttacctcctttcagatgctttcccagtcctggatctgcataaagaataacttgcatttattgagtgctggcttcatgccaggaaccttgcccagcacattatacctatcgtgtggaatttgaaatttccaacattcctacagggtgacagaattatcttgcccatttagaga

SEQ ID NO: 440839 - DNA, 298 bp, Homo sapiens
atgctggtatgtccagctgaagccagttccagctgtggggaagatggctgcttgctcgtggccagctggggccatacacagccctggggaggccacatctgtgcagggagcttgtgtctgagggtggtgacagctgttttctgcctcaggagaaactgaagccagaatacttggaggaactccctgacaatgctgaagctctactcacagtttctggggaagcaggccatggtttgttggagacaaggtaatgggggcatgtgatgaggacactagagatttgccatacatcctatgt

SEQ ID NO: 440840 - DNA, 871 bp, Homo sapiens
agcaaggcttcccctctaccctctctgggcctctcacaaacgctgagccccgccccgctgaggcctgtctgcagaatccacagcaaccagcaccatgcccatgacactggggtactggaacatccgcgggctggcccattccatccgcctgctcctggaatacacagactcaagctacgaggaaaagaagtacacgatgggggacgctcctgattatgacagaagccagtggctgaatgaaaaattcaagctgggcctggactttcccaatctgccctacttgattgatgggactcacaagatcacccagagcaacgccatcctgcggtacattgcccgcaagcacaacctgtgcggggaatcagaaaaggagcagattcgcgaagacattttggagaaccagtttatggacagccgtatgcagctggccaaactctgctatgacccagattttgagaaactgaaaccagaatacctgcaggcactccctgaaatgctgaagctctactcacagtttctggggaagcagccatggtttcttggggacaagatcacctttgtggatttcatcgcttatgatgtccttgagagaaaccaagtatttgagcccagctgcctggatgccttcccaaacctgaaggacttcatctcccgatttgagcgcggaaaagtgtaatgtaggctggagctcgagaaggacatctggatactggtggtgccggaccagccaaaagaaatcctgtggtcaaaacctgagcacacggaataagcccgtcatcaccatggcacattattttacacagaaagggacacactgtgccggaagtccagggaccccggatggaggacctgcatggggccgggcaaggac

SEQ ID NO: 440841 - DNA, 315 bp, Homo sapiens
gggtgaggcaggaacgagaggaggagatggggctccccttgtgcagagtcgtcacaaagtcagggaccctccatctctgacccgagctgtgggccatctctcccagctggcccattccatccgcctgctcctggaatacacagactcaagctacgaggaaaagaagtacacgatgggggacgcatctaacctgggccgcctgggggcatccctgggctatgccccgatatggttgcgagagtggggagatgctctcagatgggccagccatggttgaaatataaagctggctcaggtgctcctcagattccgacc

SEQ ID NO: 440842 - DNA, 1378 bp, Homo sapiens
agctggcgaggccgagcccctcctagtgcttccggaccttgctccctgaacactcggaggtggcggtggatcttactccttccagccagtgaggatccagcaacctgctccgtgcctcccgcgcctgttggttggaagtgacgaccttgaagatcggccggttggaagtgacgaccttgaagatcggcgggcgcagcggggccgagggggcgggtctggcgctaggtccagcccctgcgtgccgggaaccccagaggaggtcgcagttcagcccagctgaggcctgtctgcagaatcgacaccaaccagcatcatgtccatgacactggggtactgggacatccgcgggctggcccacgccatccgcctgctcctggaatacacagactcaagctacgaggaaaagaagtatacgatgggggacgctcctgactatgacagaagccagtggctgaatgaaaaattcaagctgggcctggactttcccaatctgccctacttgattgatggggctcacaagatcacccagagcaacgccatcctgtgctacattgcccgcaagcacaacctgtgtggggagacagaagaggagaagattcgtgtggacattttggagaaccaggctatggacagctcctatgcagctggccagagtctgctacagcccagactttgagaaactgaagccagaatacttggaggaactccctgacaatgctgaagctctactcacagtttctggggaagcaggccatggtttgttggagacaagatcacctttgtagatttcctcgcctatgatgtccttgacctccaccgtatatttgagcccaactgcttggacgccttcccaaatctgaaggacttcatctcccgctttgaggtttcctgtggcataatgtgatggtcaattttctgcatcaacttgactgggctaagggatgctcagatggcaggtaaaatcattgtgcttgtgagggtgtttccagaagagatttgcctttgaatcagaagacagcaaagatttccttcagcaatgaaggaggcatccaccaaactgtcagggcccagagagaagaaaaagacaggaagggtgaatttgacctctctgactgggacatccatctctgcctatcctgggacctccacactcctggttctctggccttcagacttgatcagggactaacaccatcgcctcccacccccacctttgttctgaggcctttagcctctgaatgataccactggctttcctgcttctctatcctgcagtcggcagatcatgggacttcttcactccaaaattgtgtgagccaattcccataacagatagataaatttataaataaacacacaaatttcctacagaaaaaaa

SEQ ID NO: 440843 - DNA, 1664 bp, Homo sapiens
agctggcgaggccgagcccctcctagtgcttccggaccttgctccctgaacactcggaggtggcggtggatcttactccttccagccagtgaggatccagcaacctgctccgtgcctcccgcgcctgttggttggaagtgacgaccttgaagatcggccggttggaagtgacgaccttgaagatcggcgggcgcagcggggccgagggggcgggtctggcgctaggtccagcccctgcgtgccgggaaccccagaggaggtcgcagttcagcccagctgaggcctgtctgcagaatcgacaccaaccagcatcatgtccatgacactggggtactgggacatccgcgggctggcccacgccatccgcctgctcctggaatacacagactcaagctacgaggaaaagaagtatacgatgggggacgctcctgactatgacagaagccagtggctgaatgaaaaattcaagctgggcctggactttcccaatattagaggtgttcggatcaggagtcttctgcccaattcctctcactcctggttgtctacacagcccctgcatgatgttctgtgtcccagctcatttgttcatgtgacagtatttctatgtcaggcctgccatgagcgggcacagtgagtgcctggtctcccctctgcccttgcatatgggaaggggatgctggggagcctgctggcccaactgagcttccccggtttcccatctatccagctgccctacttgattgatggggctcacaagatcacccagagcaacgccatcctgtgctacattgcccgcaagcacaacctgtgtggggagacagaagaggagaagattcgtgtggacattttggagaaccaggctatggacagctcctatgcagctggccagagtctgctacagcccagactttgagaaactgaagccagaatacttggaggaactccctgacaatgctgaagctctactcacagtttctggggaagcaggccatggtttgttggagacaagatcacctttgtagatttcctcgcctatgatgtccttgacctccaccgtatatttgagcccaactgcttggacgccttcccaaatctgaaggacttcatctcccgctttgagggcttggagaagatctctgcctacatgaagtccagccgcttcctcccaagacctgtgttcacaaagatggctgtctggggcaacaagtagggccttgaaggccaggaggtgggagtgaggagcccatactcagcctgctgcccaggctgtgcagcgcagctggactctgcatcccagcacctgcctcctcgttcctttctcctgtttattcccatctttactcccaagacttcattgtccctcttcactccccctaaacccctgtcccatgcaggccctttgaagcctcagctacccactatccttcgtgaacatccccctcccatcattacccttccctgcactaaagccagcctgaccttccttcctgttagtggttgtatctgctttgaagggcctacctggcccctcgcctgtggagctcagccctgagctgtccccgtgttgcataaggagcagcattgactggtttacaggccctgctcctgcagcatggcccctgccttaggcctacctgatcaaaataaagcctcagccacat

SEQ ID NO: 440844 - DNA, 1424 bp, Homo sapiens
agctggcgaggccgagcccctcctagtgcttccggaccttgctccctgaacactcggaggtggcggtggatcttactccttccagccagtgaggatccagcaacctgctccgtgcctcccgcgcctgttggttggaagtgacgaccttgaagatcggccggttggaagtgacgaccttgaagatcggcgggcgcagcggggccgagggggcgggtctggcgctaggtccagcccctgcgtgccgggaaccccagaggaggtcgcagttcagcccagctgaggcctgtctgcagaatcgacaccaaccagcatcatgtccatgacactggggtactgggacatccgcgggctggcccacgccatccgcctgctcctggaatacacagactcaagctacgaggaaaagaagtatacgatgggggacgctcctgactatgacagaagccagtggctgaatgaaaaattcaagctgggcctggactttcccaatctgccctacttgattgatggggctcacaagatcacccagagcaacgccatcctgtgctacattgcccgcaagcacaacctgtgtggggagacagaagaggagaagattcgtgtggacattttggagaaccaggctatggacagctcctatgcagctggccagagtctgctacagcccagactttgagaaactgaagccagaatacttggaggaactccctgacaatgctgaagctctactcacagtttctggggaagcaggccatggtttgttggagacaagatcacctttgtggatttcatcgcttatgatgtccttgagagaaaccaagtatttgagcccagctgcctggatgccttcccaaacctgaaggacttcatctcccgatttgagggcttggagaagatctctgcctacatgaagtccagccgcttcctcccaagacctgtgttcacaaagatggctgtctggggcaacaagtagggccttgaaggccaggaggtgggagtgaggagcccatactcagcctgctgcccaggctgtgcagcgcagctggactctgcatcccagcacctgcctcctcgttcctttctcctgtttattcccatctttactcccaagacttcattgtccctcttcactccccctaaacccctgtcccatgcaggccctttgaagcctcagctacccactatccttcgtgaacatccccctcccatcattacccttccctgcactaaagccagcctgaccttccttcctgttagtggttgtatctgctttgaagggcctacctggcccctcgcctgtggagctcagccctgagctgtccccgtgttgcataaggagcagcattgactggtttacaggccctgctcctgcagcatggcccctgccttaggcctacctgatcaaaataaagcctcagccacat

SEQ ID NO: 440845 - DNA, 1847 bp, Homo sapiens
agctggcgaggccgagcccctcctagtgcttccggaccttgctccctgaacactcggaggtggcggtggatcttactccttccagccagtgaggatccagcaacctgctccgtgcctcccgcgcctgttggttggaagtgacgaccttgaagatcggccggttggaagtgacgaccttgaagatcggcgggcgcagcggggccgagggggcgggtctggcgctaggtccagcccctgcgtgccgggaaccccagaggaggtcgcagttcagcccagctgaggcctgtctgcagaatcgacaccaaccagcatcatgtccatgacactggggtactgggacatccgcgggctggcccacgccatccgcctgctcctggaatacacagactcaagctacgaggaaaagaagtatacgatgggggacggtaatgacacccttgtgtccgggctctgcccactcacgctgagttggcaccaagcaacccatggtggccacctgtggctacctctgcaggcctcccctgctggagctgcaggctgtcccttccctgagccccggtgagggagtcctgtggccttgcaaggcagaatgctggggcgggatgctgggccccctgtttaattgggttgggtgtccctcagagcttccctaaaccctggaagccttagccgtgtggggtccagagccctcagcgggattctttgtccctgaaccctgggatgtgggactgagtggtcagattctagatccacctgtctcagggatcttgccactggttccttgggagggtccccgggaaggagggctgggctctggggaggtttgttttcacttcttcttccccacggcagctcctgactatgacagaagccagtggctgaatgaaaaattcaagctgggcctggactttcccaatctgccctacttgattgatggggctcacaagatcacccagagcaacgccatcttgtgctacattgcccgcaagcacaacctgtgtggggagacagaagaggagaagattcgtgtggacattttggagaaccagaccatggacaaccatatgcagctgggcatgatctgctacaatccagaatttgagaaactgaagccaaagtacttggaggaactccctgaaaagctaaagctctactcagagtttctggggaagcggccatggtttgcaggaaacaagatcacttttgtagattttctcgtctatgatgtccttgacctccaccgtatatttgagcccaagtgcttggacgccttcccaaatctgaaggacttcatctcccgctttgagggcttggagaagatctctgcctacatgaagtccagccgcttcctcccaagacctgtgttctcaaagatggctgtctggggcaacaagtagggccttgaaggccaggaggtgggagtgaggagcccatactcagcctgctgcccaggctgtgcagcgcagctggactctgcatcccagcacctgcctcctcgttcctttctcctgtttattcccatctttactcccaagacttcattgtccctcttcactccccctaaacccctgtcccatgcaggccctttgaagcctcagctacccactatccttcgtgaacatcccctcccatcattacccttccctgcactaaagccagcctgaccttccttcctgttagtggttgtgtctgctttaaagggcctgcctggcccctcgcctgtggagctcagccccgagctgtccccgtgttgcatgaaggagcagcattgactggtttacaggccctgctcctgcagcatggtccctgccttaggcctacctgatggaagtaaagcctcaaccaca

SEQ ID NO: 440846 - DNA, 1420 bp, Homo sapiens
agctggcgaggccgagcccctcctagtgcttccggaccttgctccctgaacactcggaggtggcggtggatcttactccttccagccagtgaggatccagcaacctgctccgtgcctcccgcgcctgttggttggaagtgacgaccttgaagatcggccggttggaagtgacgaccttgaagatcggcgggcgcagcggggccgagggggcgggtctggcgctaggtccagcccctgcgtgccgggaaccccagaggaggtcgcagttcagcccagctgaggcctgtctgcagaatcgacaccaaccagcatcatgtccatgacactggggtactgggacatccgcgggctggcccacgccatccgcctgctcctggaatacacagactcaagctacgaggaaaagaagtatacgatgggggacgctcctgactatgacagaagccagtggctgaatgaaaaattcaagctgggcctggactttcccaatctgccctacttgattgatggggctcacaagatcacccagagcaacgccatcctgtgctacattgcccgcaagcacaacctgtgtggggagacagaagaggagaagattcgtgtggacattttggagaaccagaccatggacaaccatatgcagctgggcatgatctgctacaatccagaatttgagaaactgaagccaaagtacttggaggaactccctgaaaagctaaagctctactcagagtttctggggaagcggccatggtttgcaggaaacaagatcacttttgtagattttctcgtctatgatgtccttgacctccaccgtatatttgagcccaagtgcttggacgccttcccaaatctgaaggacttcatctcccgctttgagggcttggagaagatctctgcctacatgaagtccagccgcttcctcccaagacctgtgttctcaaagatggctgtctggggcaacaagtagggccttgaaggccaggaggtgggagtgaggagcccatactcagcctgctgcccaggctgtgcagcgcagctggactctgcatcccagcacctgcctcctcgttcctttctcctgtttattcccatctttactcccaagacttcattgtccctcttcactccccctaaacccctgtcccatgcaggccctttgaagcctcagctacccactatccttcgtgaacatcccctcccatcattacccttccctgcactaaagccagcctgaccttccttcctgttagtggttgtgtctgctttaaagggcctgcctggcccctcgcctgtggagctcagccccgagctgtccccgtgttgcatgaaggagcagcattgactggtttacaggccctgctcctgcagcatggtccctgccttaggcctacctgatggaagtaaagcctcaaccaca

SEQ ID NO: 440847 - DNA, 1146 bp, Homo sapiens
ggtttaggcctgtctgcggaatccgcaccaaccagcaccatgcccatgatactggggtactgggacatccgcgggctggcccacgccatccgcctgctcctggaatacacagactcaagctatgaggaaaagaagtacacgatgggggacgctcctgattatgacagaagccagtggctgaatgaaaaattcaagctgggcctggactttcccaatctgccctacttgattgatggggctcacaagatcacccagagcaacgccatcttgtgctacattgcccgcaagcacaacctgtgtggggagacagaagaggagaagattcgtgtggacattttggagaaccagaccatggacaaccatatgcagctgggcatgatctgctacaatccagaatttgagaaactgaagccaaagtacttggaggaactccctgaaaagctaaagctctactcagagtttctggggaagcggccatggtttgcaggaaacaagatcacttttgtagattttctcgtctatgatgtccttgacctccaccgtatatttgagcccaagtgcttggacgccttcccaaatctgaaggacttcatctcccgctttgagggcttggagaagatctctgcctacatgaagtccagccgcttcctcccaagacctgtgttctcaaagatggctgtctggggcaacaagtagggccttgaaggccaggaggtgggagtgaggagcccatactcagcctgctgcccaggctgtgcagcgcagctggactctgcatcccagcacctgcctcctcgttcctttctcctgtttattcccatctttactcccaagacttcattgtccctcttcactccccctaaacccctgtcccatgcaggccctttgaagcctcagctacccactatccttcgtgaacatcccctcccatcattacccttccctgcactaaagccagcctgaccttccttcctgttagtggttgtgtctgctttaaagggcctgcctggcccctcgcctgtggagctcagccccgagctgtccccgtgttgcatgaaggagcagcattgactggtttacaggccctgctcctgcagcatggtccctgccttaggcctacctgatggaagtaaagcctcaaccaca

SEQ ID NO: 440848 - DNA, 1754 bp, Homo sapiens
agcaaggcttcccctctaccctctctgggcctctcacaaacgctgagccccgccccgctgaggcctgtctgcagaatccacagcaaccagcaccatgcccatgacactggggtactggaacatccgcgggctggcccattccatccgcctgctcctggaatacacagactcaagctacgaggaaaagaagtacacgatgggggacgctcctgattatgacagaagccagtggctgaatgaaaaattcaagctgggcctggactttcccaatctgccctacttgattgatgggactcacaagatcacccagagcaacgccatcctgcggtacattgcccgcaagcacaacctgtgcggggaatcagaaaaggagcagattcgcgaagacattttggagaaccagtttatggacagccgtatgcagctggccaaactctgctatgacccagattttgtaagtccccccaccccactcccagtctccccttccctactcccagtctcccctttccctgcagagtttgtgtccaaaattgattccttctggtgagttcttggtcttgctgactctaagaatgaagccgcggtcctacacggtgagtgttacagttcttaaagatggtgtgtccggagtttgttccttcagatgttcagatgtgtccgcagtttcttccttccggtgggtttgtggtcttgctgacttcaggggtgaagccgcagaccttcgcagtgagtgctacagctcttaaaggtggcgcgtctggagttgtttattcctcttggtgggttcatggtctggctggcttcaggagtgaagctgcagaccttcatagtgaatgttatagctcataaaggtagttcaaacccaaagagtgagcaacagcaggatttatggtgacgagtgaaagaaaatacacttccacagcctggaagacaacctgagcagagtgctgattggtccgttttacagagtgctgattggtctgtttttacagagtgctgattggagaaactgaaaccagaatacctgcaggcactccctgaaatgctgaagctctactcacagtttctggggaagcagccatggtttcttggggacaagatcacctttgtggatttcatcgcttatgatgtccttgagagaaaccaagtatttgagcccagctgcctggatgccttcccaaacctgaaggacttcatctcccgatttgagggcttggagaagatctctgcctacatgaagtccagccgcttcctcccaagacctgtgttcacaaagatggctgtctggggcaacaagtagggccttgaaggccaggaggtgggagtgaggagcccatactcagcctgctgcccaggctgtgcagcgcagctggactctgcatcccagcacctgcctcctcgttcctttctcctgtttattcccatctttactcccaagacttcattgtccctcttcactccccctaaacccctgtcccatgcaggccctttgaagcctcagctacccactatccttcgtgaacatccccctcccatcattacccttccctgcactaaagccagcctgaccttccttcctgttagtggttgtatctgctttgaagggcctacctggcccctcgcctgtggagctcagccctgagctgtccccgtgttgcataaggagcagcattgactggtttacaggccctgctcctgcagcatggcccctgccttaggcctacctgatcaaaataaagcctcagccacat

SEQ ID NO: 440849 - DNA, 1589 bp, Homo sapiens
agcaaggcttcccctctaccctctctgggcctctcacaaacgctgagccccgccccgctgaggcctgtctgcagaatccacagcaaccagcaccatgcccatgacactggggtactggaacatccgcgggctggcccattccatccgcctgctcctggaatacacagactcaagctacgaggaaaagaagtacacgatgggggacgctcctgattatgacagaagccagtggctgaatgaaaaattcaagctgggcctggactttcccaatctgccctacttgattgatgggactcacaagatcacccagagcaacgccatcctgcggtacattgcccgcaagcacaacctgtagtttgtgtccaaaattgattccttctggtgagttcttggtcttgctgactctaagaatgaagccgcggtcctacacggtgagtgttacagttcttaaagatggtgtgtccggagtttgttccttcagatgttcagatgtgtccgcagtttcttccttccggtgggtttgtggtcttgctgacttcaggggtgaagccgcagaccttcgcagtgagtgctacagctcttaaaggtggcgcgtctggagttgtttattcctcttggtgggttcatggtctggctggcttcaggagtgaagctgcagaccttcatagtgaatgttatagctcataaaggtagttcaaacccaaagagtgagcaacagcaggatttatggtgacgagtgaaagaaaatacacttccacagcctggaagacaacctgagcagagtgctgattggtccgttttacagagtgctgattggtctgtttttacagagtgctgattggagaaactgaaaccagaatacctgcaggcactccctgaaatgctgaagctctactcacagtttctggggaagcagccatggtttcttggggacaagatcacctttgtggatttcatcgcttatgatgtccttgagagaaaccaagtatttgagcccagctgcctggatgccttcccaaacctgaaggacttcatctcccgatttgagggcttggagaagatctctgcctacatgaagtccagccgcttcctcccaagacctgtgttcacaaagatggctgtctggggcaacaagtagggccttgaaggccaggaggtgggagtgaggagcccatactcagcctgctgcccaggctgtgcagcgcagctggactctgcatcccagcacctgcctcctcgttcctttctcctgtttattcccatctttactcccaagacttcattgtccctcttcactccccctaaacccctgtcccatgcaggccctttgaagcctcagctacccactatccttcgtgaacatccccctcccatcattacccttccctgcactaaagccagcctgaccttccttcctgttagtggttgtatctgctttgaagggcctacctggcccctcgcctgtggagctcagccctgagctgtccccgtgttgcataaggagcagcattgactggtttacaggccctgctcctgcagcatggcccctgccttaggcctacctgatcaaaataaagcctcagccacat

SEQ ID NO: 440850 - DNA, 1035 bp, Homo sapiens
ggtttaggcctgtctgcggaatccgcaccaaccagcaccatgcccatgatactggggtactgggacatccgcgggctggcccacgccatccgcctgctcctggaatacacagactcaagctatgaggaaaagaagtacacgatgggggacgctcctgattatgacagaagccagtggctgaatgaaaaattcaagctgggcctggactttcccaatctgccctacttgattgatggggctcacaagatcacccagagcaacgccatcttgtgctacattgcccgcaagcacaacctgtgtggggagacagaagaggagaagattcgtgtggacattttggagaaccagaccatggacaaccatatgcagctgggcatgatctgctacaatccagaatttgagaaactgaagccaaagtacttggaggaactccctgaaaagctaaagctctactcagagtttctggggaagcggccatggtttgcaggaaacaagggcttggagaagatctctgcctacatgaagtccagccgcttcctcccaagacctgtgttctcaaagatggctgtctggggcaacaagtagggccttgaaggccaggaggtgggagtgaggagcccatactcagcctgctgcccaggctgtgcagcgcagctggactctgcatcccagcacctgcctcctcgttcctttctcctgtttattcccatctttactcccaagacttcattgtccctcttcactccccctaaacccctgtcccatgcaggccctttgaagcctcagctacccactatccttcgtgaacatcccctcccatcattacccttccctgcactaaagccagcctgaccttccttcctgttagtggttgtgtctgctttaaagggcctgcctggcccctcgcctgtggagctcagccccgagctgtccccgtgttgcatgaaggagcagcattgactggtttacaggccctgctcctgcagcatggtccctgccttaggcctacctgatggaagtaaagcctcaaccaca

SEQ ID NO: 440851 - DNA, 1337 bp, Homo sapiens
agcaaggcttcccctctaccctctctgggcctctcacaaacgctgagccccgccccgctgaggcctgtctgcagaatccacagcaaccagcaccatgcccatgacactggggtactggaacatccgcgggctggcccacgccatccgcctgctcctggaatacacagactcaagctatgaggaaaagaagtacacgatgggggacgctcctgattatgacagaagccagtggctgaatgaaaaattcaagctgggcctggactttcccaatctgccctacttgattgatggggctcacaagatcacccagagcaacgccatcttgtgctacattgcccgcaagcacaacctgtgtggggagacagaagaggagaagattcgtgtggacattttggagaaccagaccatggacaaccatatgcagctgggcatgatctgctacaatccagaatttgagaaactgaagccaaagtacttggaggaactccctgaaaagctaaagctctactcagagtttctggggaagcggccatggtttgcaggaaacaagatcacttttgtagattttctcgtctatgatgtccttgacctccaccgtatatttgagcccaagtgcttggacgccttcccaaatctgaaggacttcatctcccgctttgagggcttggagaagatctctgcctacatgaagtccagccgcttcctcccaagacctgtgttctcaaagatggctgtctggggcaacaagtagggccttgaaggccaggaggtgggagtgaggagcccatactcagcctgctgcccaggctgtgcagcgcagctggactctgcatcccagcacctgcctcctcgttcctttctcctgtttattcccatctttactcccaagacttcattgtccctcttcactccccctaaacccctgtcccatgcaggccctttgaagcctcagctacccactatccttcgtgaacatcccctcccatcattacccttccctgcactaaagccagcctgaccttccttcctgttagtggttgtgtctgctttaaagggcctgcctggcccctcgcctgtggagctcagccccgagctgtccccgtgttgcatgaaggagcagcattgactggtttacaggccctgctcctgcagcatggtccctgccttaggcctacctgatggaagtaaagcctcaaccacaaaaaagaaaaaaaaaaaaaaaaaaaaagaaaaaacaatgggggggcccaatacaaaaattaaaaataaaaaacctcgggggggggcccggtccccaattggccttatagggagcggtttaacaatccatgggcggt

SEQ ID NO: 440852 - DNA, 1068 bp, Homo sapiens
agcaaggcttcccctctaccctctctgggcctctcacaaacgctgagccccgccccgctgaggcctgtctgcagaatccacagcaaccagcaccatgcccatgacactggggtactggaacatccgcgggctggcccacgccatccgcctgctcctggaatacacagactcaagctatgaggaaaagaagtacacgatgggggacgctcctgattatgacagaagccagtggctgaatgaaaaattcaagctgggcctggactttcccaatctgccctacttgattgatggggctcacaagatcacccagagcaacgccatcttgtgctacattgcccgcaagcacaacctgtgtggggagacagaagaggagaagattcgtgtggacattttggagaaccagaccatggacaaccatatgcagctgggcatgatctgctacaatccagaatttgagaaactgaagccaaagtacttggaggaactccctgaaaagctaaagctctactcagagtttctggggaagcggccatggtttgcaggaaacaagatcacttttgtagattttctcgtctatgatgtccttgacctccaccgtatatttgagcccaagtgcttggacgccttcccaaatctgaaggacttcatctcccgctttgagggcttggagaagatctctgcctacatgaagtccagccgcttcctcccaagacctgtgttctcaaagatggctgtctggggcaacaagtagggccttgaaggccaggaggtgggagtgaggagcccatactcagcctgctgcccaggctgtgcagcgcagctggactctgcatcccagcacctgcctcctcgttcctttctcctgtttattcccatctttactcccaagacttcattgtccctcttcactccccctaaacccctgtccctggcccctcgcctgtggagctcagccccgagctgtccccgtgttgcatgaaggagcagcattgactggtttacaggccctgctcctgcagcatggtccctgccttaggcctacctgatggaagtaaagcctcaaccaca

SEQ ID NO: 440853 - DNA, 1420 bp, Homo sapiens
agctggcgaggccgagcccctcctagtgcttccggaccttgctccctgaacactcggaggtggcggtggatcttactccttccagccagtgaggatccagcaacctgctccgtgcctcccgcgcctgttggttggaagtgacgaccttgaagatcggccggttggaagtgacgaccttgaagatcggcgggcgcagcggggccgagggggcgggtctggcgctaggtccagcccctgcgtgccgggaaccccagaggaggtcgcagttcagcccagctgaggcctgtctgcagaatcgacaccaaccagcatcatgtccatgacactggggtactgggacatccgcgggctggcccacgccatccgcctgctcctggaatacacagactcaagctacgaggaaaagaagtatacgatgggggacggtaatgacacccttgtgtccgggctctgcccactcacgctgagttggcaccaagcaacccatggtggccacctgtggctacctctgcaggcctcccctgctggagctgcaggctgtcccttccctgagccccggtgagggagtcctgtggccttgcaaggcagaatgctggggcgggatgctgggccccctgtttaattgggttgggtgtccctcagagcttccctaaaccctggaagccttagccgtgtggggtccagagccctcagcgggattctttgtccctgaaccctgggatgtgggactgagtggtcagattctagatccacctgtctcagggatcttgccactggttccttgggagggtccccgggaaggagggctgggctctggggaggtttgttttcacttcttcttccccacggcagctcctgactatgacagaagccagtggctgaatgaaaaattcaagctgggcctggactttcccaatctgccctacttgattgatggggctcacaagatcacccagagcaacgccatcttgtgctacattgcccgcaagcacaacctgtgtggggagacagaagaggagaagattcgtgtggacattttggagaaccagaccatggacaaccatatgcagctgggcatgatctgctacaatccagaatttgagaaactgaagccaaagtacttggaggaactccctgaaaagctaaacatgcaggccctttgaagcctcagctacccactatccttcgtgaacatcccctcccatcattacccttccctgcactaaagccagcctgaccttccttcctgttagtggttgtgtctgctttaaagggcctgcctggcccctcgcctgtggagctcagccccgagctgtccccgtgttgcatgaaggagcagcattgactggtttacaggccctgctcctgcagcatggtccctgccttaggcctacctgatggaagtaaagcctcaaccaca

SEQ ID NO: 440854 - DNA, 1021 bp, Homo sapiens
acgccatcctgtgctacattgcccgcaagcacaacctgtgtggggagacagaagaggagaagattcgtgtggacattttggacaaccagcatcatgtccatgacactggggtactgggacatccgcgggctggcccacgccatccgcctgctcctggaatacacagactcaagctacgaggaaaagaagtatacgatgggggacgctcctgactatgacagaagccagtggctgaatgaaaaattcaagctgggcctggactttcccaatctgccctacttgattgatggggctcacaagatcacccagagcaacgccatcctgtgctacattgagaaactgaagccagaatacttggaggaactccctgacaatgctgaagctctactcacagtttctggggaagcaggccatggtttgttggagacaagatcacctttgtagatttcctcgcctatgatgtccttgacctccaccgtatatttgagcccaactgcttggacgccttcccaaatctgaaggacttcatctcccgctttgagggcttggagaagatctctgcctacatgaagtccagccgcttcctcccgccaggaggtgggagtgaggagcccatactcagcctgctgcccaggctgtgcagcgcagctggactctgcatcccagcacctgcctcctcgttcctttctcctgtttattcccatctttacccccaagactttattgggcctcttcacttcccctaaacccctgtcccatgcaggccctttgaagcctcagctacccactttccttcatgaacatccccctcccaacactacccttccctgcactaaagccagcctgaccttccttcctgttagtggttgtatctgctttgaagggcctacctggcccctcgcctgtggagctcagccctgagctgtccccgtgttgcatgacagcattgactggtttacaggccctgctcctgcagcatggcccctgccttaggcctacctgatcaaaataaagcctcagc

SEQ ID NO: 440855 - DNA, 6122 bp, Homo sapiens
ctggagctacacgcaggtgcggcgcacgggcggcggcggcgtggagaccgtgcagggccccggcgtgtcgtgggtgcaccccgacggcgtgggcgtgcagatcgacaccatcacgccggagatccgcgcgctctacaacgtgctggccaaggtgaagcgcgagcgcgacgagtataagcggaggtgggaggaggagctcgccaagcgcatgaaccttcagaccatggtggacacgctgcaggaggcagcacaggaggctgatgccatccaggaggagatgaatgagaagatcgagcggctcaaggccgagctggtggtgtttaaggggcttatgagtgaccccatgacagacctggacacaaagatccaagaaaaggccatgaaggtggacatggacatctgccgccgaatcgatatcacggccaagctgtgcgatgtcgcacagcagcggaactcagaagacgtgtccaagatcttccaggtggtccccaaaaagaaagagcgtaaggtggcttccgatgatgacatctctgagcaggacggggaggtgaaccggttctcggacgatgaggtcggctccatgaacatcaccgatgagatgaagcgcatgtttaaccagctgcgggagacctttgactttgacgacgactgtgacagcctgacgtgggaagagaatgaagacacgctgctgctctgggaggatttcaccaactgcaatccgaccatcgacctgcagggcgagcaagaggaaaacttgggcaacttgatccatgagaccgaatccttcttcaagacgagagacaaggagtaccaggaaacgataggtcagatcgagctcgagctggccacagccaaaagtgacatgaaccgacacctgcacgagtacatggagatgtgcagcatgaagcgaggcctggacgtgcagatggagacctgccgccggctcatcaaaggctccgcagacaggaattcaccgtcccccagctccgtggccagcagcgactcaggaagtacagatgagatccaggatgagttcgagcgcgaggcggatgtggagcccatggtcagctgatgactgaggccctgcgagcctggtggtcttggtgatggggccctgccacctctcctcatggggccaggaaggcccctcggagtggggttcgaagccacaccacacagactttctctgccctcccttctctggaggccctgagggactgctgcttccttccttccttccacaccaccaacgggtgccccgtctccatcccccacccacccaaggaatggtgctgtcaatttctattgttctccacattacaaatgcagacttctgtgcggactttgcagtgttaactgtgccttctcccttaagctgagccactttgagctccaaagaattattcctagcaggtgtttttatacagaactctaagctgagggccgggccaaccggccgtggtgtaatgtggtttctgccgtccgtcccacctgctcctctgattggccatgggctatgccctcccttcctcctgagccagcccagactcggcctggagcttggggtgctctgccaacccccaggaaggagccgcttgcctctgtgagctttctaggcctgggtagggaccaccccaattttctcactccctgaaggagagaaaggtggaaggaagggaaggaggacacattttaattttttggggggatcgagtggcaaagttgaagggacaaggcactgtgaggggaaggcagagcctcactgtgtttaaactactatgcaaaaaacaaaacaaacaacaaaagcagcttgccttatatcattgtggaaggcaggacctctcctgggctcctggcttccccctggagctgggagagaggccggggttagggtgatctgtgtggcagcactgactgggtagtgtgggtttggccgaggttggtcatgaggctggggttcccgcaaggcactggcctccctgaccgcttgcttccttccggacctctgggttcagggcgggggcggagggatccttgatttccctgataacttgatgttcttccctccctcgccagccaacaatagaggcttagagatctgtaatttctctgtgagaaagtctgaaggggccaggcctggtctctgctcccttctacccgccttgggttaggactgtccggcagttgcctgcttttggctgctggcaggagagaagcagggtgggctgctggcagtgcaggagctggagtgagggccatcctctttctgctcctcgacacacgcaagccgctctcagcagttccctcgactggccagtcggggtattgatctgagccagcatcccccaagacttgaatggcttgagtgggactgcgttgaagggcactgtgtggcccccttccaaatctcagcttggagccagctgagcaggctttgctttattattattttttaagcctactgcagtgggtctgttgccaattttaattttttattgtcccaggagctccctctagtggtcaaggtagcaaaatgtgcccaaggactagaacttgggtccctctgccttgcctggaggcagaaggagggggctctgggtttgactgggattgtggtccccaggggtccgtggcctttaaggctcttctctcttttctgtttcccccacctgtgttacagtcttaaaaatactgtacataaaagatatatgtagagagagagagagagcgtgagaatgtgttagtgactatgtgtgatgtaatttatcacgatttggtggccttcgtcatgagttttttcctttgttttcttttgctgggggcacctcccacgggtcccctgtggcagtctggctgtgacacttccatagtcagcatctcttgttagccaaacagttccctttgacaggtacttggagggacaatggttttggaagagagacggcccttctctctcctcactcacccttgttctaaaggttacagggttcaaacatacctgattcttgttgttattgttgttgaatttttattttaaccaaaggttatcagagccagttgggcttggacctcagctgctaaaaagattttccgtttcctcgagggcaggaaaacatccaccctcgtgggtctcctccgtccagggccgagggaggcattggacaatgtggtatgggagtttcgtgggcagcgtggaagccggccctgggttgttccccaaggtggtgggagggtgacagatatatctttagacttaagactgtaaggcagcagtgttagcatgggagtaactaaggttactgtggttatcggtgtccggcggtattatttttactttcctccttgtatacataggtcatttgtctttgaggactagggtactctagggagtttgaaaactgcaggagccagaaagagatcctggcctgagagtcccttctggctggcttttaatatctgctctcctcttgggagtgaggacttggggcaggtgggtaggagagggaaagccagagtgtgatgggcctgcctcctgggctggttcctgggtccggcctgcctgcctgcctgcctgcctctccaccacatgcttttttcagttaatgtcagtgggccctgcttgtcccctcaccatgagcccacagcttgccaagaaagaccccaacgctcgctggggcagcaccagtcctagctgggacgaattggtccatcctttgtaaagctgtaaatacttaattttgactttctatttctaagcccagtgtcatattgacactggtattttagaattttctcagatgggctctcctgcgctgccctctgtctcctgtttttgggggttttatacaaacagaggattggggagggataggaagactagcatccttttggctccctggttggttgtgaaatacacacacacacacacacacacacacacacactcgcactcctctgagactccgaacagagaaaaaaattattggcaaatcaacacatttttctttctcgtcttgagaaaatgtcttgaggtccctgaagggccaaatccatcgtggactaactctgtgggtagagctcagatgacctagggagaattaaaccacttaagcttggagtgggaggagagggggtggggtgggggagaatataagatgtaacttaagctaaatgtaatctatttataaagcaagagactctcatctatttttatgaaaggaagggttttttaatctagggtaggcagttgtggtagcccagcattttcctgtggacgagacatggtgcatgttgttgctggattgaatggaacccattcctgtcccccggcctcgtcttctgtcctcacttttggtcatccacacccatgagcagcttcagcagagtgtaggtcccacttcaccccattctcctctcctctgacccctcagctccttggaagtcttggggtggggatctgagggggtgggtgggctgcaggaaattcagaaatgtggtgggtgggggaagggacaaggcgcattagggagggaacaagctgggctctggggataggctctgattaattagttactctgactctggtctgccgagatccatttccaacccagttgcgttgggagagggttgggaggcagcagagcatgggtgacagtgggagcacacgacttccttggagcctgggcctttgcgggtcccaggtggtcaggcagctggagcagaagtggaaatggcttaagatgctcatagcccagccccggctgtgtctactccaggccaagcctgggctgcagtccttgctatgttccccccagggccctggggggagggatcagggtgctgggggtttcctaggacaggggtcttcccccttgagacaccaagctctggctctagaagagctctctcctggagtggggagtctggaggggactgggtgggtgcaggtaaagccagattctctctggaagggaattttctatgaatggatgatttccaggctcagggtgggctgtgtgttagttctgagcaaatccctcaccaagacccttccctcccaagccctcaaagaaatgaggcaaagcccttccctgcaagaccccttgtggatgtttttgcatctacctgatttttagccccacccagggagactttataccccatgatcctgccccaccgttgctgttgtctgccagctgggtctagcatcacagggaagggggggatttatactcatggaaagactactgatcctaccggaaaccaacctgtttactgtactgttgtaaatatcatgccctttatatcctgtatattggcttcttttaaataaagtgaaatgtcttagaaaaaaaaaaaacaaagaaacaaaaaaacttggggggcatattatatgtgcaggggtgtgcgggaaaaagagggatacagtagaatggtgcacacatgtggtcttcatataggcgtgttttcatgtgaaccacagttttcttggtccaccaaacagtgggcaagaaatcggcccgggatacacccgaatagggcgacgcccgctattaaattgtccggaaataaagcccacggggtaaaccctgtgcacatatcacgaactccggaaaacaagcatagaacagagcacagcagcacgacgaaggaccaacaaacaacacaacatcagcaaaaacacacaagagaacacaccagaaaccataaatagcatacagacaaaataaagagccaggcaaacccaagaacacaaacaaacatcaacgaacacaaaaaaccaaaaaaccaaaaaaccagccaaacaaacataaaagtaacacccaaaaacaaaaaacaagtaagaagagggaaaggcacgaagacgagagggagaagaagaggactcagccagaagacgacgcgagaggggggagccacagggaagcaaagagcaaaaaaggcgagagacggcgagggaaagacacagcagaggctagtaagcagagagaggaggacagccgacaagcacggacaaagagcaagcgagagaagaggcagaagagggagagggtgcagataagagagggcggagggagacacggagcaggcagccagaaaagacaacgcagacggaaaaagaa

SEQ ID NO: 440856 - DNA, 6071 bp, Homo sapiens
ctggagctacacgcaggtgcggcgcacgggcggcggcggcgtggagaccgtgcagggccccggcgtgtcgtgggtgcaccccgacggcgtgggcgtgcagatcgacaccatcacgccggagatccgcgcgctctacaacgtgctggccaaggtgaagcgcgagcgcgacgagtataagcggaggtgggaggaggagctcgccaagcgcatgaaccttcagaccatggtggacacgctgcaggaggcagcacaggaggctgatgccatccaggaggagatgaatgagaagatcgagcggctcaaggccgagctggtggtgtttaaggggcttatgagtgaccccatgacagacctggacacaaagatccaagaaaaggccatgaaggtggacatggacatctgccgccgaatcgatatcacggccaagctgtgcgatgtcgcacagcagcggaactcagaagacgtgtccaagatcttccaggtggtccccaaaaagaaagagcgtaaggtggcttccgatgatgacatctctgagcaggacggggaggtgaaccggttctcggacgatgaggtcggctccatgaacatcaccgatgagatgaagcgcatgtttaaccagctgcgggagacctttgactttgacgacgactgtgacagcctgacgtgggaagagaatgaagacacgctgctgctctgggaggatttcaccaactgcaatccgaccatcgacctgcagggcgagcaagaggaaaacttgggcaacttgatccatgagaccgaatccttcttcaagacgagagacaaggagtaccaggaaacgataggtcagatcgagctcgagctggccacagccaaaagtgacatgaaccgacacctgcacgagtacatggagatgtgcagcatgaagcgaggcctggacgtgcagatggagacctgccgccggctcatcaaaggctccgcagacaggaattcaccgtcccccagctccgtggccagcagcgactcaggaagtacagatgagatccaggatgagttcgagcgcgaggcggatgtggagcccatggtcagctgatgactgaggccctgcgagcctggtggtcttggtgatggggccctgccacctctcctcatggggccaggaaggcccctcggagtggggttcgaagccacaccacacagactttctctgccctcccttctctggaggccctgagggactgctgcttccttccttccttccacaccaccaacgggtgccccgtctccatcccccacccacccaaggaatggtgctgtcaatttctattgttctccacattacaaatgcagacttctgtgcggactttgcagtgttaactgtgccttctcccttaagctgagccactttgagctccaaagaattattcctagcaggtgtttttatacagaactctaagctgagggccgggccaaccggccgtggtgtaatgtggtttctgccgtccgtcccacctgctcctctgattggccatgggctatgccctcccttcctcctgagccagcccagactcggcctggagcttggggtgctctgccaacccccaggaaggagccgcttgcctctgtgagctttctaggcctgggtagggaccaccccaattttctcactccctgaaggagagaaaggtggaaggaagggaaggaggacacattttaattttttggggggatcgagtggcaaagttgaagggacaaggcactgtgaggggaaggcagagcctcactgtgtttaaactactatgcaaaaaacaaaacaaacaacaaaagcagcttgccttatatcattgtggaaggcaggacctctcctgggctcctggcttccccctggagctgggagagaggccggggttagggtgatctgtgtggcagcactgactgggtagtgtgggtttggccgaggttggtcatgaggctggggttcccgcaaggcactggcctccctgaccgcttgcttccttccggacctctgggttcagggcgggggcggagggatccttgatttccctgataacttgatgttcttccctccctcgccagccaacaatagaggcttagagatctgtaatttctctgtgagaaagtctgaaggggccaggcctggtctctgctcccttctacccgccttgggttaggactgtccggcagttgcctgcttttggctgctggcaggagagaagcagggtgggctgctggcagtgcaggagctggagtgagggccatcctctttctgctcctcgacacacgcaagccgctctcagcagttccctcgactggccagtcggggtattgatctgagccagcatcccccaagacttgaatggcttgagtgggactgcgttgaagggcactgtgtggcccccttccaaatctcagcttggagccagctgagcaggctttgctttattattattttttaagcctactgcagtgggtctgttgccaattttaattttttattgtcccaggagctccctctagtggtcaaggtagcaaaatgtgcccaaggactagaacttgggtccctctgccttgcctggaggcagaaggagggggctctgggtttgactgggattgtggtccccaggggtccgtggcctttaaggctcttctctcttttctgtttcccccacctgtgttacagtcttaaaaatactgtacataaaagatatatgtagagagagagagagagcgtgagaatgtgttagtgactatgtgtgatgtaatttatcacgatttggtggccttcgtcatgagttttttcctttgttttcttttgctgggggcacctcccacgggtcccctgtggcagtctggctgtgacacttccatagtcagcatctcttgttagccaaacagttccctttgacaggtacttggagggacaatggttttggaagagagacggcccttctctctcctcactcacccttgttctaaaggttacagggttcaaacatacctgattcttgttgttattgttgttgaatttttattttaaccaaaggttatcagagccagttgggcttggacctcagctgctaaaaagattttccgtttcctcgagggcaggaaaacatccaccctcgtgggtctcctccgtccagggccgagggaggcattggacaatgtggtatgggagtttcgtgggcagcgtggaagccggccctgggttgttccccaaggtggtgggagggtgacagatatatctttagacttaagactgtaaggcagcagtgttagcatgggagtaactaaggttactgtggttatcggtgtccggcggtattatttttactttcctccttgtatacataggtcatttgtctttgaggactagggtactctagggagtttgaaaactgcaggagccagaaagagatcctggcctgagagtcccttctggctggcttttaatatctgctctcctcttgggagtgaggacttggggcaggtgggtaggagagggaaagccagagtgtgatgggcctgcctcctgggctggttcctgggtccggcctgcctgcctgcctgcctgcctctccaccacatgcttttttcagttaatgtcagtgggccctgcttgtcccctcaccatgagcccacagcttgccaagaaagaccccaacgctcgctggggcagcaccagtcctagctgggacgaattggtccatcctttgtaaagctgtaaatacttaattttgactttctatttctaagcccagtgtcatattgacactggtattttagaattttctcagatgggctctcctgcgctgccctctgtctcctgtttttgggggttttatacaaacagaggattggggagggataggaagactagcatccttttggctccctggttggttgtgaaatacacacacacacacacacacacacacacacactcgcactcctctgagactccgaacagagaaaaaaattattggcaaatcaacacatttttctttctcgtcttgagaaaatgtcttgaggtccctgaagggccaaatccatcgtggactaactctgtgggtagagctcagatgacctagggagaatataagatgtaacttaagctaaatgtaatctatttataaagcaagagactctcatctatttttatgaaaggaagggttttttaatctagggtaggcagttgtggtagcccagcattttcctgtggacgagacatggtgcatgttgttgctggattgaatggaacccattcctgtcccccggcctcgtcttctgtcctcacttttggtcatccacacccatgagcagcttcagcagagtgtaggtcccacttcaccccattctcctctcctctgacccctcagctccttggaagtcttggggtggggatctgagggggtgggtgggctgcaggaaattcagaaatgtggtgggtgggggaagggacaaggcgcattagggagggaacaagctgggctctggggataggctctgattaattagttactctgactctggtctgccgagatccatttccaacccagttgcgttgggagagggttgggaggcagcagagcatgggtgacagtgggagcacacgacttccttggagcctgggcctttgcgggtcccaggtggtcaggcagctggagcagaagtggaaatggcttaagatgctcatagcccagccccggctgtgtctactccaggccaagcctgggctgcagtccttgctatgttccccccagggccctggggggagggatcagggtgctgggggtttcctaggacaggggtcttcccccttgagacaccaagctctggctctagaagagctctctcctggagtggggagtctggaggggactgggtgggtgcaggtaaagccagattctctctggaagggaattttctatgaatggatgatttccaggctcagggtgggctgtgtgttagttctgagcaaatccctcaccaagacccttccctcccaagccctcaaagaaatgaggcaaagcccttccctgcaagaccccttgtggatgtttttgcatctacctgatttttagccccacccagggagactttataccccatgatcctgccccaccgttgctgttgtctgccagctgggtctagcatcacagggaagggggggatttatactcatggaaagactactgatcctaccggaaaccaacctgtttactgtactgttgtaaatatcatgccctttatatcctgtatattggcttcttttaaataaagtgaaatgtcttagaaaaaaaaaaaacaaagaaacaaaaaaacttggggggcatattatatgtgcaggggtgtgcgggaaaaagagggatacagtagaatggtgcacacatgtggtcttcatataggcgtgttttcatgtgaaccacagttttcttggtccaccaaacagtgggcaagaaatcggcccgggatacacccgaatagggcgacgcccgctattaaattgtccggaaataaagcccacggggtaaaccctgtgcacatatcacgaactccggaaaacaagcatagaacagagcacagcagcacgacgaaggaccaacaaacaacacaacatcagcaaaaacacacaagagaacacaccagaaaccataaatagcatacagacaaaataaagagccaggcaaacccaagaacacaaacaaacatcaacgaacacaaaaaaccaaaaaaccaaaaaaccagccaaacaaacataaaagtaacacccaaaaacaaaaaacaagtaagaagagggaaaggcacgaagacgagagggagaagaagaggactcagccagaagacgacgcgagaggggggagccacagggaagcaaagagcaaaaaaggcgagagacggcgagggaaagacacagcagaggctagtaagcagagagaggaggacagccgacaagcacggacaaagagcaagcgagagaagaggcagaagagggagagggtgcagataagagagggcggagggagacacggagcaggcagccagaaaagacaacgcagacggaaaaagaa

SEQ ID NO: 440857 - DNA, 5555 bp, Homo sapiens
ccccgactagcccgacagctcgcgaacgtgttatccccccgactagcccgacaggcgggagacctttgactttgacgacgactgtgacagcctgacgtgggaagagaatgaagacacgctgctgctctgggaggatttcaccaactgcaatccgaccatcgacctgcagggcgagcaagaggaaaacttgggcaacttgatccatgagaccgaatccttcttcaagacgagagacaaggagtaccaggaaacgataggtcagatcgagctcgagctggccacagccaaaagtgacatgaaccgacacctgcacgagtacatggagatgtgcagcatgaagcgaggcctggacgtgcagatggagacctgccgccggctcatcaaaggctccgcagacaggaattcaccgtcccccagctccgtggccagcagcgactcaggaagtacagatgagatccaggatgagttcgagcgcgaggcggatgtggagcccatggtcagctgatgactgaggccctgcgagcctggtggtcttggtgatggggccctgccacctctcctcatggggccaggaaggcccctcggagtggggttcgaagccacaccacacagactttctctgccctcccttctctggaggccctgagggactgctgcttccttccttccttccacaccaccaacgggtgccccgtctccatcccccacccacccaaggaatggtgctgtcaatttctattgttctccacattacaaatgcagacttctgtgcggactttgcagtgttaactgtgccttctcccttaagctgagccactttgagctccaaagaattattcctagcaggtgtttttatacagaactctaagctgagggccgggccaaccggccgtggtgtaatgtggtttctgccgtccgtcccacctgctcctctgattggccatgggctatgccctcccttcctcctgagccagcccagactcggcctggagcttggggtgctctgccaacccccaggaaggagccgcttgcctctgtgagctttctaggcctgggtagggaccaccccaattttctcactccctgaaggagagaaaggtggaaggaagggaaggaggacacattttaattttttggggggatcgagtggcaaagttgaagggacaaggcactgtgaggggaaggcagagcctcactgtgtttaaactactatgcaaaaaacaaaacaaacaacaaaagcagcttgccttatatcattgtggaaggcaggacctctcctgggctcctggcttccccctggagctgggagagaggccggggttagggtgatctgtgtggcagcactgactgggtagtgtgggtttggccgaggttggtcatgaggctggggttcccgcaaggcactggcctccctgaccgcttgcttccttccggacctctgggttcagggcgggggcggagggatccttgatttccctgataacttgatgttcttccctccctcgccagccaacaatagaggcttagagatctgtaatttctctgtgagaaagtctgaaggggccaggcctggtctctgctcccttctacccgccttgggttaggactgtccggcagttgcctgcttttggctgctggcaggagagaagcagggtgggctgctggcagtgcaggagctggagtgagggccatcctctttctgctcctcgacacacgcaagccgctctcagcagttccctcgactggccagtcggggtattgatctgagccagcatcccccaagacttgaatggcttgagtgggactgcgttgaagggcactgtgtggcccccttccaaatctcagcttggagccagctgagcaggctttgctttattattattttttaagcctactgcagtgggtctgttgccaattttaattttttattgtcccaggagctccctctagtggtcaaggtagcaaaatgtgcccaaggactagaacttgggtccctctgccttgcctggaggcagaaggagggggctctgggtttgactgggattgtggtccccaggggtccgtggcctttaaggctcttctctcttttctgtttcccccacctgtgttacagtcttaaaaatactgtacataaaagatatatgtagagagagagagagagcgtgagaatgtgttagtgactatgtgtgatgtaatttatcacgatttggtggccttcgtcatgagttttttcctttgttttcttttgctgggggcacctcccacgggtcccctgtggcagtctggctgtgacacttccatagtcagcatctcttgttagccaaacagttccctttgacaggtacttggagggacaatggttttggaagagagacggcccttctctctcctcactcacccttgttctaaaggttacagggttcaaacatacctgattcttgttgttattgttgttgaatttttattttaaccaaaggttatcagagccagttgggcttggacctcagctgctaaaaagattttccgtttcctcgagggcaggaaaacatccaccctcgtgggtctcctccgtccagggccgagggaggcattggacaatgtggtatgggagtttcgtgggcagcgtggaagccggccctgggttgttccccaaggtggtgggagggtgacagatatatctttagacttaagactgtaaggcagcagtgttagcatgggagtaactaaggttactgtggttatcggtgtccggcggtattatttttactttcctccttgtatacataggtcatttgtctttgaggactagggtactctagggagtttgaaaactgcaggagccagaaagagatcctggcctgagagtcccttctggctggcttttaatatctgctctcctcttgggagtgaggacttggggcaggtgggtaggagagggaaagccagagtgtgatgggcctgcctcctgggctggttcctgggtccggcctgcctgcctgcctgcctgcctctccaccacatgcttttttcagttaatgtcagtgggccctgcttgtcccctcaccatgagcccacagcttgccaagaaagaccccaacgctcgctggggcagcaccagtcctagctgggacgaattggtccatcctttgtaaagctgtaaatacttaattttgactttctatttctaagcccagtgtcatattgacactggtattttagaattttctcagatgggctctcctgcgctgccctctgtctcctgtttttgggggttttatacaaacagaggattggggagggataggaagactagcatccttttggctccctggttggttgtgaaatacacacacacacacacacacacacacacacactcgcactcctctgagactccgaacagagaaaaaaattattggcaaatcaacacatttttctttctcgtcttgagaaaatgtcttgaggtccctgaagggccaaatccatcgtggactaactctgtgggtagagctcagatgacctagggagaattaaaccacttaagcttggagtgggaggagagggggtggggtgggggagaatataagatgtaacttaagctaaatgtaatctatttataaagcaagagactctcatctatttttatgaaaggaagggttttttaatctagggtaggcagttgtggtagcccagcattttcctgtggacgagacatggtgcatgttgttgctggattgaatggaacccattcctgtcccccggcctcgtcttctgtcctcacttttggtcatccacacccatgagcagcttcagcagagtgtaggtcccacttcaccccattctcctctcctctgacccctcagctccttggaagtcttggggtggggatctgagggggtgggtgggctgcaggaaattcagaaatgtggtgggtgggggaagggacaaggcgcattagggagggaacaagctgggctctggggataggctctgattaattagttactctgactctggtctgccgagatccatttccaacccagttgcgttgggagagggttgggaggcagcagagcatgggtgacagtgggagcacacgacttccttggagcctgggcctttgcgggtcccaggtggtcaggcagctggagcagaagtggaaatggcttaagatgctcatagcccagccccggctgtgtctactccaggccaagcctgggctgcagtccttgctatgttccccccagggccctggggggagggatcagggtgctgggggtttcctaggacaggggtcttcccccttgagacaccaagctctggctctagaagagctctctcctggagtggggagtctggaggggactgggtgggtgcaggtaaagccagattctctctggaagggaattttctatgaatggatgatttccaggctcagggtgggctgtgtgttagttctgagcaaatccctcaccaagacccttccctcccaagccctcaaagaaatgaggcaaagcccttccctgcaagaccccttgtggatgtttttgcatctacctgatttttagccccacccagggagactttataccccatgatcctgccccaccgttgctgttgtctgccagctgggtctagcatcacagggaagggggggatttatactcatggaaagactactgatcctaccggaaaccaacctgtttactgtactgttgtaaatatcatgccctttatatcctgtatattggcttcttttaaataaagtgaaatgtcttagaaaaaaaaaaaacaaagaaacaaaaaaacttggggggcatattatatgtgcaggggtgtgcgggaaaaagagggatacagtagaatggtgcacacatgtggtcttcatataggcgtgttttcatgtgaaccacagttttcttggtccaccaaacagtgggcaagaaatcggcccgggatacacccgaatagggcgacgcccgctattaaattgtccggaaataaagcccacggggtaaaccctgtgcacatatcacgaactccggaaaacaagcatagaacagagcacagcagcacgacgaaggaccaacaaacaacacaacatcagcaaaaacacacaagagaacacaccagaaaccataaatagcatacagacaaaataaagagccaggcaaacccaagaacacaaacaaacatcaacgaacacaaaaaaccaaaaaaccaaaaaaccagccaaacaaacataaaagtaacacccaaaaacaaaaaacaagtaagaagagggaaaggcacgaagacgagagggagaagaagaggactcagccagaagacgacgcgagaggggggagccacagggaagcaaagagcaaaaaaggcgagagacggcgagggaaagacacagcagaggctagtaagcagagagaggaggacagccgacaagcacggacaaagagcaagcgagagaagaggcagaagagggagagggtgcagataagagagggcggagggagacacggagcaggcagccagaaaagacaacgcagacggaaaaagaa

SEQ ID NO: 440858 - DNA, 6053 bp, Homo sapiens
ctggagctacacgcaggtgcggcgcacgggcggcggcggcgtggagaccgtgcagggccccggcgtgtcgtgggtgcaccccgacggcgtgggcgtgcagatcgacaccatcacgccggagatccgcgcgctctacaacgtgctggccaaggtgaagcgcgagcgcgacgagtataagcggaggtgggaggaggagctcgccaagcgcatgaaccttcagaccatggtggacacgctgcaggaggcagcacaggaggctgatgccatccaggaggagatgaatgagaagatcgagcggctcaaggccgagctggtggtgtttaaggggcttatgagtgaccccatgacagacctggacacaaagatccaagaaaaggccatgaaggtggacatggacatctgccgccgaatcgatatcacggccaagctgtgcgatgtcgcacagcagcggaactcagaagacgtgtccaagatcttccaggtggtccccaaaaagaaagagcgtaaggtggcttccgatgatgacatctctgagcaggacggggaggtgaaccggttctcggacgatgaggtcggctccatgaacatcaccgatgagatgaagcgcatgtttaaccagctgcgggagacctttgactttgacgacgactgtgacagcctgacgtgggaagagaatgaagacacgctgctgctctgggaggatttcaccaactgcaatccgaccatcgacctgcagggcgagcaagaggaaaacttgggcaacttgatccatgagaccgaatccttcttcaagacgagagacaaggagtaccaggaaacgataggtcagatcgagctcgagctggccacagccaaaagtgacatgaaccgacacctgcacgagtacatggagatgtgcagcatgaagcgaggcctggacgtgcagatggagacctgccgccggctcatcaaaggctccgcagacaggaattcaccgtcccccagctccgtggccagcagcgactcaggaagtacagatgagatccaggatgagttcgagcgcgaggcggatgtggagcccatggtcagctgatgactgaggccctgcgagcctggtggtcttggtgatggggccctgccacctctcctcatggggccaggaaggcccctcggagtggggttcgaagccacaccacacagactttctctgccctcccttctctggaggccctgagggactgctgcttccttccttccttccacaccaccaacgggtgccccgtctccatcccccacccacccaaggaatggtgctgtcaatttctattgttctccacattacaaatgcagacttctgtgcggactttgcagtgttaactgtgccttctcccttaagctgagccactttgagctccaaagaattattcctagcaggtgtttttatacagaactctaagctgagggccgggccaaccggccgtggtgtaatgtggtttctgccgtccgtcccacctgctcctctgattggccatgggctatgccctcccttcctcctgagccagcccagactcggcctggagcttggggtgctctgccaacccccaggaaggagccgcttgcctctgtgagctttctaggcctgggtagggaccaccccaattttctcactccctgaaggagagaaaggtggaaggaagggaaggaggacacattttaattttttggggggatcgagtggcaaagttgaagggacaaggcactgtgaggggaaggcagagcctcactgtgtttaaactactatgcaaaaaacaaaacaaacaacaaaagcagcttgccttatatcattgtggaaggcaggacctctcctgggctcctggcttccccctggagctgggagagaggccggggttagggtgatctgtgtggcagcactgactgggtagtgtgggtttggccgaggttggtcatgaggctggggttcccgcaaggcactggcctccctgaccgcttgcttccttccggacctctgggttcagggcgggggcggagggatccttgatttccctgataacttgatgttcttccctccctcgccagccaacaatagaggcttagagatctgtaatttctctgtgagaaagtctgaaggggccaggcctggtctctgctcccttctacccgccttgggttaggactgtccggcagttgcctgcttttggctgctggcaggagagaagcagggtgggctgctggcagtgcaggagctggagtgagggccatcctctttctgctcctcgacacacgcaagccgctctcagcagttccctcgactggccagtcggggtattgatctgagccagcatcccccaagacttgaatggcttgagtgggactgcgttgaagggcactgtgtggcccccttccaaatctcagcttggagccagctgagcaggctttgctttattattattttttaagcctactgcagtgggtctgttgccaattttaattttttattgtcccaggagctccctctagtggtcaaggtagcaaaatgtgcccaaggactagaacttgggtccctctgccttgcctggaggcagaaggagggggctctgggtttgactgggattgtggtccccaggggtccgtggcctttaaggctcttctctcttttctgtttcccccacctgtgttacagtcttaaaaatactgtacataaaagatatatgtagagagagagagagagcgtgagaatgtgttagtgactatgtgtgatgtaatttatcacgatttggtggccttcgtcatgagttttttcctttgttttcttttgctgggggcacctcccacgggtcccctgtggcagtctggctgtgacacttccatagtcagcatctcttgttagccaaacagttccctttgacaggtacttggagggacaatggttttggaagagagacggcccttctctctcctcactcacccttgttctaaaggttacagggttcaaacatacctgattcttgttgttattgttgttgaatttttattttaaccaaaggttatcagagccagttgggcttggacctcagctgctaaaaagattttccgtttcctcgagggcaggaaaacatccaccctcgtgggtctcctccgtccagggccgagggaggcattggacaatgtggtatgggagtttcgtgggcagcgtggaagccggccctgggttgttccccaaggtggtgggagggtgacagatatatctttagacttaagactgtaaggcagcagtgttagcatgggagtaactaaggttactgtggttatcggtgtccggcggtattatttttactttcctccttgtatacataggtcatttgtctttgaggactagggtactctagggagtttgaaaactgcaggagccagaaagagatcctggcctgagagtcccttctggctggcttttaatatctgctctcctcttgggagtgaggacttggggcaggtgggtaggagagggaaagccagagtgtgatgggcctgcctcctgggctggttcctgggtccggcctgcctgcctgcctgcctgcctctccaccacatgcttttttcagttaatgtcagtgggccctgcttgtcccctcaccatgagcccacagcttgccaagaaagaccccaacgctcgctggggcagcaccagtcctagctgggacgaattggtccatcctttgtaaagctgtaaatacttaattttgactttctatttctaagcccagtgtcatattgacactggtattttagaattttctcagatgggctctcctgcgctgccctctgtctcctgtttttgggggttttatacaaacagaggattggggagggataggaagactagcatccttttggctccctggttggttgtgaaatacacacacacacacacacacacacacacacactcgcactcctctgagactccgaacagagaaaaaaattattggcaaatcaacacatttttctttctcgtcttgagaaaatgtcttgaggtccctgaagggccaaatccatcgtggactaactctgtgggtagagctcagatgacctagggagaattaaaccacttaagcttggagtgggaggagagggggtggggtgggggagaatataagatgtaacttaagctaaatgtaatctatttataaagcaagagactctcatctatttttatgaaaggaagggttttttaatctagggtaggcagttgtggtagcccagcattttcctgtggacgagacatggtgcatgttgttgctggattgaatggaacccattcctgtcccccggcctcgtcttctgtcctcacttttggtcatccacacccatgagcagcttcagcagagtgtaggtcccacttcaccccattctcctctcctctgacccctcagctccttggaagtcttggggtggggatctgagggggtgggtgggctgcaggaaattcagaaatgtggtgggtgggggaagggacaaggcgcattagggagggaacaagctgggctctggggataggctctgattaattagttactctgactctggtctgccgagatccatttccaacccagttgcgttgggagagggttgggaggcagcagagcatgggtgacagtgggagcacacgacttccttggagcctgggcctttgcgggtcccaggtggtcaggcagctggagcagaagtggaaatggcttaagatgctcatagcccagccccggctgtgtctactccaggccaagcctgggctgcagtccttgctatgttccccccagggccctggggggagggatcagggtgctgggggtttcctaggacaggggtcttcccccttgagacaccaagctctggctctagaagagctctctcctggagtggggagtctggaggggactggggtgggctgtgtgttagttctgagcaaatccctcaccaagacccttccctcccaagccctcaaagaaatgaggcaaagcccttccctgcaagaccccttgtggatgtttttgcatctacctgatttttagccccacccagggagactttataccccatgatcctgccccaccgttgctgttgtctgccagctgggtctagcatcacagggaagggggggatttatactcatggaaagactactgatcctaccggaaaccaacctgtttactgtactgttgtaaatatcatgccctttatatcctgtatattggcttcttttaaataaagtgaaatgtcttagaaaaaaaaaaaacaaagaaacaaaaaaacttggggggcatattatatgtgcaggggtgtgcgggaaaaagagggatacagtagaatggtgcacacatgtggtcttcatataggcgtgttttcatgtgaaccacagttttcttggtccaccaaacagtgggcaagaaatcggcccgggatacacccgaatagggcgacgcccgctattaaattgtccggaaataaagcccacggggtaaaccctgtgcacatatcacgaactccggaaaacaagcatagaacagagcacagcagcacgacgaaggaccaacaaacaacacaacatcagcaaaaacacacaagagaacacaccagaaaccataaatagcatacagacaaaataaagagccaggcaaacccaagaacacaaacaaacatcaacgaacacaaaaaaccaaaaaaccaaaaaaccagccaaacaaacataaaagtaacacccaaaaacaaaaaacaagtaagaagagggaaaggcacgaagacgagagggagaagaagaggactcagccagaagacgacgcgagaggggggagccacagggaagcaaagagcaaaaaaggcgagagacggcgagggaaagacacagcagaggctagtaagcagagagaggaggacagccgacaagcacggacaaagagcaagcgagagaagaggcagaagagggagagggtgcagataagagagggcggagggagacacggagcaggcagccagaaaagacaacgcagacggaaaaagaa

SEQ ID NO: 440859 - DNA, 5180 bp, Homo sapiens
ctggagctacacgcaggtgcggcgcacgggcggcggcggcgtggagaccgtgcagggccccggcgtgtcgtgggtgcaccccgacggcgtgggcgtgcagatcgacaccatcacgccggagatccgcgcgctctacaacgtgctggccaaggtgaagcgcgagcgcgacgagtataagcggaggtgggaggaggagctcgccaagcgcatgaaccttcagaccatggtggacacgctgcaggaggcagcacaggaggctgatgccatccaggaggagatgaatgagaagatcgagcggctcaaggccgagctggtggtgtttaaggggcttatgagtgaccccatgacagacctggacacaaagatccaagaaaaggccatgaaggtggacatggacatctgccgccgaatcgatatcacggccaagctgtgcgatgtcgcacagcagcggaactcagaagacgtgtccaagatcttccaggtggtccccaaaaagaaagagcgtaaggtggcttccgatgatgacatctctgagcaggacggggaggtgaaccggttctcggacgatgaggtcggctccatgaacatcaccgatgagatgaagcgcatgtttaaccagctgcgggagacctttgactttgacgacgactgtgacagcctgacgtgggaagagaatgaagacacgctgctgctctgggaggatttcaccaactgcaatccgaccatcgacctgcagggcgagcaagaggaaaacttgggcaacttgatccatgagaccgaatccttcttcaagacgagagacaaggagtaccaggaaacgataggtcagatcgagctcgagctggccacagccaaaagtgacatgaaccgacacctgcacgagtacatggagatgtgcagcatgaagcgaggcctggacgtgcagatggagacctgccgccggctcatcaaaggctccgcagacaggaattcaccgtcccccagctccgtggccagcagcgactcaggaagtacagatgagatccaggatgagttcgagcgcgaggcggatgtggagcccatggtcagctgatgactgaggccctgcgagcctggtggtcttggtgatggggccctgccacctctcctcatggggccaggaaggcccctcggagtggggttcgaagccacaccacacagactttctctgccctcccttctctggaggccctgagggactgctgcttccttccttccttccacaccaccaacgggtgccccgtctccatcccccacccacccaaggaatggtgctgtcaatttctattgttctccacattacaaatgcagacttctgtgcggactttgcagtgttaactgtgccttctcccttaagctgagccactttgagctccaaagaattattcctagcaggtgtttttatacagaactctaagctgagggccgggccaaccggccgtggtgtaatgtggtttctgccgtccgtcccacctgctcctctgattggccatgggctatgccctcccttcctcctgagccagcccagactcggcctggagcttggggtgctctgccaacccccaggaaggagccgcttgcctctgtgagctttctaggcctgggtagggaccaccccaattttctcactccctgaaggagagaaaggtggaaggaagggaaggaggacacattttaattttttggggggatcgagtggcaaagttgaagggacaaggcactgtgaggggaaggcagagcctcactgtgtttaaactactatgcaaaaaacaaaacaaacaacaaaagcagcttgccttatatcattgtggaaggcaggacctctcctgggctcctggcttccccctggagctgggagagaggccggggttagggtgatctgtgtggcagcactgactgggtagtgtgggtttggccgaggttggtcatgaggctggggttcccgcaaggcactggcctccctgaccgcttgcttccttccggacctctgggttcagggcgggggcggagggatccttgatttccctgataacttgatgttcttccctccctcgccagccaacaatagaggcttagagatctgtaatttctctgtgagaaagtctgaaggggccaggcctggtctctgctcccttctacccgccttgggttaggactgtccggcagttgcctgcttttggctgctggcaggagagaagcagggtgggctgctggcagtgcaggagctggagtgagggccatcctctttctgctcctcgacacacgcaagccgctctcagcagttccctcgactggccagtcggggtattgatctgagccagcatcccccaagacttgaatggcttgagtgggactgcgttgaagggcactgtgtggcccccttccaaatctcagcttggagccagctgagcaggctttgctttattattattttttaagcctactgcagtgggtctgttgccaattttaattttttattgtcccaggagctccctctagtggtcaaggtagcaaaatgtgcccaaggactagaacttgggtccctctgccttgcctggaggcagaaggagggggctctgggtttgactgggattgtggtccccaggggtccgtggcctttaaggctcttctctcttttctgtttcccccacctgtgttacagtcttaaaaatactgtacataaaagatatatgtagagagagagagagagcgtgagaatgtgttagtgactatgtgtgatgtaatttatcacgatttggtggccttcgtcatgagttttttcctttgttttcttttgctgggggcacctcccacgggtcccctgtggcagtctggctgtgacacttccatagtcagcatctcttgttagccaaacagttccctttgacaggtacttggagggacaatggttttggaagagagacggcccttctctctcctcactcacccttgttctaaaggttacagggttcaaacatacctgattcttgttgttattgttgttgaatttttattttaaccaaaggttatcagagccagttgggcttggacctcagctgctaaaaagattttccgtttcctcgagggcaggaaaacatccaccctcgtgggtctcctccgtccagggccgagggaggcattggacaatgtggtatgggagtttcgtgggcagcgtggaagccggccctgggttgttccccaaggtggtgggagggtgacagatatatctttagacttaagactgtaaggcagcagtgttagcatgggagtaactaaggttactgtggttatcggtgtccggcggtattatttttactttcctccttgtatacataggtcatttgtctttgaggactagggtactctagggagtttgaaaactgcaggagccagaaagagatcctggcctgagagtcccttctggctggcttttaatatctgctctcctcttgggagtgaggacttggggcaggtgggtaggagagggaaagccagagtgtgatgggcctgcctcctgggctggttcctgggtccggcctgcctgcctgcctgcctgcctctccaccacatgcttttttcagttaatgtcagtgggccctgcttgtcccctcaccatgagcccacagcttgccaagaaagaccccaacgctcgctggggcagcaccagtcctagctgggacgaattggtccatcctttgtaaagctgtaaatacttaattttgactttctatttctaagcccagtgtcatattgacactggtattttagaattttctcagatgggctctcctgcgctgccctctgtctcctgtttttgggggttttatacaaacagaggattggggagggataggaagactagcatccttttggctccctggttggttgtgaaatacacacacacacacacacacacacacacacactcgcactcctctgagactccgaacagagaaaaaaattattggcaaatcaacacatttttctttctcgtcttgagaaaatgtcttgaggtccctgaagggccaaatccatcgtggactaactctgtgggtagagctcagatgacctagggagaattaaaccacttaagcttggagtgggaggagagggggtggggtgggggagaatataagatgtaacttaagctaaatgtaatctatttataaagcaagagactctcatctatttttatgaaaggaagggttttttaatctagggtaggcagttgtggtagcccagcattttcctgtggacgagacatggtgcatgttgttgctggattgaatggaacccattcctgtcccccggcctcgtcttctgtcctcacttttggtcatccacacccatgagcagcttcagcagagtgtaggtcccacttcaccccattctcctctcctctgacccctcagctccttggaagtcttggggtggggatctgagggggtgggtgggctgcaggaaattcagaaatgtggtgggtgggggaagggacaaggcgcattagggagggaacaagctgggctctggggataggctctgattaattagttactctgactctggtctgccgagatccatttccaacccagttgcgttgggagagggttgggaggcagcagagcatgggtgacagtgggagcacacgacttccttggagcctgggcctttgcgggtcccaggtggtcaggcagctggagcagaagtggaaatggcttaagatgctcatagcccagccccggctgtgtctactccaggccaagcctgggctgcagtccttgctatgttccccccagggccctggggggagggatcaggggagactttataccccatgatcctgccccaccgttgctgttgtctgccagctgggtctagcatcacagggaagggggggatttatactcatggaaagactactgatcctaccggaaaccaacctgtttactgtactgttgtaaatatcatgccctttatatcctgtatattggcttcttttaaataaagtgaaatgtcttagaactgatggtgcttttttttgtttttgtttttaaacagaagatgaatctggtgttgggggaggggtaggaggacggaaggccacagaaaccctcaaactcattagttaattagccataaaataggggatttcatatcacctg

SEQ ID NO: 440860 - DNA, 1048 bp, Homo sapiens
ctggagctacacgcaggtgcggcgcacgggcggcggcggcgtggagaccgtgcagggccccggcgtgtcgtgggtgcaccccgacggcgtgggcgtgcagatcgacaccatcacgccggagatccgcgcgctctacaacgtgctggccaaggtgaagcgcgagcgcgacgagtataagcggaggtgggaggaggagctcgccaagcgcatgaaccttcagaccatggtggacacgctgcaggaggcagcacaggaggctgatgccatccaggaggagatgaatgagaagatcgagcggctcaaggccgagctggtggtgtttaaggggcttatgagtgaccccatgacagacctggacacaaagatccaagaaaaggccatgaaggtggacatggacatctgccgccgaatcgatatcacggccaagctgtgcgatgtcgcacagcagcggaactcagaagacgtgtccaagatcttccaggtggtccccaaaaagaaagagcgtaaggtggcttccgatgatgacatctctgagcaggacggggaggtgaaccggttctcggacgatgaggtcggctccatgaacatcaccgatgagatgaagcgcatgtttaaccagctgcgggagacctttgactttgacgacgactgtgacagcctgacgtgggaagagaatgaagacacgctgctgctctgggaggatttcaccaactgcaatccgaccatcgacctgcagggcgagcaagaggaaaacttgggcaacttgatccatgagaccgaatccttcttcaagacgagagacaaggagtaccaggaaacgataggtcagatcgagctcgagctggccacagccaaaagtgacatgaaccgacacctgcacgagtacatggagatgtgcagcatgaagcgaggcctggacgtgcagatggagacctgccgccggctcatcaaaggctccgcagacaggaattcaccgtcccccagctccgtggccagcagcgttccacaacggggacctctagagcgaccgcagcagcagctgccgcac

SEQ ID NO: 440861 - DNA, 396 bp, Homo sapiens
ctgccttctgttcagtcatgccctctggtgtcacccccacaggcgggagacctttgactttgacgacgactgtgacagcctgacgtgggaagagaatgaagacacgctgctgctctgggaggatttcaccaactgcaatccgaccatcgacctgcagggcgagtgacctgccttctctgggggtgcctctctcacaggatccctcattctttcctttgcatgcagcctttgatccccagctaaactatcccttctgtgcccccagcaagaggaaaacttgggcaacttgatccatgagaccgaatccttcttcaagacgagagacaaggagtaccaggaaacgataggtcagatcgaggtgagggctcgggacgtggagcccactcgtgaggctct

SEQ ID NO: 440862 - DNA, 5489 bp, Homo sapiens
ctggagctacacgcaggtgcggcgcacgggcggcggcggcgtggagaccgtgcagggccccggcgtgtcgtgggtgcaccccgacggcgtgggcgtgcagatcgacaccatcacgccggagatccgcgcgctctacaacgtgctggccaaggtgaagcgcgagcgcgacgagtataagcggaggtgggaggaggagctcgccaagcgcatgaaccttcagaccatggtggacacgctgcaggaggcagcacaggaggctgatgccatccaggaggagatgaatgagaagatcgagcggctcaaggccgagctggtggtgtttaaggggcttatgagtgaccccatgacagacctggacacaaagatccaagaaaaggccatgaaggtggacatggacatctgccgccgaatcgatatcacggccaagctgtgcgatgtcgcacagcagcggaactcagaagacgtgtccaagatcttccaggtggtccccaaaaagaaagagcgtaaggtggcttccgatgatgacatctctgagcaggacggggaggtgaaccggttctcggacgatgaggtcggctccatgaacatcaccgatgagatgaagcgcatgtttaaccagctgcgggagacctttgactttgacgacgactgtgacagcctgacgtgggaagagaatgaagacacgctgctgctctgggaggatttcaccaactgcaatccgaccatcgacctgcagggcgagcaagaggaaaacttgggcaacttgatccatgagaccgaatccttcttcaagacgagagacaaggagtaccaggaaacgataggtcagatcgagctcgagctggccacagccaaaagtgacatgaaccgacacctgcacgagtacatggagatgtgcagcatgaagcgaggcctggacgtgcagatggagacctgccgccggctcatcaaaggctccgcagacaggaattcaccgtcccccagctccgtggccagcagcgactcaggaagtacagatgagatccaggatgagttcgagcgcgaggcggatgtggagcccatggtcagctgatgactgaggccctgcgagcctggtggtcttggtgatggggccctgccacctctcctcatggggccaggaaggcccctcggagtggggttcgaagccacaccacacagactttctctgccctcccttctctggaggccctgagggactgctgcttccttccttccttccacaccaccaacgggtgccccgtctccatcccccacccacccaaggaatggtgctgtcaatttctattgttctccacattacaaatgcagacttctgtgcggactttgcagtgttaactgtgccttctcccttaagctgagccactttgagctccaaagaattattcctagcaggtgtttttatacagaactctaagctgagggccgggccaaccggccgtggtgtaatgtggtttctgccgtccgtcccacctgctcctctgattggccatgggctatgccctcccttcctcctgagccagcccagactcggcctggagcttggggtgctctgccaacccccaggaaggagccgcttgcctctgtgagctttctaggcctgggtagggaccaccccaattttctcactccctgaaggagagaaaggtggaaggaagggaaggaggacacattttaattttttggggggatcgagtggcaaagttgaagggacaaggcactgtgaggggaaggcagagcctcactgtgtttaaactactatgcaaaaaacaaaacaaacaacaaaagcagcttgccttatatcattgtggaaggcaggacctctcctgggctcctggcttccccctggagctgggagagaggccggggttagggtgatctgtgtggcagcactgactgggtagtgtgggtttggccgaggttggtcatgaggctggggttcccgcaaggcactggcctccctgaccgcttgcttccttccggacctctgggttcagggcgggggcggagggatccttgatttccctgataacttgatgttcttccctccctcgccagccaacaatagaggcttagagatctgtaatttctctgtgagaaagtctgaaggggccaggcctggtctctgctcccttctacccgccttgggttaggactgtccggcagttgcctgcttttggctgctggcaggagagaagcagggtgggctgctggcagtgcaggagctggagtgagggccatcctctttctgctcctcgacacacgcaagccgctctcagcagttccctcgactggccagtcggggtattgatctgagccagcatcccccaagacttgaatggcttgagtgggactgcgttgaagggcactgtgtggcccccttccaaatctcagcttggagccagctgagcaggctttgctttattattattttttaagcctactgcagtgggtctgttgccaattttaattttttattgtcccaggagctccctctagtggtcaaggtagcaaaatgtgcccaaggactagaacttgggtccctctgccttgcctggaggcagaaggagggggctctgggtttgactgggattgtggtccccaggggtccgtggcctttaaggctcttctctcttttctgtttcccccacctgtgttacagtcttaaaaatactgtacataaaagatatatgtagagagagagagagagcgtgagaatgtgttagtgactatgtgtgatgtaatttatcacgatttggtggccttcgtcatgagttttttcctttgttttcttttgctgggggcacctcccacgggtcccctgtggcagtctggctgtgacacttccatagtcagcatctcttgttagccaaacagttccctttgacaggtacttggagggacaatggttttggaagagagacggcccttctctctcctcactcacccttgttctaaaggttacagggttcaaacatacctgattcttgttgttattgttgttgaatttttattttaaccaaaggttatcagagccagttgggcttggacctcagctgctaaaaagattttccgtttcctcgagggcaggaaaacatccaccctcgtgggtctcctccgtccagggccgagggaggcattggacaatgtggtatgggagtttcgtgggcagcgtggaagccggccctgggttgttccccaaggtggtgggagggtgacagatatatctttagacttaagactgtaaggcagcagtgttagcatgggagtaactaaggttactgtggttatcggtgtccggcggtattatttttactttcctccttgtatacataggtcatttgtctttgaggactagggtactctagggagtttgaaaactgcaggagccagaaagagatcctggcctgagagtcccttctggctggcttttaatatctgctctcctcttgggagtgaggacttggggcaggtgggtaggagagggaaagccagagtgtgatgggcctgcctcctgggctggttcctgggtccggcctgcctgcctgcctgcctgcctctccaccacatgcttttttcagttaatgtcagtgggccctgcttgtcccctcaccatgagcccacagcttgccaagaaagaccccaacgctcgctggggcagcaccagtcctagctgggacgaattggtccatcctttgtaaagctgtaaatacttaattttgactttctatttctaagcccagtgtcatattgacactggtattttagaattttctcagatgggctctcctgcgctgccctctgtctcctgtttttgggggttttatacaaacagaggattggggagggataggaagactagcatccttttggctccctggttggttgtgaaatacacacacacacacacacacacacacacacactcgcactcctctgagactccgaacagagaaaaaaattattggcaaatcaacacatttttctttctcgtcttgagaaaatgtcttgaggtccctgaagggccaaatccatcgtggactaactctgtgggtagagctcagatgacctagggagaattaaaccacttaagcttggagtgggaggagagggggtggggtgggggagaatataagatgtaacttaagctaaatgtaatctatttataaagcaagagactctcatctatttttatgaaaggaagggttttttaatctagggtaggcagttgtggtagcccagcattttcctgtggacgagacatggtgcatgttgttgctggattgaatggaacccattcctgtcccccggcctcgtcttctgtcctcacttttggtcatccacacccatgagcagcttcagcagagtgtaggtcccacttcaccccattctcctctcctctgacccctcagctccttggaagtcttggggtggggatctgagggggtgggtgggctgcaggaaattcagaaatgtggtgggtgggggaagggacaaggcgcattagggagggaacaagctgggctctggggataggctctgattaattagttactctgactctggtctgccgagatccatttccaacccagttgcgttgggagagggttgggaggcagcagagcatgggtgacagtgggagcacacgacttccttggagcctgggcctttgcgggtcccaggtggtcaggcagctggagcagaagtggaaatggcttaagatgctcatagcccagccccggctgtgtctactccaggccaagcctgggctgcagtccttgctatgttccccccagggccctggggggagggatcagggtgctgggggtttcctaggacaggggtcttcccccttgagacaccaagctctggctctagaagagctctctcctggagtggggagtctggaggggactgggtgggtgcaggtaaagccagattctctctggaagggaattttctatgaatggatgatttccaggctcagggtgggctgtgtgttagttctgagcaaatccctcaccaagacccttccctcccaagccctcaaagaaatgaggcaaagcccttccctgcaagaccccttgtggatgtttttgcatctacctgatttttagccccacccagggagactttataccccatgatcctgccccaccgttgctgttgtctgccagctgggtctagcatcacagggaagggggggatttatactcatggaaagactactgatcctaccggaaaccaacctgtttactgtactgttgtaaatatcatgccctttatatcctgtatattggcttcttttaaataaagtgaaatgtcttagaactgatggtgcttttttttgtttttgtttttaaacagaagatgaatctggtgttgggggaggggtaggaggacggaaggccacagaaaccctcaaactcattagttaattagccataaaataggggatttcatatcacctg

SEQ ID NO: 440863 - DNA, 5619 bp, Homo sapiens
atcccctgcgctacctgctggagaagcagctgttagcagcagcagagctttcgcatggtgaactcgctgctgttcggggagatggtctccgtggccagcagcgactcaggaagtacagatgagatccaggatgagttcgagcgcgaggcggatgtggagcccatggtcagaatgaagacacgctgctgctctgggaggatttcaccaactgcaatccgaccatcgacctgcagggcgagcaagaggaaaacttgggcaacttgatccatgagaccgaatccttcttcaagacgagagacaaggagtaccaggaaacgataggtcagatcgagctcgagctggccacagccaaaagtgacatgaaccgacacctgcacgagtacatggagatgtgcagcatgaagcgaggcctggacgtgcagatggagacctgccgccggctcatcaaaggctccgcagacaggaattcaccgtcccccagctccgtggccagcagcgactcaggaagtacagatgagatccaggatgagttcgagcgcgaggcggatgtggagcccatggtcagctgatgactgaggccctgcgagcctggtggtcttggtgatggggccctgccacctctcctcatggggccaggaaggcccctcggagtggggttcgaagccacaccacacagactttctctgccctcccttctctggaggccctgagggactgctgcttccttccttccttccacaccaccaacgggtgccccgtctccatcccccacccacccaaggaatggtgctgtcaatttctattgttctccacattacaaatgcagacttctgtgcggactttgcagtgttaactgtgccttctcccttaagctgagccactttgagctccaaagaattattcctagcaggtgtttttatacagaactctaagctgagggccgggccaaccggccgtggtgtaatgtggtttctgccgtccgtcccacctgctcctctgattggccatgggctatgccctcccttcctcctgagccagcccagactcggcctggagcttggggtgctctgccaacccccaggaaggagccgcttgcctctgtgagctttctaggcctgggtagggaccaccccaattttctcactccctgaaggagagaaaggtggaaggaagggaaggaggacacattttaattttttggggggatcgagtggcaaagttgaagggacaaggcactgtgaggggaaggcagagcctcactgtgtttaaactactatgcaaaaaacaaaacaaacaacaaaagcagcttgccttatatcattgtggaaggcaggacctctcctgggctcctggcttccccctggagctgggagagaggccggggttagggtgatctgtgtggcagcactgactgggtagtgtgggtttggccgaggttggtcatgaggctggggttcccgcaaggcactggcctccctgaccgcttgcttccttccggacctctgggttcagggcgggggcggagggatccttgatttccctgataacttgatgttcttccctccctcgccagccaacaatagaggcttagagatctgtaatttctctgtgagaaagtctgaaggggccaggcctggtctctgctcccttctacccgccttgggttaggactgtccggcagttgcctgcttttggctgctggcaggagagaagcagggtgggctgctggcagtgcaggagctggagtgagggccatcctctttctgctcctcgacacacgcaagccgctctcagcagttccctcgactggccagtcggggtattgatctgagccagcatcccccaagacttgaatggcttgagtgggactgcgttgaagggcactgtgtggcccccttccaaatctcagcttggagccagctgagcaggctttgctttattattattttttaagcctactgcagtgggtctgttgccaattttaattttttattgtcccaggagctccctctagtggtcaaggtagcaaaatgtgcccaaggactagaacttgggtccctctgccttgcctggaggcagaaggagggggctctgggtttgactgggattgtggtccccaggggtccgtggcctttaaggctcttctctcttttctgtttcccccacctgtgttacagtcttaaaaatactgtacataaaagatatatgtagagagagagagagagcgtgagaatgtgttagtgactatgtgtgatgtaatttatcacgatttggtggccttcgtcatgagttttttcctttgttttcttttgctgggggcacctcccacgggtcccctgtggcagtctggctgtgacacttccatagtcagcatctcttgttagccaaacagttccctttgacaggtacttggagggacaatggttttggaagagagacggcccttctctctcctcactcacccttgttctaaaggttacagggttcaaacatacctgattcttgttgttattgttgttgaatttttattttaaccaaaggttatcagagccagttgggcttggacctcagctgctaaaaagattttccgtttcctcgagggcaggaaaacatccaccctcgtgggtctcctccgtccagggccgagggaggcattggacaatgtggtatgggagtttcgtgggcagcgtggaagccggccctgggttgttccccaaggtggtgggagggtgacagatatatctttagacttaagactgtaaggcagcagtgttagcatgggagtaactaaggttactgtggttatcggtgtccggcggtattatttttactttcctccttgtatacataggtcatttgtctttgaggactagggtactctagggagtttgaaaactgcaggagccagaaagagatcctggcctgagagtcccttctggctggcttttaatatctgctctcctcttgggagtgaggacttggggcaggtgggtaggagagggaaagccagagtgtgatgggcctgcctcctgggctggttcctgggtccggcctgcctgcctgcctgcctgcctctccaccacatgcttttttcagttaatgtcagtgggccctgcttgtcccctcaccatgagcccacagcttgccaagaaagaccccaacgctcgctggggcagcaccagtcctagctgggacgaattggtccatcctttgtaaagctgtaaatacttaattttgactttctatttctaagcccagtgtcatattgacactggtattttagaattttctcagatgggctctcctgcgctgccctctgtctcctgtttttgggggttttatacaaacagaggattggggagggataggaagactagcatccttttggctccctggttggttgtgaaatacacacacacacacacacacacacacacacactcgcactcctctgagactccgaacagagaaaaaaattattggcaaatcaacacatttttctttctcgtcttgagaaaatgtcttgaggtccctgaagggccaaatccatcgtggactaactctgtgggtagagctcagatgacctagggagaattaaaccacttaagcttggagtgggaggagagggggtggggtgggggagaatataagatgtaacttaagctaaatgtaatctatttataaagcaagagactctcatctatttttatgaaaggaagggttttttaatctagggtaggcagttgtggtagcccagcattttcctgtggacgagacatggtgcatgttgttgctggattgaatggaacccattcctgtcccccggcctcgtcttctgtcctcacttttggtcatccacacccatgagcagcttcagcagagtgtaggtcccacttcaccccattctcctctcctctgacccctcagctccttggaagtcttggggtggggatctgagggggtgggtgggctgcaggaaattcagaaatgtggtgggtgggggaagggacaaggcgcattagggagggaacaagctgggctctggggataggctctgattaattagttactctgactctggtctgccgagatccatttccaacccagttgcgttgggagagggttgggaggcagcagagcatgggtgacagtgggagcacacgacttccttggagcctgggcctttgcgggtcccaggtggtcaggcagctggagcagaagtggaaatggcttaagatgctcatagcccagccccggctgtgtctactccaggccaagcctgggctgcagtccttgctatgttccccccagggccctggggggagggatcagggtgctgggggtttcctaggacaggggtcttcccccttgagacaccaagctctggctctagaagagctctctcctggagtggggagtctggaggggactgggtgggtgcaggtaaagccagattctctctggaagggaattttctatgaatggatgatttccaggctcagggtgggctgtgtgttagttctgagcaaatccctcaccaagacccttccctcccaagccctcaaagaaatgaggcaaagcccttccctgcaagaccccttgtggatgtttttgcatctacctgatttttagccccacccagggagactttataccccatgatcctgccccaccgttgctgttgtctgccagctgggtctagcatcacagggaagggggggatttatactcatggaaagactactgatcctaccggaaaccaacctgtttactgtactgttgtaaatatcatgccctttatatcctgtatattggcttcttttaaataaagtgaaatgtcttagaaaaaaaaaaaacaaagaaacaaaaaaacttggggggcatattatatgtgcaggggtgtgcgggaaaaagagggatacagtagaatggtgcacacatgtggtcttcatataggcgtgttttcatgtgaaccacagttttcttggtccaccaaacagtgggcaagaaatcggcccgggatacacccgaatagggcgacgcccgctattaaattgtccggaaataaagcccacggggtaaaccctgtgcacatatcacgaactccggaaaacaagcatagaacagagcacagcagcacgacgaaggaccaacaaacaacacaacatcagcaaaaacacacaagagaacacaccagaaaccataaatagcatacagacaaaataaagagccaggcaaacccaagaacacaaacaaacatcaacgaacacaaaaaaccaaaaaaccaaaaaaccagccaaacaaacataaaagtaacacccaaaaacaaaaaacaagtaagaagagggaaaggcacgaagacgagagggagaagaagaggactcagccagaagacgacgcgagaggggggagccacagggaagcaaagagcaaaaaaggcgagagacggcgagggaaagacacagcagaggctagtaagcagagagaggaggacagccgacaagcacggacaaagagcaagcgagagaagaggcagaagagggagagggtgcagataagagagggcggagggagacacggagcaggcagccagaaaagacaacgcagacggaaaaagaa

SEQ ID NO: 440864 - DNA, 6012 bp, Homo sapiens
ctggagctacacgcaggtgcggcgcacgggcggcggcggcgtggagaccgtgcagggccccggcgtgtcgtgggtgcaccccgacggcgtgggcgtgcagatcgacaccatcacgccggagatccgcgcgctctacaacgtgctggccaaggtgaagcgcgagcgcgacgagtataagcggaggtgggaggaggagctcgccaagcgcatgaaccttcagaccatggtggacacgctgcaggaggcagcacaggaggctgatgccatccaggaggagatgaatgagaagatcgagcggctcaaggccgagctggtggtgtttaaggggcttatgagtgaccccatgacagacctggacacaaagatccaagaaaaggccatgaaggtggacatggacatctgccgccgaatcgatatcacggccaagctgtgcgatgtcgcacagcagcggaactcagaagacgtgtccaagatcttccaggtggtccccaaaaagaaagagcgtaaggtggcttccgatgatgacatctctgagcaggacggggaggtgaaccggttctcggacgatgaggtcggctccatgaacatcaccgatgagatgaagcgcatgtttaaccagctgcgggagacctttgactttgacgacgactgtgacagcctgacgtgggaagagaatgaagacacgctgctgctctgggaggatttcaccaactgcaatccgaccatcgacctgcagggcgagcaagaggaaaacttgggcaacttgatccatgagaccgaatccttcttcaagacgagagacaaggagtaccaggaaacgataggtcagatcgagctcgagctggccacagccaaaagtgacatgaaccgacacctgcacgagtacatggagatgtgcagcatgaagcgaggcctggacgtgcagatggagacctgccgccggctcatcaaaggctccgcagacaggaattcaccgtcccccagctccgtggccagcagcgactcaggaagtacagatgagatccaggatgagttcgagcgcgaggcggatgtggagcccatggtcagctgatgactgaggccctgcgagcctggtggtcttggtgatggggccctgccacctctcctcatggggccaggaaggcccctcggagtggggttcgaagccacaccacacagactttctctgccctcccttctctggaggccctgagggactgctgcttccttccttccttccacaccaccaacgggtgccccgtctccatcccccacccacccaaggaatggtgctgtcaatttctattgttctccacattacaaatgcagacttctgtgcggactttgcagtgttaactgtgccttctcccttaagctgagccactttgagctccaaagaattattcctagcaggtgtttttatacagaactctaagctgagggccgggccaaccggccgtggtgtaatgtggtttctgccgtccgtcccacctgctcctctgattggccatgggctatgccctcccttcctcctgagccagcccagactcggcctggagcttggggtgctctgccaacccccaggaaggagccgcttgcctctgtgagctttctaggcctgggtagggaccaccccaattttctcactccctgaaggagagaaaggtggaaggaagggaaggaggacacattttaattttttggggggatcgagtggcaaagttgaagggacaaggcactgtgaggggaaggcagagcctcactgtgtttaaactactatgcaaaaaacaaaacaaacaacaaaagcagcttgccttatatcattgtggaaggcaggacctctcctgggctcctggcttccccctggagctgggagagaggccggggttagggtgatctgtgtggcagcactgactgggtagtgtgggtttggccgaggttggtcatgaggctggggttcccgcaaggcactggcctccctgaccgcttgcttccttccggacctctgggttcagggcgggggcggagggatccttgatttccctgataacttgatgttcttccctccctcgccagccaacaatagaggcttagagatctgtaatttctctgtgagaaagtctgaaggggccaggcctggtctctgctcccttctacccgccttgggttaggactgtccggcagttgcctgcttttggctgctggcaggagagaagcagggtgggctgctggcagtgcaggagctggagtgagggccatcctctttctgctcctcgacacacgcaagccgctctcagcagttccctcgactggccagtcggggtattgatctgagccagcatcccccaagacttgaatggcttgagtgggactgcgttgaagggcactgtgtggcccccttccaaatctcagcttggagccagctgagcaggctttgctttattattattttttaagcctactgcagtgggtctgttgccaattttaattttttattgtcccaggagctccctctagtggtcaaggtagcaaaatgtgcccaaggactagaacttgggtccctctgccttgcctggaggcagaaggagggggctctgggtttgactgggattgtggtccccaggggtccgtggcctttaaggctcttctctcttttctgtttcccccacctgtgttacagtcttaaaaatactgtacataaaagatatatgtagagagagagagagagcgtgagaatgtgttagtgactatgtgtgatgtaatttatcacgatttggtggccttcgtcatgagttttttcctttgttttcttttgctgggggcacctcccacgggtcccctgtggcagtctggctgtgacacttccatagtcagcatctcttgttagccaaacagttccctttgacaggtacttggagggacaatggttttggaagagagacggcccttctctctcctcactcacccttgttctaaaggttacagggttcaaacatacctgattcttgttgttattgttgttgaatttttattttaaccaaaggttatcagagccagttgggcttggacctcagctgctaaaaagattttccgtttcctcgagggcaggaaaacatccaccctcgtgggtctcctccgtccagggccgagggaggcattggacaatgtggtatgggagtttcgtgggcagcgtggaagccggccctgggttgttccccaaggtggtgggagggtgacagatatatctttagacttaagactgtaaggcagcagtgttagcatgggagtaactaaggttactgtggttatcggtgtccggcggtattatttttactttcctccttgtatacataggtcatttgtctttgaggactagggtactctagggagtttgaaaactgcaggagccagaaagagatcctggcctgagagtcccttctggctggcttttaatatctgctctcctcttgggagtgaggacttggggcaggtgggtaggagagggaaagccagagtgtgatgggcctgcctcctgggctggttcctgggtccggcctgcctgcctgcctgcctgcctctccaccacatgcttttttcagttaatgtcagtgggccctgcttgtcccctcaccatgagcccacagcttgccaagaaagaccccaacgctcgctggggcagcaccagtcctagctgggacgaattggtccatcctttgtaaagctgtaaatacttaattttgactttctatttctaagcccagtgtcatattgacactggtattttagaattttctcagatgggctctcctgcgctgccctctgtctcctgtttttgggggttttatacaaacagaggattggggagggataggaagactagcatccttttggctccctggttggttgtgaaatacacacacacacacacacacacacacacacactcgcactcctctgagactccgaacagagaaaaaaattattggcaaatcaacacatttttctttctcgtcttgagaaaatgtcttgaggtccctgaagggccaaatccatcgtggactaactctgtgggtagagctcagatgacctagggagaattaaaccacttaagcttggagtgggaggagagggggtggggtgggggagaatataagatgtaacttaagctaaatgtaatctatttataaagcaagagactctcatctatttttatgaaaggaagggttttttaatctagggtaggcagttgtggtagcccagcattttcctgtggacgagacatggtgcatgttgttgctggattgaatggaacccattcctgtcccccggcctcgtcttctgtcctcacttttggtcatccacacccatgagcagcttcagcagagtgtaggtcccacttcaccccattctcctctcctctgacccctcagctccttggaagtcttggggtggggatctgagggggtgggtgggctgcaggaaattcagaaatgtggtgggtgggggaagggacaaggcgcattagggagggaacaagctgggctctggggataggctctgattaattagttactctgactctggtctgccgagatccatttccaacccagttgcgttgggagagggttgggaggcagcagagcatgggtgacagtgggagcacacgacttccttggagcctgggcctttgcgggtcccaggtggtcaggcagctggagcagaagtggaaatggcttaagatgctcatagcccagccccggctgtgtctactccaggccaagcctgggctgcagtccttgctatgttccccccagggccctggggggagggatcagggtgctgggggtttcctaggacaggggtcttcccccttgagacaccaagctctggctctagaagagctctctcctggagtggggagtctggaggggactgggtgggtgcaggtaaagccagattgaaatgaggcaaagcccttccctgcaagaccccttgtggatgtttttgcatctacctgatttttagccccacccagggagactttataccccatgatcctgccccaccgttgctgttgtctgccagctgggtctagcatcacagggaagggggggatttatactcatggaaagactactgatcctaccggaaaccaacctgtttactgtactgttgtaaatatcatgccctttatatcctgtatattggcttcttttaaataaagtgaaatgtcttagaaaaaaaaaaaacaaagaaacaaaaaaacttggggggcatattatatgtgcaggggtgtgcgggaaaaagagggatacagtagaatggtgcacacatgtggtcttcatataggcgtgttttcatgtgaaccacagttttcttggtccaccaaacagtgggcaagaaatcggcccgggatacacccgaatagggcgacgcccgctattaaattgtccggaaataaagcccacggggtaaaccctgtgcacatatcacgaactccggaaaacaagcatagaacagagcacagcagcacgacgaaggaccaacaaacaacacaacatcagcaaaaacacacaagagaacacaccagaaaccataaatagcatacagacaaaataaagagccaggcaaacccaagaacacaaacaaacatcaacgaacacaaaaaaccaaaaaaccaaaaaaccagccaaacaaacataaaagtaacacccaaaaacaaaaaacaagtaagaagagggaaaggcacgaagacgagagggagaagaagaggactcagccagaagacgacgcgagaggggggagccacagggaagcaaagagcaaaaaaggcgagagacggcgagggaaagacacagcagaggctagtaagcagagagaggaggacagccgacaagcacggacaaagagcaagcgagagaagaggcagaagagggagagggtgcagataagagagggcggagggagacacggagcaggcagccagaaaagacaacgcagacggaaaaagaa

SEQ ID NO: 440865 - DNA, 4915 bp, Homo sapiens
ctggagctacacgcaggtgcggcgcacgggcggcggcggcgtggagaccgtgcagggccccggcgtgtcgtgggtgcaccccgacggcgtgggcgtgcagatcgacaccatcacgccggagatccgcgcgctctacaacgtgctggccaaggtgaagcgcgagcgcgacgagtataagcggaggtgggaggaggagctcgccaagcgcatgaaccttcagaccatggtggacacgctgcaggaggcagcacaggaggctgatgccatccaggaggagatgaatgagaagatcgagcggctcaaggccgagctggtggtgtttaaggggcttatgagtgaccccatgacagacctggacacaaagatccaagaaaaggccatgaaggtggacatggacatctgccgccgaatcgatatcacggccaagctgtgcgatgtcgcacagcagcggaactcagaagacgtgtccaagatcttccaggtggtccccaaaaagaaagagcgtaaggtggcttccgatgatgacatctctgagcaggacggggaggtgaaccggttctcggacgatgaggtcggctccatgaacatcaccgatgagatgaagcgcatgtttaaccagctgcgggagacctttgactttgacgacgactgtgacagcctgacgtgggaagagaatgaagacacgctgctgctctgggaggatttcaccaactgcaatccgaccatcgacctgcagggcgagcaagaggaaaacttgggcaacttgatccatgagaccgaatccttcttcaagacgagagacaaggagtaccaggaaacgataggtcagatcgagctcgagctggccacagccaaaagtgacatgaaccgacacctgcacgagtacatggagatgtgcagcatgaagcgaggcctggacgtgcagatggagacctgccgccggctcatcaaaggctccgcagacaggaattcaccgtcccccagctccgtggccagcagcgactcaggaagtacagatgagatccaggatgagttcgagcgcgaggcggatgtggagcccatggtcagctgatgactgaggccctgcgagcctggtggtcttggtgatggggccctgccacctctcctcatggggccaggaaggcccctcggagtggggttcgaagccacaccacacagactttctctgccctcccttctctggaggccctgagggactgctgcttccttccttccttccacaccaccaacgggtgccccgtctccatcccccacccacccaaggaatggtgctgtcaatttctattgttctccacattacaaatgcagacttctgtgcggactttgcagtgttaactgtgccttctcccttaagctgagccactttgagctccaaagaattattcctagcaggtgtttttatacagaactctaagctgagggccgggccaaccggccgtggtgtaatgtggtttctgccgtccgtcccacctgctcctctgattggccatgggctatgccctcccttcctcctgagccagcccagactcggcctggagcttggggtgctctgccaacccccaggaaggagccgcttgcctctgtgagctttctaggcctgggtagggaccaccccaattttctcactccctgaaggagagaaaggtggaaggaagggaaggaggacacattttaattttttggggggatcgagtggcaaagttgaagggacaaggcactgtgaggggaaggcagagcctcactgtgtttaaactactatgcaaaaaacaaaacaaacaacaaaagcagcttgccttatatcattgtggaaggcaggacctctcctgggctcctggcttccccctggagctgggagagaggccggggttagggtgatctgtgtggcagcactgactgggtagtgtgggtttggccgaggttggtcatgaggctggggttcccgcaaggcactggcctccctgaccgcttgcttccttccggacctctgggttcagggcgggggcggagggatccttgatttccctgataacttgatgttcttccctccctcgccagccaacaatagaggcttagagatctgtaatttctctgtgagaaagtctgaaggggccaggcctggtctctgctcccttctacccgccttgggttaggactgtccggcagttgcctgcttttggctgctggcaggagagaagcagggtgggctgctggcagtgcaggagctggagtgagggccatcctctttctgctcctcgacacacgcaagccgctctcagcagttccctcgactggccagtcggggtattgatctgagccagcatcccccaagacttgaatggcttgagtgggactgcgttgaagggcactgtgtggcccccttccaaatctcagcttggagccagctgagcaggctttgctttattattattttttaagcctactgcagtgggtctgttgccaattttaattttttattgtcccaggagctccctctagtggtcaaggtagcaaaatgtgcccaaggactagaacttgggtccctctgccttgcctggaggcagaaggagggggctctgggtttgactgggattgtggtccccaggggtccgtggcctttaaggctcttctctcttttctgtttcccccacctgtgttacagtcttaaaaatactgtacataaaagatatatgtagagagagagagagagcgtgagaatgtgttagtgactatgtgtgatgtaatttatcacgatttggtggccttcgtcatgagttttttcctttgttttcttttgctgggggcacctcccacgggtcccctgtggcagtctggctgtgacacttccatagtcagcatctcttgttagccaaacagttccctttgacaggtacttggagggacaatggttttggaagagagacggcccttctctctcctcactcacccttgttctaaaggttacagggttcaaacatacctgattcttgttgttattgttgttgaatttttattttaaccaaaggttatcagagccagttgggcttggacctcagctgctaaaaagattttccgtttcctcgagggcaggaaaacatccaccctcgtgggtctcctccgtccagggccgagggaggcattggacaatgtggtatgggagtttcgtgggcagcgtggaagccggccctgggttgttccccaaggtggtgggagggtgacagatatatctttagacttaagactgtaaggcagcagtgttagcatgggagtaactaaggttactgtggttatcggtgtccggcggtattatttttactttcctccttgtatacataggtcatttgtctttgaggactagggtactctagggagtttgaaaactgcaggagccagaaagagatcctggcctgagagtcccttctggctggcttttaatatctgctctcctcttgggagtgaggacttggggcaggtgggtaggagagggaaagccagagtgtgatgggcctgcctcctgggctggttcctgggtccggcctgcctgcctgcctgcctgcctctccaccacatgcttttttcagttaatgtcagtgggccctgcttgtcccctcaccatgagcccacagcttgccaagaaagaccccaacgctcgctggggcagcaccagtcctagctgggacgaattggtccatcctttgtaaagctgtaaatacttaattttgactttctatttctaagcccagtgtcatattgacactggtattttagaattttctcagatgggctctcctgcgctgccctctgtctcctgtttttgggggttttatacaaacagaggattggggagggataggaagactagcatccttttggctccctggttggttgtgaaatacacacacacacacacacacacacacacacactcgcactcctctgagactccgaacagagaaaaaaattattggcaaatcaacacatttttctttctcgtcttgagaaaatgtcttgaggtccctgaagggccaaatccatcgtggactaactctgtgggtagagctcagatgacctagggagaattaaaccacttaagcttggagtgggaggagagggggtggggtgggggagaatataagatgtaacttaagctaaatgtaatctatttataaagcaagagactctcatctatttttatgaaaggaagggttttttaatctagggtaggcagttgtggtagcccagcattttcctgtggacgagacatggtgcatgttgttgctggattgaatggaacccattcctgtcccccggcctcgtcttctgtcctcacttttggtcatccacacccatgagcagcttcagcagagtgtaggtcccacttcaccccattctcctctcctctgacccctcagctccttggaagtcttggggtggggatctgagggggtgggtgggctgcaggaaattcagaaatgtggaaatgaggcaaagcccttccctgcaagaccccttgtggatgtttttgcatctacctgatttttagccccacccagggagactttataccccatgatcctgccccaccgttgctgttgtctgccagctgggtctagcatcacagggaagggggggatttatactcatggaaagactactgatcctaccggaaaccaacctgtttactgtactgttgtaaatatcatgccctttatatcctgtatattggcttcttttaaataaagtgaaatgtcttagaactgatggtgcttttttttgtttttgtttttaaacagaagatgaatctggtgttgggggaggggtaggaggacggaaggccacagaaaccctcaaactcattagttaattagccataaaataggggatttcatatcacctg

SEQ ID NO: 440866 - DNA, 1241 bp, Homo sapiens
ggcggggctggacgcgcgctccaagatggcggcgaacgtgttcccgttccgcgacgcccgtgccgcaccggacccagtgctggaggccggcccggtggcacacgggccactgccggtaccgctggtgctggacaacgggtcgttccaagtccgcgctggctgggcgtgtcccgggcaggacccaggtcccgagccgcgcctgcagttccgcgcggtgtgcgcccgcggtcgtggcggggcacggggcgcgtcgggcccgcaggtggggaacgctctgggcagcctggagccactgcgctggatgctgcgctcgcccttcgaccgcaacgtgccggtcaacctggagcttcaggagttgctgctggactacagcttccagcacctgggtgtctcctcacagggctgtgttgatcatcccatagttttgacagaagctgtgtgcaacccactgtattcacggcaaatgatgtctgagcttctttttgagtgctacgggattcccaaggttgcctatggaatagacagcctcttcagcttctaccacaataagccaaagaactcgatgtgcagtgggctaatcatttcatctggataccagtgtacgcatgttttacccatcttagaagggagattagatgctaaaaactgcaagcgcatcaatcttggaggaagccaagcagctggttacctccagcgtctcctccagctgaagtaccctgggcacctggcagccatcaccctcagccgcatggaggagattctgcatgagcacagctacatcgctgaggattatgtggaaggtatccaagaggatgtttgcctgcagcttttgggtgttgtctaccttgtattccttaaattattgccagcatgattctttgcttgctcactttttaagcacctccttcccctttttgtattccctttcttaaactattcagtaaactgataacttatgttgtataggttcccttcacaaatggtagcttttataacttgcctttaatacagaacttggaattgcacaactttcagcttttccagatattaaatatttttaagagtgagcagaacatatcagactaaaaatatcttaagctagaaaacaattgaaattgttttattatacccttataataacatctatgctgcagaaacacctctttttcttttcaaacttgtcttggacttttggttgtattttacttcaaattaaagtatgagttttagttgctattgtc

SEQ ID NO: 440867 - DNA, 481 bp, Homo sapiens
tttttagctttttgtgtagaagtttttctgttttgtactgagagcttacatttctgcatccacatttcgttctgatatttgagttaagggactatattaggagttgtttctttcctaggtacccaaaggacattcaggaaatgctggttcagaacgttttcctcactggcggcaacacgatgtatcctggcatgaaagccagaatggagaaggaactgttggagatgagacccttccggtcttcttttcaggtactgattgttcgagtagtcagttattttgaaaatagcattacctgttttctgattgcaaaagtaataatcatgcagaaatatccactgttaacatttttgtggcttttcttctggtcttaagtccatgcttaatttttaaagcaaaatgggaatcatgttttatatactgttttgtggtttctttaaattggaagatgaagacatgcgtagaattctaagagtgtgaa

SEQ ID NO: 440868 - DNA, 2553 bp, Homo sapiens
ggcggggctggacgcgcgctccaagatggcggcgaacgtgttcccgttccgcgacgcccgtgccgcaccggacccagtgctggaggccggcccggtggcacacgggccactgccggtaccgctggtgctggacaacgggtcgttccaagtccgcgctggctgggcgtgtcccgggcaggacccaggtcccgagccgcgcctgcagttccgcgcggtgtgcgcccgcggtcgtggcggggcacggggcgcgtcgggcccgcaggtggggaacgctctgggcagcctggagccactgcgctggatgctgcgctcgcccttcgaccgcaacgtgccggtcaacctggagcttcaggagttgctgctggactacagcttccagcacctgggtgtctcctcacagggctgtgttgatcatcccatagttttgacagaagctgtgtgcaacccactgtattcacggcaaatgatgtctgagcttctttttgagtgctacgggattcccaaggttgcctatggaatagacagcctcttcagcttctaccacaataagccaaagaactcgatgtgcagtgggctaatcatttcatctggataccagtgtacgcatgttttacccatcttagaagggagattagatgctaaaaactgcaagcgcatcaatcttggaggaagccaagcagctggttacctccagcgtctcctccagctgaagtaccctgggcacctggcagccatcaccctcagccgcatggaggagattctgcatgagcacagctacatcgctgaggattatgtggaagaattacacaaatggcggtgtcctgattattatgagaataatgtccacaagatgcagctcccattttccagcaagctcctgggcagcactctgacctctgaggagaaacaagaaaggcggcagcagcaattgcggcggctgcaggagctcaatgcccggcggcgggaggagaagctgcagctggatcaggagcgtctggaccgactgctatatgtgcaggaacttctagaggatggccagatggatcagtttcacaaagctctgatagagctgaatatggactccccagaagagctgcagtcctacatccagaagctcagtatagcagtggagcaggctaagcagaaaatcctccaagcggaagtcaacctcgaggtggatgtggtagacagcaagccagagacccctgacctggagcagctggagccgtctttggaagatgtggaaagcatgaatgattttgatcccttgttttcagaggaaacacctggagtggagaagccggtcaccactgttcagcccgtgtttaacttggcagcatatcatcagctatttgttgggacagaaagaattcgagctccagagattattttccagccatctctcataggagaagaacaggctgggattgcagagactcttcagtacattctggacaggtacccaaaggacattcaggaaatgctggttcagaacgttttcctcactggcggcaacacgatgtatcctggcatgaaagccagaatggagaaggaactgttggagatgagacccttccggtcttcttttcaggttcaacttgcctcgaaccctgtgctggatgcctggtacggtgctcgtgactgggccttgaaccacctagatgataatgaagtttggatcaccaggaaagagtatgaagaaaagggaggagagtacctcaaggagcactgtgcttccaacatctatgtccccatccgcctgccgaagcaggcctcccgctcctcagatgcccaggcatccagcaagggctccgctgctggtggaggtggtgctggtgagcaggcatagcagaggccctccagagagactgccctgcacgccatgccttgggccacgttggcagtgtgacaggactgtgattgtgctagatgtacctgcccaagtctgctggtcacatttggcagcaaaatggatttctcctggggagaacaaagttaagggacactgagacctgcccttcagaattcggttcacttgggggcttctgtggtagagactaactggccttctgatgtctttgttcaactgtggccagctgtggcatcagcttcctggagcagtaaatgaagacagagtggaggacacaaatgtacaaaatgcacaagactgatttcttaccacattttagtctttcttgttttaaaaaaaattctttaaaatttatcttgtccgtgtagatactttattcttctggatgtattcagaaattgcatgaatgcccagtgaggggaggtctttcatgcatataaaaaggtaatgtttattgccgggcacagtggcacgtgcctgttaaggcccagctttgtgggaggctaaggcaggaggatcgctggagcttaggagttcgaggctatcgtgtgctgtgatcgcacctgtgaataaccactgcactccagcctgggcaacataggaagacattgtctctaaaaagatacatttttcataaaaggtaatgtttattcaataaaagcagttgcctcaggaaccggaaa

SEQ ID NO: 440869 - DNA, 863 bp, Homo sapiens
  misc_feature (775)..(775): n is a, c, g, or t
  misc_feature (791)..(791): n is a, c, g, or t
  misc_feature (814)..(814): n is a, c, g, or t
  misc_feature (850)..(850): n is a, c, g, or t
  misc_feature (858)..(858): n is a, c, g, or t
ggcggggctggacgcgcgctccaagatggcggcgaacgtgttcccgttccgcgacgcccgtgccgcaccggacccagtgctggaggccggcccggtggcacacgggccactgccggtaccgctggtgctggacaacgggtcgttccaagtccgcgctggctgggcgtgtcccgggcaggacccaggtcccgagccgcgcctgcagttccgcgcggtgtgcgcccgcggtcgtggcggggcacggggcgcgtcgggcccgcaggtggggaacgctctgggcagcctggagccactgcgctggatgctgcgctcgcccttcgaccgcaacgtgccggtcaacctggagcttcaggagttgctgctggactacagcttccagcacctgggtgtctcctcacagggctgtgttgatcatcccatagttttgacagaagctgtgtgcaacccactgtattcacggcaaatgatgtctgagcttctttttgagtgctacgggattcccaaggttgcctatggaatagacagcctcttcagcttctaccacaataagccaaagaactcgatgtgcagtgggctaatcatttcatctggataccagtgtacgcatgttttacccatcttagaagggagattagatgctaaaaactgcaagcgcatcaatcttggaggaagccaagcagctggttacctccagcgtctcctccagctgaagtaccctgggcacctggcagccatcacccctccagcccgccatgggaagaaaaattctgccttnaaacacaaaccttccntccccttaaaagaattaatgttnggaaaaaaatttacccccaaattggcgggtgttccntgaatttnttaat

SEQ ID NO: 440870 - DNA, 561 bp, Homo sapiens
ggggcgacagtgtccccgcccgcccccggccgggtcgcgggcatgaaggacagctggatcgcggcggggggcggaggtggggcggcccgggcccctggactctagacctacgccgcccgggcacgaaggcccagccctggccctggccgcggtctcagcccgggaccccggatcgcgcagaaatgcactgaacaggcccctacaattgggctccagaaactacctgagctcggactacctgttgcctcacattggcaaaagagggggaaaccagaaggagggaattctgctgcggcgacttgactttccccgccccgagcagaaaggcattgacgtttgtaggcggtgacccgccccttctctggcccttgctgcgtgatggggtctccatgcactttatttatttgcagtctgttttctaggcggtggagcttctagacaccgaccggaatgacatacgtttctgtgtgtgattcactgtgtactggtcagcacaggctggccagagagatgttcttgtttctggtgttgtcacgtcttcttgttttctctaagtttaaa

SEQ ID NO: 440871 - DNA, 1012 bp, Homo sapiens
ccgccgtcctgaggctcgagctcttgcgggtcgatcggtcggcggggcctgcgcggggcccgggcccatggcggcgtcggcggctctgttgcggcgacttgactttccccgccccgagcagaaaggcattgacgtttgtaggcggtgacccgccccttctctggccttgccaagagtctcatccctaccctggggcacctctgaccctggacctgcttgggcagaggcagcgtgaagggcctgaacaagaggagaagaagggccttcctagtagaggcacagcatggacaaaggctcacaggggtgggggtgcccagtgatcgagtcctggcttgggagggaaggtctgagttccctgggaactgaaatcggctagcagcactgtgagagaggtgtatttccccctcctaatgacagaggaaaccgaggcttcggggagggggggatttgcccttgacatgcagataggatgaggaggaactgcgtgtgcccctgggcctgcaggctcccacacccctccccagtcttctccaagacctggcatgatgggaggagggaggggaaagtgaagagggaagcatagggctcctagggcaccaagggagaggggcccaagggtagggaatctggggatctcgctttctttggagcagtacagaagatcacaggaaagattaggacagacagctgagatggcagacaggagagatgggccccaggatccctggggagccaagctttcccccacagcctagcctccccaccccacctggagttctctacctcccctccccacctcttctctcccctacagggcccttgctgcgtgatggggtctccatgcactttatttatttgcagtctgttttctaggcggtggagcttctagacaccgaccggaatgacatacgtttctgtgtgtgattcactgtgtactggtcagcacaggctggccagagagatgttcttgtttctggtgttgtcacgtcttcttgttttctctaagtttaaa

SEQ ID NO: 440872 - DNA, 2222 bp, Homo sapiens
ccgccgtcctgaggctcgagctcttgcgggtcgatcggtcggcggggcctgcgcggggcccgggcccatggcggcgtcggcggctctgttgcggcgacttgactttccccgccccgagcagaaaggcattgacgtttgtaggcggtgacccgccccttctctggccttgccaagagtctcatccctaccctggggcacctctgaccctggacctgcttgggcagaggcagcgtgaagggcctgaacaagaggagaagaagggccttcctagtagaggcacagcatggacaaaggctcacaggggtgggggtgcccagtgatcgagtcctggcttgggagggaaggtctgagttccctgggaactgaaatcggctagcagcactgtgagagaggtgtatttccccctcctaatgacagaggaaaccgaggcttcggggagggggggatttgcccttgacatgcagataggatgaggaggaactgcgtgtgcccctgggcctgcaggctcccacacccctccccagtcttctccaagacctggcatgatgggaggagggaggggaaagtgaagagggaagcatagggctcctagggcaccaagggagaggggcccaagggtagggaatctggggatctcgctttctttggagcagtacagaagatcacaggaaagattaggacagacagctgagatggcagacaggagagatgggccccaggatccctggggagccaagctttcccccacagcctagcctccccaccccacctggagcttcaccaagggcttttcagcagtgaagtggcacaaacctcccagtttggtgggcaagtggggctgatggtggtgtcatggctcctggagacacgacataaccaggagggtgaagggataaacctggggtgggctggggctgagacccatggcatgaccccaattctctctcctcaagctcgacccccccgccatccccaggatcacacaggagaatctcatcctcacggcttggattggtcctgggggcccccggttgtgctgctaactggtgtacaatgctcaagagcagcccagaggggagccaggaagggaccctcgccctcacctgctatccccatttccgcatctcttgcactggtaccctgagggccacattctcagttcctgggattgaaaactgcagcagcagtctggccagctccaggacagagttccaaccacctaccacgtaccctcctcagcaggccactggacccaggtcctgaatgaagctgtccgcctgcctcaccccagaagaggctggacagtggctgcctcgtgccccctgcagtctcccacagccagggcccgatggggtgcctccttgtcccaagtctcctgagaacccctgaccttgctggcctctctcatccgccccaaccctgtccacccttgaccacctctgggggcctgtcagcctgctggtccccccaacagatctctgggggcagcctctgtgggacaagagtgatacagagctggaggagaagaggagtgaggggcctccttgtgtctgatgcacagatgtggccctttcaaaccctggtgtcaccctctgggtgactggatccctagctccagcctcttcctgggccagccaggaagggtggaggaaagttctttgctgattgcatgtgtgatacagtggggggtgcctgagccctccccatgcaaggggctcatcctgggactctggaagctgcttccctactgggagaaatgtgtgtcggagctgcaggggtccctaccctcagagacccccgactgcagggaacccaccccataagagggtcacggatgtccatgtccgcccaccccccgtggcttctgctgtggctatattggcctagaggggctgactggggaggagcagggctaagccctcagcatttgctcctgtccctgccttttcacccctgctgcctgaagtggtagccccgcctgctgcttctctacctcccctccccacctcttctctcccctacagggcccttgctgcgtgatggggtctccatgcactttatttatttgcagtctgttttctaggcggtggagcttctagacaccgaccggaatgacatacgtttctgtgtgtgattcactgtgtactggtcagcacaggctggccagagagatgttcttgtttctggtgttgtcacgtcttcttgttttctctaagtttaaa

SEQ ID NO: 440873 - DNA, 523 bp, Homo sapiens
  misc_feature (291)..(291): n is a, c, g, or t
  misc_feature (366)..(366): n is a, c, g, or t
  misc_feature (394)..(394): n is a, c, g, or t
  misc_feature (403)..(403): n is a, c, g, or t
  misc_feature (427)..(427): n is a, c, g, or t
  misc_feature (448)..(448): n is a, c, g, or t
  misc_feature (453)..(453): n is a, c, g, or t
  misc_feature (456)..(456): n is a, c, g, or t
  misc_feature (495)..(495): n is a, c, g, or t
  misc_feature (507)..(507): n is a, c, g, or t
atacatacatgggtgaacaaggactctgaaacaaattagggagggaaaccacccatcaagaggcaattgcacaagtttattaattgactcagtgaaaatgattcaaattattagaaattcagatgtacctagaggacatgatgcattctcatggaaagctggtgtttcccacatctgagtgaatgtgctggattattccccatcaaaatgttagtttgaatcaacaagggtcaataatcttgtgaatggctttatgttctagtatatttaagtacttattgtgtgccttgnggaattctgctcttcggttctctcctccacggtgctgacgtggacttcggccacaccctcttcttggggggactncttttttctcatcaaacacttctgtcancaacggggnaggtttctcttcagaaggtccccngggagccactgacttgctccnctganggnaggtcaactttctcatattcagttgataaccggggtcgngggaatttcttnccgctcctgtgggtgg

SEQ ID NO: 440874 - DNA, 1400 bp, Homo sapiens
ggactgcaacgcggaggagcaggatggagatccctgtgcctgtgcagccgtcttggctgcgccgcgcctcggccccgttgcccggactttcggcgcccggacgcctctttgaccagcgcttcggcgaggggctgctggaggccgagctggctgcgctctgccccaccacgctcgccccctactacctgcgcgcacccagcgtggcgctgcccgtcgcccaggtgccgacggaccccggccacttttcggtgctgctagacgtgaagcacttctcgccggaggaaattgctgtcaaggtggtgggcgaacacgtggaggtgcacgcgcgccacgaggagcgcccggatgagcacggattcgtcgcgcgcgagttccaccgtcgctaccgcctgccgcctggcgtggatccggctgccgtgacgtccgcgctgtcccccgagggcgtcctgtccatccaggccgcgcccgcaccccgggagcctcctcaggctccctctattaaagccgatctgactccgcccagccagatgtcccgagtgcgccaaggactgtcctctcacccactcctggattctgccctgacctccatcctggacactgccttgataacatagacccttccactgacaccctcgctctcacaccccctccagctttccgaccccacaccgacaactccccggcttccagaccctaccagcactaccctaaccctcagccgacagtctcagccccaccgacccactttcttggcatatagccccacttaagacccctcctctacttccttctgagtcctctacaaagacatccgggtactacatttccatcccttccctattttgacaccaaattatggtgtagacagccctcccccaaccccaggccagtcaggcacaatccccccaccccccaaacgtcctggactgcacagacctcccactccagaccatccaggcctggttcccaagacccgatccttcccctgcaaccagacagtctacaactgccccctccagcccattttctgccgtgaaaccccagccagccacaccagactctggaaccctttttcgactgccccaactcttggacaccaggccaactagaacacccaacaccaaactgtacagactctcccaccccaacctccccagactctgcacggatgtcctaggccccctccccaactctaaccagaccccatccccctaagtccctttgtcttgacccccaagtcttcaaccagatatcctcggcaacccacctcccaccctcctcctcttctccttcaagacccaactgagcacccgctctgattccccacagcctttctccctgccaccactcccttagtctttcccaggcttactctcccaataaatgtgctagagctctgc

SEQ ID NO: 440875 - DNA, 1459 bp, Homo sapiens
ggactgcaacgcggaggagcaggatggagatccctgtgcctgtgcagccgtcttggctgcgccgcgcctcggccccgttgcccggactttcggcgcccggacgcctctttgaccagcgcttcggcgaggggctgctggaggccgagctggctgcgctctgccccaccacgctcgccccctactacctgcgcgcacccagcgtggcgctgcccgtcgcccaggtgccgacggaccccggccacttttcggtgctgctagacgtgaagcacttctcgccggaggaaattgctgtcaaggtggtgggcgaacacgtggaggtgcacgcgcgccacgaggagcgcccggatgagcacggattcgtcgcgcgcgagttccaccgtcgctaccgcctgccgcctggcgtggatccggctgccgtgacgtccgcgctgtcccccgagggcgtcctgtccatccaggccgcaccagcgtcggcccaggccccaccgccagccgcagccaagtaggagggggctgggccgcgcccgcaccccgggagcctcctcaggctccctctattaaagccgatctgactccgcccagccagatgtcccgagtgcgccaaggactgtcctctcacccactcctggattctgccctgacctccatcctggacactgccttgataacatagacccttccactgacaccctcgctctcacaccccctccagctttccgaccccacaccgacaactccccggcttccagaccctaccagcactaccctaaccctcagccgacagtctcagccccaccgacccactttcttggcatatagccccacttaagacccctcctctacttccttctgagtcctctacaaagacatccgggtactacatttccatcccttccctattttgacaccaaattatggtgtagacagccctcccccaaccccaggccagtcaggcacaatccccccaccccccaaacgtcctggactgcacagacctcccactccagaccatccaggcctggttcccaagacccgatccttcccctgcaaccagacagtctacaactgccccctccagcccattttctgccgtgaaaccccagccagccacaccagactctggaaccctttttcgactgccccaactcttggacaccaggccaactagaacacccaacaccaaactgtacagactctcccaccccaacctccccagactctgcacggatgtcctaggccccctccccaactctaaccagaccccatccccctaagtccctttgtcttgacccccaagtcttcaaccagatatcctcggcaacccacctcccaccctcctcctcttctccttcaagacccaactgagcacccgctctgattccccacagcctttctccctgccaccactcccttagtctttcccaggcttactctcccaataaatgtgctagagctctgc

SEQ ID NO: 440876 - DNA, 1676 bp, Homo sapiens
ggactgcaacgcggaggagcaggatggagatccctgtgcctgtgcagccgtcttggctgcgccgcgcctcggccccgttgcccggactttcggcgcccggacgcctctttgaccagcgcttcggcgaggggctgctggaggccgagctggctgcgctctgccccaccacgctcgccccctactacctgcgcgcacccagcgtggcgctgcccgtcgcccaggtgccgacggaccccggccacttttcggtgctgctagacgtgaagcacttctcgccggaggaaattgctgtcaaggtggtgggcgaacacgtggaggtgcacgcgcgccacgaggagcgcccggatgagcacggattcgtcgcgcgcgagttccaccgtcgctaccgcctgccgcctggcgtggatccggctgccgtgacgtccgcgctgtcccccgagggcgtcctgtccatccaggccgcaccagcgtcggcccaggccccaccgccagccgcagccaagtaggagggggctgggccgcgcccgcaccccgggagcctcctcaggctccctctattaaagccgatctgactccgcccagccagatgtcccgagtgcgccaaggactgtcctctcacccactcctggattctgccctgacctccatcctggacactgccttgataacatagacccttccactgacaccctcgctctcacaccccctccagctttccgaccccacaccgacaactccccggcttccagaccctaccagcactaccctaaccctcagccgacagtctcagccccaccgacccactttcttggcatatagccccacttaagacccctcctctacttccttctgagtcctctacaaagacatccgggtactacatttccatcccttccctattttgacaccaaattatggtgtagacagccctcccccaaccccaggccagtcaggcacaatccccccaccccccaaacgtcctggactgcacagacctcccactccagaccatccaggcctggttcccaagacccgatccttcccctgcaaccagacagtctacaactgccccctccagcccattttctgccgtgaaaccccagccagccacaccagactctggaaccctttttcgactgccccaactcttggacaccaggccaactagaacacccaacaccaaactgtacagactctcccaccccaacctccccagactctgcacggatgtcctaggccccctccccaactctaaccagaccccatccccctaagtccctttgtcttgacccccaagtcttcaaccagatatcctcggcaacccacctcccaccctcctcctcttctccttcaagacccaactgagcacccgctctgattccccacagcctttctccctgccaccactcccttagtctttcccaggcttactctcccaataaatgtgctagagctctgcaaaaaaaacaaacagaggaagaccgcaacgaaagacaacaaacaaaacacacaacacaaacaaaaaagcacacccgacagcagacaacagaagaaaacgatgaaaccaaaccgcaaaaggaaggcgggggggcacgacccccacacaccaagcagggcgcgagcccggcgcaacgaggcacccagcaacggagagaacaggcgccccaccactgccc

SEQ ID NO: 440877 - DNA, 1400 bp, Homo sapiens
ggactgcaacgcggaggagcaggatggagatccctgtgcctgtgcagccgtcttggctgcgccgcgcctcggccccgttgcccggactttcggcgcccggacgcctctttgaccagcgcttcggcgaggggctgctggaggccgagctggctgcgctctgccccaccacgctcgccccctactacctgcgcgcacccagcgtggcgctgcccgtcgcccaggtgccgacggaccccggccacttttcggtgctgctagacgtgaagcacttctcgccggaggaaattgctgtcaaggtggtgggcgaacacgtggaggtgcacgcgcgccacgaggagcgcccggatgagcacggattcgtcgcgcgcgagttccaccgtcgctaccgcctgccgcctggcgtggatccggctgccgtgacgtccgcgctgtcccccgagggcgtcctgtccatccaggccgcaccagcgtcggcccaggccccaccgccagccgcagccaagtaggagggggctgggccgcgcccgcaccccgggagcctcctcaggctccctctattaaagccgatctgactccgcccagccagatgtcccgagtgcgccaaggactgtcctctcacccactcctggattctgccctgacctccatcctggacactgccttgataacatagacccttccactgacaccctcgctctcacaccccctccagctttccgaccccacaccgacaactccccggcttccagaccctaccagcactaccctaaccctcagccgacagtctcagccccaccgacccactttcttggcatatagccccacttaagacccctcctctacttccttctgagtcctctacaaagacatccgggtactacatttccatcccttccctattttgacaccaaattatggtgtagacagccctcccccaaccccaggccagtcaggcacaatccccccaccccccaaacgtcctggactgcacagacctcccactccagaccatccaggcctggttcccaagacccgatccttcccctgcaaccagacagtctacaactgccccctccagcccattttctgccgtgaaaccccagccagccacaccagactctggaaccctttttcgactgccccaactcttggacaccaggccaactagaacacccatttttccatttcttcagagggaaactcagatgtccaaactaattttaacaaacgcattaagaggtttatttgggtacatggcccgcagtggcttttgccccagaaaggggaaaggaacacgcgggtagatgatttctagcaggcaggaagtcctgtgcggtgtcaccatgagcacctccagctgtactagtgccattggaataataaatttgataaggtggtga

SEQ ID NO: 440878 - DNA, 1547 bp, Homo sapiens
ggactgcaacgcggaggagcaggatggagatccctgtgcctgtgcagccgtcttggctgcgccgcgcctcggccccgttgcccggactttcggcgcccggacgcctctttgaccagcgcttcggcgaggggctgctggaggccgagctggctgcgctctgccccaccacgctcgccccctactacctgcgcgcacccagcgtggcgctgcccgtcgcccaggtgccgacggaccccggccacttttcggtgctgctagacgtgaagcacttctcgccggaggaaattgctgtcaaggtggtgggcgaacacgtggaggtgcacgcgcgccacgaggagcgcccggtgagccgcggcgtggggcggggctggagcgggtacgctcgccgccgggccggaggggcggggccgctcaagcctccctcccctccaggatgagcacggattcgtcgcgcgcgagttccaccgtcgctaccgcctgccgcctggcgtggatccggctgccgtgacgtccgcgctgtcccccgagggcgtcctgtccatccaggccgcaccagcgtcggcccaggccccaccgccagccgcagccaagtaggagggggctgggccgcgcccgcaccccgggagcctcctcaggctccctctattaaagccgatctgactccgcccagccagatgtcccgagtgcgccaaggactgtcctctcacccactcctggattctgccctgacctccatcctggacactgccttgataacatagacccttccactgacaccctcgctctcacaccccctccagctttccgaccccacaccgacaactccccggcttccagaccctaccagcactaccctaaccctcagccgacagtctcagccccaccgacccactttcttggcatatagccccacttaagacccctcctctacttccttctgagtcctctacaaagacatccgggtactacatttccatcccttccctattttgacaccaaattatggtgtagacagccctcccccaaccccaggccagtcaggcacaatccccccaccccccaaacgtcctggactgcacagacctcccactccagaccatccaggcctggttcccaagacccgatccttcccctgcaaccagacagtctacaactgccccctccagcccattttctgccgtgaaaccccagccagccacaccagactctggaaccctttttcgactgccccaactcttggacaccaggccaactagaacacccaacaccaaactgtacagactctcccaccccaacctccccagactctgcacggatgtcctaggccccctccccaactctaaccagaccccatccccctaagtccctttgtcttgacccccaagtcttcaaccagatatcctcggcaacccacctcccaccctcctcctcttctccttcaagacccaactgagcacccgctctgattccccacagcctttctccctgccaccactcccttagtctttcccaggcttactctcccaataaatgtgctagagctctgc

SEQ ID NO: 440879 - DNA, 1311 bp, Homo sapiens
ggactgcaacgcggaggagcaggatggagatccctgtgcctgtgcagccgtcttggctgcgccgcgcctcggccccgttgcccggactttcggcgcccggacgcctctttgaccagcgcttcggcgaggggctgctggaggccgagctggctgcgctctgccccaccacgctcgccccctactacctgcgcgcacccagcgtggcgctgcccgtcgcccaggtgccgacggaccccggccacttttcggtgctgctagacgtgaagcacttctcgccggaggaaattgctgtcaaggtggtgggcgaacacgtggaggtgcacgcgcgccacgaggagcgcccggatgagcacggattcgtcgcgcgcgagttccaccgtcgctaccgcctgccgcctggcgtggatccggctgccgtgacgtccgcgctgtcccccgagggcgtcctgtccatccaggccgcaccagcgtcggcccaggccccaccgccagccgcagccaagtaggagggggctgggccgcgcccgcaccccgggagcctcctcaggctccctctattaaagccgatctgactccgcccagccagatgtcccgagtgcgccaaggactgtcctctcacccactcctggattctgccctgacctccatcctggacactgccttgataacatagacccttccactgacaccctcgctctcacaccccctccagctttccgaccccacaccgacaactccccggcttccagaccctaccagcactaccctaaccctcagccgacagtctcagccccaccgacccactttcttggcatatagccccacttaagacccctcctctacttccttctgagtcctctacaaagacatccgggtactacatttccatcccttccctattttgacaccaaattatggtgtagacagccctcccccaaccccaggccagtcaggcacaatccccccaccccccaaacgtcctggactgcacagacctcccactccagaccatccaggcctggttcccaagacccgatccttcccctgcaaccagacagtctacaactgccccctccagcccattttctgccgtgaaaccccagccagccacaccagactctggaaccctttttcgactgccccaactcttggacaccaggccaactagaacacccaacaccaaactgtacagactctcccaccccaacctgagcaagccagcctggcttgctcaggtctgactctctttggacaataaaataaagtgcattactgaacaaagagtaactcaaaaccagaatcagacaaatc

SEQ ID NO: 440880 - DNA, 355 bp, Homo sapiens
gattcctgatgctccaaggcgactgatgggcgctggatgaagtggctcagtcagcttggctgggggccggtgtcatgttgtgctcctggggcgggggcacggagtggcatttcacgtattgctgccgctcactcccctccaccctcagctccaccctcagcagatgataatatcaagacacctgccttccaccctcagcggatgatctcaagacaccttccgagcgtcagctcactccccttccaccctcagctccaccctcagcagatgataatatcaagatacctgctgagcgtctgcggattccgcttccaccatcagccgatgataatctcgcagactaccttccgagcgt

SEQ ID NO: 440881 - DNA, 2740 bp, Homo sapiens
atgttttataggtatgatctcgtgaaaccttgagagaaactgaatgacgaatgaaactattgttcctgtttcacacagaagaaaactgaggttaaaaggggttggcactcatcatgagcccctgttctcattctgcaaatggtgaagctctctattgtcctgaccccacagttcctgtcccatgaccagggccagctcaccaaggagctgcagcagcatgtaaagtcagtgacatgcccatgcgagtacctgaggaaggttatcaatactctggctgaccatcatcatcgtgggactgactttggtggaagtccttggttacatgtcattattgcgtttccgacaagttataaagttgtcattaccctctggatagtttacctttgggtgtctctcctgaagactatcttctggtctcgaaatggacatgatggatccacggatgtacagcagagagcctggaggtccaaccgccgtagacaggaagggctgaggtccatttgtatgcacacaaagaaaagagtttcttcctttcgaggaaataaaattggcctgaaagacgtcattactctacggagacatgtggaaacaaaagttagagctaaaatccgtaagaggaaggtgacaacgaaaatcaaccatcatgacaaaatcaatggaaagaggaagaccgccagaaaacagaaaatgtttcaacgtgcgcaagagttgcggcggcgagcagaggactaccacaaatgcaaaatccccccttctgcaagaaaggctctttgcaactgggtcagaatggcggcagcggagcatcgtcattcttcaggattgccctactggccctacctcacagctgaaactttaaaaaacaggatgggccaccagccacctcctccaactcaacaacattctataactgataactccctgagcctcaagacacctcccgagtgtctgctcactccccttccaccctcagcggatgataatctcaagacacctcccgagtgtgtgctcactccccttccaccctcagcggatgataatctcaagacacctcccgagtgtgtgctcactccccttccaccctcagcggatgataatctcaagacacctcctgagtgtctgctcactccccttccaccctcagcggatgataatctcaagacacctcccgagtgttctcacggatgataatctcaagacaccttccgagcgtcagctcactccccttccaccctcagctccacccctcagctccaccctcagcagatgataatatcaagacacctgccgagcgtctgcgggggccgcttccaccctcagcagatgataatctcaagacaccttccgagcgtcagctcactccccttccaccctcagctccaccctcagcagatgataatatcaagacacctgccgagcgtctgcgggggccgcttccaccctcagcggatgataatctcaagacaccttccgagcgtcagctcactccctttccaccctcagctccaccctcagcagatgataatatcaagacacctgccgagcgtctgcggggagcgtctgcgggggccgcttccaccctcagcggatgataatctcaagacaccttccgagcgtcagctcactccccttccaccctcagctccaccctcagcagatgataatatcaagacacctgccgagcgtctgcgggggccgcttccaccctcagcggatgataatctcaagacaccttccgagcgtcagctcactccccttccaccctcagctccaccctcagcagatgataatatcaagacacctgccgagcgtctgcgggggccgcttccaccctcagcggatgataatctcaagacaccttccgagcgtcagctcactccccttccaccctcagctccaccctcagcagatgataatatcaagacacctgccgagcgtctgcgggggccgcttccaccctcagcggatgataatctcaagacaccttccgagcgtcagctcactccccttccaccctcagctccaccctcagcagatgataatatcaagacacctgccgagcgtctgcgggggccgcttccaccctcagcggatgataatctcaagacaccttccgagcgtcagctcactccccttccaccctcagctccaccctcagcagatgataatatcaagacacctgccgagcgtctgcgggggccgcttccaccctcagccgatgataatctcaagacacctcccttagctactcaggaggctgaggcagaaaaaccacgcaaacccaagaggcagagggcggctgagatggaaccacctcccgaacccaagaggcggagggtcggtgacgtggaaccgtcacgcaaacccaagaggcggagggccgctgacgtggaaccatcatcacccgaacccaagaggcggagggtcggtgatgtggaaccgtcacgcaaacccaagaggcggagggccgctgacgtggaaccatcatcacccgaacccaagaggcggagggtcggtgacgtggaaccgtcacgcaaacccaagaggcggagggccgctgacgtggaaccatcattacccgaacccaagaggcggaggttgagctgagaagaggccagtgcactcaagcctgagcaataagaataaaaccgagtagaacaaaataaaaaattcaaaaaacaaaacaaaacccacactccaaaaactaacaaagaataaataaataatataaaaataaaataaa

SEQ ID NO: 440882 - DNA, 1900 bp, Homo sapiens
atgttttataggtatgatctcgtgaaaccttgagagaaactgaatgacgaatgaaactattgttcctgtttcacacagaagaaaactgaggttaaaaggggttggcactcatcatgagcccctgttctcattctgcaaatggtgaagctctctattgtcctgaccccacagttcctgtcccatgaccagggccagctcaccaaggagctgcagcagcatgtaaagtcagtgacatgcccatgcgagtacctgaggaaggttatcaatactctggctgaccatcatcatcgtgggactgactttggtggaagtccttggttacatgtcattattgcgtttccgacaagttataaagttgtcattaccctctggatagtttacctttgggtgtctctcctgaagactatcttctggtctcgaaatggacatgatggatccacggatgtacagcagagagcctggaggtccaaccgccgtagacaggaagggctgaggtccatttgtatgcacacaaagaaaagagtttcttcctttcgaggaaataaaattggcctgaaagacgtcattactctacggagacatgtggaaacaaaagttagagctaaaatccgtaagaggaaggtgacaacgaaaatcaaccatcatgacaaaatcaatggaaagaggaagaccgccagaaaacagaaaatgtttcaacgtgcgcaagagttgcggcggcgagcagaggactaccacaaatgcaaaatccccccttctgcaagaaaggctctttgcaactgggtcagaatggcggcagcggagcatcgtcattcttcaggattgccctactggccctacctcacagctgaaactttaaaaaacaggatgggccaccagccacctcctccaactcaacaacattctataactgataactccctgagcctcaagacacctcccgagtgtctgctcactccccttccaccctcagcggatgataatctcaagacacctcccgagtgtgtgctcactccccttccaccctcagcggatgataatctcaagacacctcccgagtgtgtgctcactccccttccaccctcagcggatgataatctcaagacacctcctgagtgtctgctcactccccttccaccctcagcggatgataatctcaagacacctcccgagtgttctcactcactcccctccaccctcagctccaccctcagcagatgataatatcaagacacctgccttccaccctcagcggatgatctcaagacaccttccgagcgtcagctcactccccttccaccctcagctccaccctcagcagatgataatatcaagacacctgccgagcgtctgcgggggccgcttccaccctcagccgatgataatctcaagacacctcccttagctactcaggaggctgaggcagaaaaaccacgcaaacccaagaggcagagggcggctgagatggaaccacctcccgaacccaagaggcggagggtcggtgacgtggaaccgtcacgcaaacccaagaggcggagggccgctgacgtggaaccatcatcacccgaacccaagaggcggagggtcggtgatgtggaaccgtcacgcaaacccaagaggcggagggccgctgacgtggaaccatcatcacccgaacccaagaggcggagggtcggtgacgtggaaccgtcacgcaaacccaagaggcggagggccgctgacgtggaaccatcattacccgaacccaagaggcggaggttgagctgagaagaggccagtgcactcaagcctgagcaataagaataaaaccgagtagaacaaaataaaaaattcaaaaaacaaaacaaaacccacactccaaaaactaacaaagaataaataaataatataaaaataaaataaa

SEQ ID NO: 440883 - DNA, 2285 bp, Homo sapiens
  misc_feature (29)..(29): n is a, c, g, or t
  misc_feature (32)..(32): n is a, c, g, or t
atatcgagctcgtccgggagtggagaganaanggctgaggtccatttgtatgcacacaaagaaaagagtttcttcctttcgaggaaataaaattggcctgaaagacgtcattactctacggagacatgtggaaacaaaagttagagctaaaatccgtaagaggaaggtgacaacgaaaatcaaccatcatgacaaaatcaatggaaagaggaagaccgccagaaaacagaaaatgtttcaacgtgcgcaagagttgcggcggcgagcagaggactaccacaaatgcaaaatccccccttctgcaagaaaggctctttgcaactgggtcagaatggcggcagcggagcatcgtcattcttcaggattgccctactggccctacctcacagctgaaactttaaaaaacaggatgggccaccagccacctcctccaactcaacaacattctataactgataactccctgagcctcaagacacctcccgagtgtctgctcactccccttccaccctcagcggatgataatctcaagacacctcccgagtgtgtgctcactccccttccaccctcagcggatgataatctcaagacacctcccgagtgtgtgctcactccccttccaccctcagcggatgataatctcaagacacctcctgagtgtctgctcactccccttccaccctcagcggatgataatctcaagacacctcccgagtgttctcacggatgataatctcaagacaccttccgagcgtcagctcactccccttccaccctcagctccacccctcagctccaccctcagcagatgataatatcaagacacctgccgagcgtctgcgggggccgcttccaccctcagcagatgataatctcaagacaccttccgagcgtcagctcactccccttccaccctcagctccaccctcagcagatgataatatcaagacacctgccgagcgtctgcgggggccgcttccaccctcagcggatgataatctcaagacaccttccgagcgtcagctcactccctttccaccctcagctccaccctcagcagatgataatatcaagacacctgccgagcgtctgcggggagcgtctgcgggggccgcttccaccctcagcggatgataatctcaagacaccttccgagcgtcagctcactccccttccaccctcagctccaccctcagcagatgataatatcaagacacctgccgagcgtctgcgggggccgcttccaccctcagcggatgataatctcaagacaccttccgagcgtcagctcactccccttccaccctcagctccaccctcagcagatgataatatcaagacacctgccgagcgtctgcgggggccgcttccaccctcagcggatgataatctcaagacaccttccgagcgtcagctcactccccttccaccctcagctccaccctcagcagatgataatatcaagacacctgccgagcgtctgcgggggccgcttccaccctcagcggatgataatctcaagacaccttccgagcgtcagctcactccccttccaccctcagctccaccctcagcagatgataatatcaagacacctgccgagcgtctgcgggggccgcttccaccctcagcggatgataatctcaagacaccttccgagcgtcagctcactccccttccaccctcagctccaccctcagcagatgataatatcaagacacctgccgagcgtctgcgggggccgcttccaccctcagccgatgataatctcaagacacctcccttagctactcaggaggctgaggcagaaaaaccacgcaaacccaagaggcagagggcggctgagatggaaccacctcccgaacccaagaggcggagggtcggtgacgtggaaccgtcacgcaaacccaagaggcggagggccgctgacgtggaaccatcatcacccgaacccaagaggcggagggtcggtgatgtggaaccgtcacgcaaacccaagaggcggagggccgctgacgtggaaccatcatcacccgaacccaagaggcggagggtcggtgacgtggaaccgtcacgcaaacccaagaggcggagggccgctgacgtggaaccatcattacccgaacccaagaggcggaggttgagctgagaagaggccagtgcactcaagcctgagcaataagaataaaaccgagtagaacaaaataaaaaattcaaaaaacaaaacaaaacccacactccaaaaactaacaaagaataaataaataatataaaaataaaataaa

SEQ ID NO: 440884 - DNA, 2267 bp, Homo sapiens
atgttttataggtatgatctcgtgaaaccttgagagaaactgaatgacgaatgaaactattgttcctgtttcacacagaagaaaactgaggttaaaaggggttggcactcatcatgagcccctgttctcattctgcaaatggtgaagctctctattgtcctgaccccacagttcctgtcccatgaccagggccagctcaccaaggagctgcagcagcatgtaaagtcagtgacatgcccatgcgagtacctgaggaaggttatcaatactctggctgaccatcatcatcgtgggactgactttggtggaagtccttggttacatgtcattattgcgtttccgacaagttataaagttgtcattaccctctggatagtttacctttgggtgtctctcctgaagactatcttctggtctcgaaatggacatgatggatccacggatgtacagcagagagcctggaggtccaaccgccgtagacaggaagggctgaggtccatttgtatgcacacaaagaaaagagtttcttcctttcgaggaaataaaattggcctgaaagacgtcattactctacggagacatgtggaaacaaaagttagagctaaaatccgtaagaggaaggtgacaacgaaaatcaaccatcatgacaaaatcaatggaaagaggaagaccgccagaaaacagaaaatgtttcaacgtgcgcaagagttgcggcggcgagcagaggactaccacaaatgcaaaatccccccttctgcaagaaaggctctttgcaactgggtcagaatggcggcagcggagcatcgtcattcttcaggattgccctactggccctacctcacagctgaaactttaaaaaacaggatgggccaccagccacctcctccaactcaacaacattctataactgataactccctgagcctcaagacacctcccgagtgtctgctcactccccttccaccctcagcggatgataatctcaagacacctcccgagtgtgtgctcactccccttccaccctcagcggatgataatctcaagacacctcccgagtgtgtgctcactccccttccaccctcagcggatgataatctcaagacacctcctgagtgtctgctcactccccttccaccccaccctcagctctaccctcagctccaccctcagcggaatgataatctcaagacacgtgccgagtgtctgctccatccccttccaccctcagcggatgataatctcaagacaccttccgagcgtcagctcactccccttccaccctcagctccaccctcagcagatgataatatcaagacacctgccgagcgtcgagcgtctgcgggggccgcttccaccctcagcggatgataatctcaagacaccttccgagcgtcagctcactccccttccaccctcagctccaccctcagcagatgataatatcaagacacctgccgagcgtctgcgggggccgcttccaccctcagcggatgataatctcaagacaccttccgagcgtcagctcactccccttccaccctcagctccaccctcagcagatgataatatcaagacacctgccgagcgtctgcgggggccgcttccaccctcagcggatgataatctcaagacaccttccgagcgtcagctcactccccttccaccctcagctccaccctcagcagatgataatatcaagacacctgccgagcgtctgcgggggccgcttccaccctcagccgatgataatctcaagacacctcccttagctactcaggaggctgaggcagaaaaaccacgcaaacccaagaggcagagggcggctgagatggaaccacctcccgaacccaagaggcggagggtcggtgacgtggaaccgtcacgcaaacccaagaggcggagggccgctgacgtggaaccatcatcacccgaacccaagaggcggagggtcggtgatgtggaaccgtcacgcaaacccaagaggcggagggccgctgacgtggaaccatcatcacccgaacccaagaggcggagggtcggtgacgtggaaccgtcacgcaaacccaagaggcggagggccgctgacgtggaaccatcattacccgaacccaagaggcggaggttgagctgagaagaggccagtgcactcaagcctgagcaataagaataaaaccgagtagaacaaaataaaaaattcaaaaaacaaaacaaaacccacactccaaaaactaacaaagaataaataaataatataaaaataaaataaa

SEQ ID NO: 440885 - DNA, 1839 bp, Homo sapiens
atgttttataggtatgatctcgtgaaaccttgagagaaactgaatgacgaatgaaactattgttcctgtttcacacagaagaaaactgaggttaaaaggggttggcactcatcatgagcccctgttctcattctgcaaatggtgaagctctctattgtcctgaccccacagttcctgtcccatgaccagggccagctcaccaaggagctgcagcagcatgtaaagtcagtgacatgcccatgcgagtacctgaggaaggttatcaatactctggctgaccatcatcatcgtgggactgactttggtggaagtccttggttacatgtcattattgcgtttccgacaagttataaagttgtcattaccctctggatagtttacctttgggtgtctctcctgaagactatcttctggtctcgaaatggacatgatggatccacggatgtacagcagagagcctggaggtccaaccgccgtagacaggaagggctgaggtccatttgtatgcacacaaagaaaagagtttcttcctttcgaggaaataaaattggcctgaaagacgtcattactctacggagacatgtggaaacaaaagttagagctaaaatccgtaagaggaaggtgacaacgaaaatcaaccatcatgacaaaatcaatggaaagaggaagaccgccagaaaacaatccccccttctgcaagaaaggctctttgcaactgggtcagaatggcggcagcggagcatcgtcattcttcaggattgccctactggccctacctcacagctgaaactttaaaaaacaggatgggccaccagccacctcctccaactcaacaacattctataactgataactccctgagcctcaagacacctcccgagtgtctgctcactccccttccaccctcagcggatgataatctcaagacacctcccgagtgtgtgctcactccccttccaccctcagcggatgataatctcaagacacctcccgagtgtgtgctcactccccttccaccctcagcggatgataatctcaagacacctcctgagtgtctgctcactccccttccaccctcagcggatgataatctcaagacacctcccgagtgttctcactcactcccctccaccctcagctccaccctcagcagatgataatatcaagacacctgccttccaccctcagcggatgatctcaagacaccttccgagcgtcagctcactccccttccaccctcagctccaccctcagcagatgataatatcaagacacctgccgagcgtctgcgggggccgcttccaccctcagccgatgataatctcaagacacctcccttagctactcaggaggctgaggcagaaaaaccacgcaaacccaagaggcagagggcggctgagatggaaccacctcccgaacccaagaggcggagggtcggtgacgtggaaccgtcacgcaaacccaagaggcggagggccgctgacgtggaaccatcatcacccgaacccaagaggcggagggtcggtgatgtggaaccgtcacgcaaacccaagaggcggagggccgctgacgtggaaccatcatcacccgaacccaagaggcggagggtcggtgacgtggaaccgtcacgcaaacccaagaggcggagggccgctgacgtggaaccatcattacccgaacccaagaggcggaggttgagctgagaagaggccagtgcactcaagcctgagcaataagaataaaaccgagtagaacaaaataaaaaattcaaaaaacaaaacaaaacccacactccaaaaactaacaaagaataaataaataatataaaaataaaataaa

SEQ ID NO: 440886 - DNA, 2354 bp, Homo sapiens
  misc_feature (29)..(29): n is a, c, g, or t
  misc_feature (32)..(32): n is a, c, g, or t
atatcgagctcgtccgggagtggagaganaanggctgaggtccatttgtatgcacacaaagaaaagagtttcttcctttcgaggaaataaaattggcctgaaagacgtcattactctacggagacatgtggaaacaaaagttagagctaaaatccgtaagaggaaggtgacaacgaaaatcaaccatcatgacaaaatcaatggaaagaggaagaccgccagaaaacagatcaaccacatccttcaaaaggactatgcctgtttataagcccagctgtttctgccctgtgaaacacggaaaatgtttcaacgtgcgcaagagttgcggcggcgagcagaggactaccacaaatgcaaaatccccctttctggaagacaggctcttagcaactgggtcagaatggcggcagcggagcatcgtcattcttcaggattgccctactggccctacctcacagctgaaactttaaaaaacaggatgggccaccagccacctcctccaactcaacaacattctataactgataactccctgagcctcaagacacctcccgagtgtctgctcactccccttccaccctcagcggatgataatctcaagacacctcccgagtgtgtgctcactccccttccaccctcagcggatgataatctcaagacacctcccgagtgtgtgctcactccccttccaccctcagcggatgataatctcaagacacctcctgagtgtctgctcactccccttccaccctcagcggatgataatctcaagacacctcccgagtgttctcacggatgataatctcaagacaccttccgagcgtcagctcactccccttccaccctcagctccacccctcagctccaccctcagcagatgataatatcaagacacctgccgagcgtctgcgggggccgcttccaccctcagcagatgataatctcaagacaccttccgagcgtcagctcactccccttccaccctcagctccaccctcagcagatgataatatcaagacacctgccgagcgtctgcgggggccgcttccaccctcagcggatgataatctcaagacaccttccgagcgtcagctcactccctttccaccctcagctccaccctcagcagatgataatatcaagacacctgccgagcgtctgcggggagcgtctgcgggggccgcttccaccctcagcggatgataatctcaagacaccttccgagcgtcagctcactccccttccaccctcagctccaccctcagcagatgataatatcaagacacctgccgagcgtctgcgggggccgcttccaccctcagcggatgataatctcaagacaccttccgagcgtcagctcactccccttccaccctcagctccaccctcagcagatgataatatcaagacacctgccgagcgtctgcgggggccgcttccaccctcagcggatgataatctcaagacaccttccgagcgtcagctcactccccttccaccctcagctccaccctcagcagatgataatatcaagacacctgccgagcgtctgcgggggccgcttccaccctcagcggatgataatctcaagacaccttccgagcgtcagctcactccccttccaccctcagctccaccctcagcagatgataatatcaagacacctgccgagcgtctgcgggggccgcttccaccctcagcggatgataatctcaagacaccttccgagcgtcagctcactccccttccaccctcagctccaccctcagcagatgataatatcaagacacctgccgagcgtctgcgggggccgcttccaccctcagccgatgataatctcaagacacctcccttagctactcaggaggctgaggcagaaaaaccacgcaaacccaagaggcagagggcggctgagatggaaccacctcccgaacccaagaggcggagggtcggtgacgtggaaccgtcacgcaaacccaagaggcggagggccgctgacgtggaaccatcatcacccgaacccaagaggcggagggtcggtgatgtggaaccgtcacgcaaacccaagaggcggagggccgctgacgtggaaccatcatcacccgaacccaagaggcggagggtcggtgacgtggaaccgtcacgcaaacccaagaggcggagggccgctgacgtggaaccatcattacccgaacccaagaggcggaggttgagctgagaagaggccagtgcactcaagcctgagcaataagaataaaaccgagtagaacaaaataaaaaattcaaaaaacaaaacaaaacccacactccaaaaactaacaaagaataaataaataatataaaaataaaataaa

SEQ ID NO: 440887 - DNA, 2996 bp, Homo sapiens
atgttttataggtatgatctcgtgaaaccttgagagaaactgaatgacgaatgaaactattgttcctgtttcacacagaagaaaactgaggttaaaaggggttggcactcatcatgagcccctgttctcattctgcaaatggtgaagctctctattgtcctgaccccacagttcctgtcccatgaccagggccagctcaccaaggagctgcagcagcatgtaaagtcagtgacatgcccatgcgagtacctgaggaaggttatcaatactctggctgaccatcatcatcgtgggactgactttggtggaagtccttggttacatgtcattattgcgtttccgacaagttataaagttgtcattaccctctggatagtttacctttgggtgtctctcctgaagactatcttctggtctcgaaatggacatgatggatccacggatgtacagcagagagcctggaggtccaaccgccgtagacaggaagggctgaggtccatttgtatgcacacaaagaaaagagtttcttcctttcgaggaaataaaattggcctgaaagacgtcattactctacggagacatgtggaaacaaaagttagagctaaaatccgtaagaggaaggtgacaacgaaaatcaaccatcatgacaaaatcaatggaaagaggaagaccgccagaaaacagaaaatgtttcaacgtgcgcaagagttgcggcggcgagcagaggactaccacaaatgcaaaatccccccttctgcaagaaaggctctttgcaactgggtcagaatggcggcagcggagcatcgtcattcttcaggattgccctactggccctacctcacagctgaaactttaaaaaacaggatgggccaccagccacctcctccaactcaacaacattctataactgataactccctgagcctcaagacacctcccgagtgtctgctcactccccttccaccctcagcggatgataatctcaagacacctcccgagtgtgtgctcactccccttccaccctcagcggatgataatctcaagacacctcccgagtgtgtgctcactccccttccaccctcagcggatgataatctcaagacacctcctgagtgtctgctcactccccttccaccctcagcggatgataatctcaagacacctcccgagtgttctcacggatgataatctcaagacaccttccgagcgtcagctcactccccttccaccctcagctccacccctcagctccaccctcagcagatgataatatcaagacacctgccgagcgtctgcgggggccgcttccaccctcagcagatgataatctcaagacaccttccgagcgtcagctcactccccttccaccctcagctccaccctcagcagatgataatatcaagacacctgccgagcgtctgcgggggccgcttccaccctcagcggatgataatctcaagacaccttccgagcgtcagctcactccctttccaccctcagctccaccctcagcagatgataatatcaagacacctgccgagcgtctgcggggagcgtctgcgggggccgcttccaccctcagcggatgataatctcaagacaccttccgagcgtcagctcactccccttccaccctcagctccaccctcagcagatgataatatcaagacacctgccgagcgtctgcgggggccgcttccaccctcagcggatgataatctcaagacaccttccgagcgtcagctcactccccttccaccctcagctccaccctcagcagatgataatatcaagacacctgccgagcgtctgcgggggccgcttccaccctcagcggatgataatctcaagacaccttccgagcgtcagctcactccccttccaccctcagctccaccctcagcagatgataatatcaagacacctgccgagcgtctgcgggggccgcttccaccctcagcggatgataatctcaagacaccttccgagcgtcagctcactccccttccaccctcagctccaccctcagcagatgataatatcaagacacctgccgagcgtctgcgggggccgcttccaccctcagcggatgataatctcaagacaccttccgagcgtcagctcactccccttccaccctcagctccaccctcagcagatgataatatcaagacacctgccgagcgtctgcgggggccgcttccaccctcagccgatgataatctcaagacacctcccttagctactcaggaggctgaggcagaaaaaccacgcaaacccaagaggcagagggcggctgagatggaaccacctcccgaacccaagaggcggagggtcggtgacgtggaaccgtcacgcaaacccaagaggcggagggccgctgacgtggaaccatcatcacccgaacccaagaggcggagggtcggtgatgtggaaccgtcacgcaaacccaagaggcggagggccgctgacgtggaaccatcatcacccgaacccaagaggcggagggtcggtgacgtggaaccgtcacgcaaacccaagaggcggagggccgctgacgtggaaccatcattacccgaacccaagaggcggaggttgagctgagaagaggccagtgcactcaagcctgagcaataagaataaaaccgagtagaacaaaataaaaaattcaaaaaacaaaacaaaacccacactccaaaaactaacaaagaataaataaataatataaaaataaaataaaaaaaaatcctaggtttatttctaagttcaaatcataaggattggttaaatcacttagtttttcttacccaacagccttcatctggatgaaaagaggggaaacatgacgagaagggggaacagacagagacaggcttggtacgcatttctctacgatgaatggctggcagctaagatatacaaacgcatctggcccttctctaacgaaggccacaggtggctgggcattccagggacctttacaccaggcaagataa

SEQ ID NO: 440888 - DNA, 2656 bp, Homo sapiens
atgttttataggtatgatctcgtgaaaccttgagagaaactgaatgacgaatgaaactattgttcctgtttcacacagaagaaaactgaggttaaaaggggttggcactcatcatgagcccctgttctcattctgcaaatggtgaagctctctattgtcctgaccccacagttcctgtcccatgaccagggccagctcaccaaggagctgcagcagcatgtaaagtcagtgacatgcccatgcgagtacctgaggaaggttatcaatactctggctgaccatcatcatcgtgggactgactttggtggaagtccttggttacatgtcattattgcgtttccgacaagttataaagttgtcattaccctctggatagtttacctttgggtgtctctcctgaagactatcttctggtctcgaaatggacatgatggatccacggatgtacagcagagagcctggaggtccaaccgccgtagacaggaagggctgaggtccatttgtatgcacacaaagaaaagagtttcttcctttcgaggaaataaaattggcctgaaagacgtcattactctacggagacatgtggaaacaaaagttagagctaaaatccgtaagaggaaggtgacaacgaaaatcaaccatcatgacaaaatcaatggaaagaggaagaccgccagaaaacagaaaatgtttcaacgtgcgcaagagttgcggcggcgagcagaggactaccacaaatgcaaaatccccccttctgcaagaaaggctctttgcaactgggtcagaatggcggcagcggagcatcgtcattcttcaggattgccctactggccctacctcacagctgaaactttaaaaaacaggatgggccaccagccacctcctccaactcaacaacattctataactgataactccctgagcctcaagacacctcccgagtgtctgctcactccccttccaccctcagcggatgataatctcaagacacctcccgagtgtgtgctcactccccttccaccctcagcggatgataatctcaagacacctcccgagtgtgtgctcactccccttccaccctcagcggatgataatctcaagacacctcctgagtgtctgctcactccccttccaccctcagcggatgataatctcaagacacctcccgagtgttctcacggatgataatctcaagacaccttccgagcgtcagctcactccccttccaccctcagctccacccctcagctccaccctcagcagatgataatatcaagacacctgccgagcgtctgcgggggccgcttccaccctcagcagatgataatctcaagacaccttccgagcgtcagctcactccccttccaccctcagctccaccctcagcagatgataatatcaagacacctgccgagcgtctgcgggggccgcttccaccctcagcggatgataatctcaagacaccttccgagcgtcagctcactccctttccaccctcagctccaccctcagcagatgataatatcaagacacctgccgagcgtctgcggggagcgtctgcgggggccgcttccaccctcagcggatgataatctcaagacaccttccgagcgtcagctcactccccttccaccctcagctccaccctcagcagatgataatatcaagacacctgccgagcgtctgcgggggccgcttccaccctcagcggatgataatctcaagacaccttccgagcgtcagctcactccccttccaccctcagctccaccctcagcagatgataatatcaagacacctgccgagcgtctgcgggggccgcttccaccctcagcggatgataatctcaagacaccttccgagcgtcagctcactccccttccaccctcagctccaccctcagcagatgataatatcaagacacctgccgagcgtctgcgggggccgcttccaccctcagcggatgataatctcaagacaccttccgagcgtcagctcactccccttccaccctcagctccaccctcagcagatgataatatcaagacacctgccgagcgtctgcgggggccgcttccaccctcagcggatgataatctcaagacaccttccgagcgtcagctcactccccttccaccctcagctccaccctcagcagatgataatatcaagacacctgccgagcgtctgcgggggccgcttccaccctcagccgatgataatctcaagacacctcccttagctactcaggaggctgaggcagaaaaaccacgcaaacccaagaggcagagggcggctgagatggaaccatcatcacccgaacccaagaggcggagggtcggtgatgtggaaccgtcacgcaaacccaagaggcggagggccgctgacgtggaaccatcatcacccgaacccaagaggcggagggtcggtgacgtggaaccgtcacgcaaacccaagaggcggagggccgctgacgtggaaccatcattacccgaacccaagaggcggaggttgagctgagaagaggccagtgcactcaagcctgagcaataagaataaaaccgagtagaacaaaataaaaaattcaaaaaacaaaacaaaacccacactccaaaaactaacaaagaataaataaataatataaaaataaaataaa

SEQ ID NO: 440889 - DNA, 2698 bp, Homo sapiens
atgttttataggtatgatctcgtgaaaccttgagagaaactgaatgacgaatgaaactattgttcctgtttcacacagaagaaaactgaggttaaaaggggttggcactcatcatgagcccctgttctcattctgcaaatggtgaagctctctattgtcctgaccccacagttcctgtcccatgaccagggccagctcaccaaggagctgcagcagcatgtaaagtcagtgacatgcccatgcgagtacctgaggaaggttatcaatactctggctgaccatcatcatcgtgggactgactttggtggaagtccttggttacatgtcattattgcgtttccgacaagttataaagttgtcattaccctctggatagtttacctttgggtgtctctcctgaagactatcttctggtctcgaaatggacatgatggatccacggatgtacagcagagagcctggaggtccaaccgccgtagacaggaagggctgaggtccatttgtatgcacacaaagaaaagagtttcttcctttcgaggaaataaaattggcctgaaagacgtcattactctacggagacatgtggaaacaaaagttagagctaaaatccgtaagaggaaggtgacaacgaaaatcaaccatcatgacaaaatcaatggaaagaggaagaccgccagaaaacagaaaatgtttcaacgtgcgcaagagttgcggcggcgagcagaggactaccacaaatgcaaaatccccccttctgcaagaaaggctctttgcaactgggtcagaatggcggcagcggagcatcgtcattcttcaggattgccctactggccctacctcacagctgaaactttaaaaaacaggatgggccaccagccacctcctccaactcaacaacattctataactgataactccctgagcctcaagacacctcccgagtgtctgctcactccccttccaccctcagcggatgataatctcaagacacctcccgagtgtgtgctcactccccttccaccctcagcggatgataatctcaagacacctcccgagtgtgtgctcactccccttccaccctcagcggatgataatctcaagacacctcctgagtgtctgctcactccccttccaccctcagcggatgataatctcaagacacctcccgagtgttctcacggatgataatctcaagacaccttccgagcgtcagctcactccccttccaccctcagctccacccctcagctccaccctcagcagatgataatatcaagacacctgccgagcgtctgcgggggccgcttccaccctcagcagatgataatctcaagacaccttccgagcgtcagctcactccccttccaccctcagctccaccctcagcagatgataatatcaagacacctgccgagcgtctgcgggggccgcttccaccctcagcggatgataatctcaagacaccttccgagcgtcagctcactccctttccaccctcagctccaccctcagcagatgataatatcaagacacctgccgagcgtctgcggggagcgtctgcgggggccgcttccaccctcagcggatgataatctcaagacaccttccgagcgtcagctcactccccttccaccctcagctccaccctcagcagatgataatatcaagacacctgccgagcgtctgcgggggccgcttccaccctcagcggatgataatctcaagacaccttccgagcgtcagctcactccccttccaccctcagctccaccctcagcagatgataatatcaagacacctgccgagcgtctgcgggggccgcttccaccctcagcggatgataatctcaagacaccttccgagcgtcagctcactccccttccaccctcagctccaccctcagcagatgataatatcaagacacctgccgagcgtctgcgggggccgcttccaccctcagcggatgataatctcaagacaccttccgagcgtcagctcactccccttccaccctcagctccaccctcagcagatgataatatcaagacacctgccgagcgtctgcgggggccgcttccaccctcagcggatgataatctcaagacaccttccgagcgtcagctcactccccttccaccctcagctccaccctcagcagatgataatatcaagacacctgccgagcgtctgcgggggccgcttccaccctcagccgatgataatctcaagacacctcccttagctactcaggaggctgaggcagaaaaaccacgcaaacccaagaggcagagggcggctgagatggaaccacctcccgaacccaagaggcggagggtcggtgacgtggaaccgtcacgcaaacccaagaggcggagggccgctgacgtggaaccatcatcacccgaacccaagaggcggagggccgctgacgtggaaccatcatcacccgaacccaagaggcggagggtcggtgacgtggaaccgtcacgcaaacccaagaggcggagggccgctgacgtggaaccatcattacccgaacccaagaggcggaggttgagctgagaagaggccagtgcactcaagcctgagcaataagaataaaaccgagtagaacaaaataaaaaattcaaaaaacaaaacaaaacccacactccaaaaactaacaaagaataaataaataatataaaaataaaataaa

SEQ ID NO: 440890 - DNA, 2820 bp, Homo sapiens
atgttttataggtatgatctcgtgaaaccttgagagaaactgaatgacgaatgaaactattgttcctgtttcacacagaagaaaactgaggttaaaaggggttggcactcatcatgagcccctgttctcattctgcaaatggtgaagctctctattgtcctgaccccacagttcctgtcccatgaccagggccagctcaccaaggagctgcagcagcatgtaaagtcagtgacatgcccatgcgagtacctgaggaaggttatcaatactctggctgaccatcatcatcgtgggactgactttggtggaagtccttggttacatgtcattattgcgtttccgacaagttataaagttgtcattaccctctggatagtttacctttgggtgtctctcctgaagactatcttctggtctcgaaatggacatgatggatccacggatgtacagcagagagcctggaggtccaaccgccgtagacaggaagggctgaggtccatttgtatgcacacaaagaaaagagtttcttcctttcgaggaaataaaattggcctgaaagacgtcattactctacggagacatgtggaaacaaaagttagagctaaaatccgtaagaggaaggtgacaacgaaaatcaaccatcatgacaaaatcaatggaaagaggaagaccgccagaaaacagaaaatgtttcaacgtgcgcaagagttgcggcggcgagcagaggactaccacaaatgcaaaatccccccttctgcaagaaaggctctttgcaactgggtcagaatggcggcagcggagcatcgtcattcttcaggattgccctactggccctacctcacagctgaaactttaaaaaacaggatgggccaccagccacctcctccaactcaacaacattctataactgataactccctgagcctcaagacacctcccgagtgtctgctcactccccttccaccctcagcggatgataatctcaagacacctcccgagtgtgtgctcactccccttccaccctcagcggatgataatctcaagacacctcccgagtgtgtgctcactccccttccaccctcagcggatgataatctcaagacacctcctgagtgtctgctcactccccttccaccctcagcggatgataatctcaagacacctcccgagtgttctcacggatgataatctcaagacaccttccgagcgtcagctcactccccttccaccctcagctccacccctcagctccaccctcagcagatgataatatcaagacacctgccgagcgtctgcgggggccgcttccaccctcagcagatgataatctcaagacaccttccgagcgtcagctcactccccttccaccctcagctccaccctcagcagatgataatatcaagacacctgccgagcgtctgcgggggccgcttccaccctcagcggatgataatctcaagacaccttccgagcgtcagctcactccctttccaccctcagctccaccctcagcagatgataatatcaagacacctgccgagcgtctgcggggagcgtctgcgggggccgcttccaccctcagcggatgataatctcaagacaccttccgagcgtcagctcactccccttccaccctcagctccaccctcagcagatgataatatcaagacacctgccgagcgtctgcgggggccgcttccaccctcagcggatgataatctcaagacaccttccgagcgtcagctcactccccttccaccctcagctccaccctcagcagatgataatatcaagacacctgccgagcgtctgcgggggccgcttccaccctcagcggatgataatctcaagacaccttccgagcgtcagctcactccccttccaccctcagctccaccctcagcagatgataatatcaagacacctgccgagcgtctgcgggggccgcttccaccctcagcggatgataatctcaagacaccttccgagcgtcagctcactccccttccaccctcagctccaccctcagcagatgataatatcaagacacctgccgagcgtctgcgggggccgcttccaccctcagcggatgataatctcaagacaccttccgagcgtcagctcactccccttccaccctcagctccaccctcagcagatgataatatcaagacacctgccgagcgtctgcgggggccgcttccaccctcagccgatgataatctcaagacacctcccttagctactcaggaggctgaggcagaaaaaccacgcaaacccaagaggcagagggcggctgagatggaaccacctcccgaacccaagaggcggagggtcggtgacgtggaaccgtcacgcaaacccaagaggcggagggccgctgacgtggaaccatcatcacccgaacccaagaggcggagggccgctgacgtggaaccatcatcacccgaacccaagaggcggagggtcggtgacgtggaaccgtcacgcaaacccaagaggcggagggccgctgacgtggaaccatcattacccgaacccaagaggcggaggttgagctgagaagaggccagtgcactcaagcctgagcaataagaataaaaccgagtagaacaaaataaaaaattcaaaaaacaaaacaaaacccacactccaaaaactaacaaagaataaataaataatataaaaataaaataaatactgcagtccttatgttattgctttgtttcgatatctggtatgattgcctgagggacctgaggtttttaatcataggggtttttttttaatctttagaagtggttggttatgtaaaatatt

SEQ ID NO: 440891 - DNA, 2653 bp, Homo sapiens
atgttttataggtatgatctcgtgaaaccttgagagaaactgaatgacgaatgaaactattgttcctgtttcacacagaagaaaactgaggttaaaaggggttggcactcatcatgagcccctgttctcattctgcaaatggtgaagctctctattgtcctgaccccacagttcctgtcccatgaccagggccagctcaccaaggagctgcagcagcatgtaaagtcagtgacatgcccatgcgagtacctgaggaaggttatcaatactctggctgaccatcatcatcgtgggactgactttggtggaagtccttggttacatgtcattattgcgtttccgacaagttataaagttgtcattaccctctggatagtttacctttgggtgtctctcctgaagactatcttctggtctcgaaatggacatgatggatccacggatgtacagcagagagcctggaggtccaaccgccgtagacaggaagggctgaggtccatttgtatgcacacaaagaaaagagtttcttcctttcgaggaaataaaattggcctgaaagacgtcattactctacggagacatgtggaaacaaaagttagagctaaaatccgtaagaggaaggtgacaacgaaaatcaaccatcatgacaaaatcaatggaaagaggaagaccgccagaaaacagaaaatgtttcaacgtgcgcaagagttgcggcggcgagcagaggactaccacaaatgcaaaatccccccttctgcaagaaaggctctttgcaactgggtcagaatggcggcagcggagcatcgtcattcttcaggattgccctactggccctacctcacagctgaaactttaaaaaacaggatgggccaccagccacctcctccaactcaacaacattctataactgataactccctgagcctcaagacacctcccgagtgtctgctcactccccttccaccctcagcggatgataatctcaagacacctcccgagtgtgtgctcactccccttccaccctcagcggatgataatctcaagacacctcccgagtgtgtgctcactccccttccaccctcagcggatgataatctcaagacacctcctgagtgtctgctcactccccttccaccctcagcggatgataatctcaagacacctcccgagtgttctcacggatgataatctcaagacaccttccgagcgtcagctcactccccttccaccctcagctccacccctcagctccaccctcagcagatgataatatcaagacacctgccgagcgtctgcgggggccgcttccaccctcagcagatgataatctcaagacaccttccgagcgtcagctcactccccttccaccctcagctccaccctcagcagatgataatatcaagacacctgccgagcgtctgcgggggccgcttccaccctcagcggatgataatctcaagacaccttccgagcgtcagctcactccctttccaccctcagctccaccctcagcagatgataatatcaagacacctgccgagcgtctgcggggagcgtctgcgggggccgcttccaccctcagcggatgataatctcaagacaccttccgagcgtcagctcactccccttccaccctcagctccaccctcagcagatgataatatcaagacacctgccgagcgtctgcgggggccgcttccaccctcagcggatgataatctcaagacaccttccgagcgtcagctcactccccttccaccctcagctccaccctcagcagatgataatatcaagacacctgccgagcgtctgcgggggccgcttccaccctcagcggatgataatctcaagacaccttccgagcgtcagctcactccccttccaccctcagctccaccctcagcagatgataatatcaagacacctgccgagcgtctgcgggggccgcttccaccctcagcggatgataatctcaagacaccttccgagcgtcagctcactccccttccaccctcagctccaccctcagcagatgataatatcaagacacctgccgagcgtctgcgggggccgcttccaccctcagcggatgataatctcaagacaccttccgagcgtcagctcactccccttccaccctcagctccaccctcagcagatgataatatcaagacacctgccgagcgtctgcgggggccgcttccaccctcagccgatgataatctcaagacacctcccttagctactcaggaggctgaggcagaaaaaccacgcaaacccaagaggcagagggcggctgagatggaaccacctcccgaacccaagaggcggagggtcggtgacgtggaaccgtcacgcaaacccaagaggcggagggccgctgacgtggaaccatcatcacccgaacccaagaggcggagggtcggtgatgtggaaccgtcacgcaaacccaagaggcggagggccgctgacgtggaaccatcatcacccgaacccaagaggcggaggttgagctgagaagaggccagtgcactcaagcctgagcaataagaataaaaccgagtagaacaaaataaaaaattcaaaaaacaaaacaaaacccacactccaaaaactaacaaagaataaataaataatataaaaataaaataaa

SEQ ID NO: 440892 - DNA, 1576 bp, Homo sapiens
atgttttataggtatgatctcgtgaaaccttgagagaaactgaatgacgaatgaaactattgttcctgtttcacacagaagaaaactgaggttaaaaggggttggcactcatcatgagcccctgttctcattctgcaaatggtgaagctctctattgtcctgaccccacagttcctgtcccatgaccagggccagctcaccaaggagctgcagcagcatgtaaagtcagtgacatgcccatgcgagtacctgaggaaggttatcaatactctggctgaccatcatcatcgtgggactgactttggtggaagtccttggttacatgtcattattgcgtttccgacaagttataaagttgtcattaccctctggatagtttacctttgggtgtctctcctgaagactatcttctggtctcgaaatggacatgatggatccacggatgtacagcagagagcctggaggtccaaccgccgtagacaggaagggctgaggtccatttgtatgcacacaaagaaaagagtttcttcctttcgaggaaataaaattggcctgaaagacgtcattactctacggagacatgtggaaacaaaagttagagctaaaatccgtaagaggaaggtgacaacgaaaatcaaccatcatgacaaaatcaatggaaagaggaagaccgccagaaaacagaaaatgtttcaacgtgcgcaagagttgcggcggcgagcagaggactaccacaaatgcaaaatccccccttctgcaagaaaggctctttgcaactgggtcagaatggcggcagcggagcatcgtcattcttcaggattgccctactggccctacctcacagctgaaactttaaaaaacaggatgggccaccagccacctcctccaactcaacaacattctataactgataactccctgagcctcaagacacctcccgagtgtctgctcactccccttccaccctcagcggatgataatctcaagacacctcccgagtgtgtgctcactccccttccaccctcagcggatgataatctcaagacacctcccgagtgtgtgctcactccccttccaccctcagcggatgataatctcaagacacctcctgagtgtctgctcactccccttccaccctcagcggatgataatctcaagacacctcccgagtgttctcacggatgataatctcaagacaccttccgagcgtcagctcactccccttccaccctcagctccaccctcagcagatgataatatcaagacacctgccgagcgtcgtgcgggggccgcttccaccctcagcggatgataatctcaagacaccttccgagcgtcagctcactccctcactcccctccaccctcagctccaccctcagcagatgataatatcaagacacctgccttccaccctcagcggatgatctcaagacaccttccgagcgtcagctcactccccttccaccctcagctccaccctcagcagatgataatatcaagatacctgctgagcgtctgcggattccgcttccaccatcagccgatgataatctcgcagactaccttccgagcgt

SEQ ID NO: 440893 - DNA, 423 bp, Homo sapiens
aacattccctcctttggccctacaggtcagaatggcggcagcggagcatcgtcattcttcaggattgccctactggccctacctcacagctgaaactttaaaaaacaggatgggccaccagccacctcctccaactcaacaacattctataactgataactccctgagcctcaagacacctcccgagtgtctgctcactccccttccaccctcagcggatgataatctcaagacacctcccgagtgtgtgctcactccccttccaccctcagcggatgataatctcaagacacctcccgagtgtgtgctcactccccttccaccctcagcggatgataatctcaagacacctcctgagtgtctgctcactccccttccaccctcagcggatgataatctcaagacacctcccgagtgttctca

SEQ ID NO: 440894 - DNA, 586 bp, Homo sapiens
atgttttataggtatgatctcgtgaaaccttgagagaaactgaatgacgaatgaaactattgttcctgtttcacacagaagaaaactgaggttaaaaggggttggcactcatcatgagcccctgttctcattctgcaaatggtgaagctctctattgtcctgaccccacagttcctgtcccatgaccagggccagctcaccaaggagctgcagcagcatgtaaagtcagtgacatgcccatgcgagtacctgaggaaggttatcaatactctggctgaccatcatcatcgtgggactgactttggtggaagtccttggttacatgtcattattgcgtttccgacaagttataaagttgtcattaccctctggatagtttacctttgggtgagtatactaactttctgtagaggtatacttgtaatcacaaataagaataaattatataaaacaattcacatttctggacttcattatgaatatgtggttttacccaaaaaatcagggaaatgatttattagtataagaattatgaaaacatctgccatttgcattatgaaaattaaataggtcggtgtttgtttaa

SEQ ID NO: 440895 - DNA, 2728 bp, Homo sapiens
atgttttataggtatgatctcgtgaaaccttgagagaaactgaatgacgaatgaaactattgttcctgtttcacacagaagaaaactgaggttaaaaggggttggcactcatcatgagcccctgttctcattctgcaaatggtgaagctctctattgtcctgaccccacagttcctgtcccatgaccagggccagctcaccaaggagctgcagcagcatgtaaagtcagtgacatgcccatgcgagtacctgaggaaggttatcaatactctggctgaccatcatcatcgtgggactgactttggtggaagtccttggttacatgtcattattgcgtttccgacaagttataaagttgtcattaccctctggatagtttacctttgggtgtctctcctgaagactatcttctggtctcgaaatggacatgatggatccacggatgtacagcagagagcctggaggtccaaccgccgtagacaggaagggctgaggtccatttgtatgcacacaaagaaaagagtttcttcctttcgaggaaataaaattggcctgaaagacgtcattactctacggagacatgtggaaacaaaagttagagctaaaatccgtaagaggaaggtgacaacgaaaatcaaccatcatgacaaaatcaatggaaagaggaagaccgccagaaaacagaaaatgtttcaacgtgcgcaagagttgcggcggcgagcagaggactaccacaaatgcaaaatccccccttctgcaagaaaggctctttgcaactgggtcagaatggcggcagcggagcatcgtcattcttcaggattgccctactggccctacctcacagctgaaactttaaaaaacaggatgggccaccagccacctcctccaactcaacaacattctataactgataactccctgagcctcaagacacctcccgagtgtctgctcactccccttccaccctcagcggatgataatctcaagacacctcccgagtgtgtgctcactccccttccaccctcagcggatgataatctcaagacacctcccgagtgtgtgctcactccccttccaccctcagcggatgataatctcaagacacctcctgagtgtctgctcactccccttccaccctcagcggatgataatctcaagacacctcccgagtgttctcacggatgataatctcaagacaccttccgagcgtcagctcactccccttccaccctcagctccacccctcagctccaccctcagcagatgataatatcaagacacctgccgagcgtctgcgggggccgcttccaccctcagcagatgataatctcaagacaccttccgagcgtcagctcactccccttccaccctcagctccaccctcagcagatgataatatcaagacacctgccgagcgtctgcgggggccgcttccaccctcagcggatgataatctcaagacaccttccgagcgtcagctcactccctttccaccctcagctccaccctcagcagatgataatatcaagacacctgccgagcgtctgcggggagcgtctgcgggggccgcttccaccctcagcggatgataatctcaagacaccttccgagcgtcagctcactccccttccaccctcagctccaccctcagcagatgataatatcaagacacctgccgagcgtctgcgggggccgcttccaccctcagcggatgataatctcaagacaccttccgagcgtcagctcactccccttccaccctcagctccaccctcagcagatgataatatcaagacacctgccgagcgtctgcgggggccgcttccaccctcagcggatgataatctcaagacaccttccgagcgtcagctcactccccttccaccctcagctccaccctcagcagatgataatatcaagacacctgccgagcgtctgcgggggccgcttccaccctcagcggatgataatctcaagacaccttccgagcgtcagctcactccccttccaccctcagcagatgataatatcaagacacctgccgagcgtctgcgggggccgcttccaccctcagcggatgataatctcaagacaccttccgagcgtcagctcactccccttccaccctcagctccaccctcagcagatgataatatcaagacacctgccgagcgtctgcgggggccgcttccaccctcagccgatgataatctcaagacacctcccttagctactcaggaggctgaggcagaaaaaccacgcaaacccaagaggcagagggcggctgagatggaaccacctcccgaacccaagaggcggagggtcggtgacgtggaaccgtcacgcaaacccaagaggcggagggccgctgacgtggaaccatcatcacccgaacccaagaggcggagggtcggtgatgtggaaccgtcacgcaaacccaagaggcggagggccgctgacgtggaaccatcatcacccgaacccaagaggcggagggtcggtgacgtggaaccgtcacgcaaacccaagaggcggagggccgctgacgtggaaccatcattacccgaacccaagaggcggaggttgagctgagaagaggccagtgcactcaagcctgagcaataagaataaaaccgagtagaacaaaataaaaaattcaaaaaacaaaacaaaacccacactccaaaaactaacaaagaataaataaataatataaaaataaaataaa

SEQ ID NO: 440896 - DNA, 2070 bp, Homo sapiens
atgttttataggtatgatctcgtgaaaccttgagagaaactgaatgacgaatgaaactattgttcctgtttcacacagaagaaaactgaggttaaaaggggttggcactcatcatgagcccctgttctcattctgcaaatggtgaagctctctattgtcctgaccccacagttcctgtcccatgaccagggccagctcaccaaggagctgcagcagcatgtaaagtcagtgacatgcccatgcgagtacctgaggaaggttatcaatactctggctgaccatcatcatcgtgggactgactttggtggaagtccttggttacatgtcattattgcgtttccgacaagttataaagttgtcattaccctctggatagtttacctttgggtgtctctcctgaagactatcttctggtctcgaaatggacatgatggatccacggatgtacagcagagagcctggaggtccaaccgccgtagacaggaagggctgaggtccatttgtatgcacacaaagaaaagagtttcttcctttcgaggaaataaaattggcctgaaagacgtcattactctacggagacatgtggaaacaaaagttagagctaaaatccgtaagaggaaggtgacaacgaaaatcaaccatcatgacaaaatcaatggaaagaggaagaccgccagaaaacagaaaatgtttcaacgtgcgcaagagttgcggcggcgagcagaggactaccacaaatgcaaaatccccccttctgcaagaaaggctctttgcaactgggtcagaatggcggcagcggagcatcgtcattcttcaggattgccctactggccctacctcacagctgaaactttaaaaaacaggatgggccaccagccacctcctccaactcaacaacattctataactgataactccctgagcctcaagacacctcccgagtgtctgctcactccccttccaccctcagcggatgataatctcaagacacctcccgagtgtgtgctcactccccttccaccctcagcggatgataatctcaagacacctcccgagtgtgtgctcactccccttccaccctcagcggatgataatctcaagacacctcctgagtgtctgctcactccccttccaccctcagcggatgataatctcaagacacctcccgagtgttctcacggatgataatctcaagacaccttccgagcgtcagctcactccccttccaccctcagctccaccctcagcagatgataatatcaagacacctgccgagcgtcgtgcgggggccgcttccaccctcagcggatgataatctcaagacaccttccgagcgtcagctcactccctcactcccctccaccctcagctccaccctcagcagatgataatatcaagacacctgccttccaccctcagcggatgatctcaagacaccttccgagcgtcagctcactccccttccaccctcagctccaccctcagcagatgataatatcaagacacctgccgagcgtctgcgggggccgcttccaccctcagccgatgataatctcaagacacctcccttagctactcaggaggctgaggcagaaaaaccacgcaaacccaagaggcagagggcggctgagatggaaccacctcccgaacccaagaggcggagggtcggtgacgtggaaccgtcacgcaaacccaagaggcggagggccgctgacgtggaaccatcatcacccgaacccaagaggcggagggtcggtgatgtggaaccgtcacgcaaacccaagaggcggagggccgctgacgtggaaccatcatcacccgaacccaagaggcggagggtcggtgacgtggaaccgtcacgcaaacccaagaggcggagggccgctgacgtggaaccatcattacccgaacccaagaggcggaggttgagctgagaagaggccagtgcactcaagcctgagcaataagaataaaaccgagtagaacaaaataaaaaattcaaaaaacaaaacaaaacccacactccaaaaactaacaaagaataaataaataatataaaaataaaataaa

SEQ ID NO: 440897 - DNA, 2039 bp, Homo sapiens
atgttttataggtatgatctcgtgaaaccttgagagaaactgaatgacgaatgaaactattgttcctgtttcacacagaagaaaactgaggttaaaaggggttggcactcatcatgagcccctgttctcattctgcaaatggtgaagctctctattgtcctgaccccacagttcctgtcccatgaccagggccagctcaccaaggagctgcagcagcatgtaaagtcagtgacatgcccatgcgagtacctgaggaaggttatcaatactctggctgaccatcatcatcgtgggactgactttggtggaagtccttggttacatgtcattattgcgtttccgacaagttataaagttgtcattaccctctggatagtttacctttgggtgtctctcctgaagactatcttctggtctcgaaatggacatgatggatccacggatgtacagcagagagcctggaggtccaaccgccgtagacaggaagggctgaggtccatttgtatgcacacaaagaaaagagtttcttcctttcgaggaaataaaattggcctgaaagacgtcattactctacggagacatgtggaaacaaaagttagagctaaaatccgtaagaggaaggtgacaacgaaaatcaaccatcatgacaaaatcaatggaaagaggaagaccgccagaaaacagaaaatgtttcaacgtgcgcaagagttgcggcggcgagcagaggactaccacaaatgcaaaatccccccttctgcaagaaaggctctttgcaactgggtcagaatggcggcagcggagcatcgtcattcttcaggattgccctactggccctacctcacagctgaaactttaaaaaacaggatgggccaccagccacctcctccaactcaacaacattctataactgataactccctgagcctcaagacacctcccgagtgtctgctcactccccttccaccctcagcggatgataatctcaagacacctcccgagtgtgtgctcactccccttccaccctcagcggatgataatctcaagacacctcccgagtgtgtgctcactccccttccaccctcagcggatgataatctcaagacacctcctgagtgtctgctcactccccttccaccctcagcggatgataatctcaagacacctcccgagtgttctcaccaccctcagctctaccctcagctccaccctcagcggaatgataatctcaagacacgtgccgagtgtctgctccatccccttccaccctcagcggatgataatctcaagacaccttccgagcgtcagctcactccccttccaccctcagctccaccctcagcagatgataatatcaagacacctgccgagcgtcgttccaccctcagcggatgataatctcaagacaccttccgagcgtcagctcactccccttccaccctcagctccaccctcagcagatgataatatcaagacacctgccgagcgtctgcgggggccgcttccaccctcagccgatgataatctcaagacacctcccttagctactcaggaggctgaggcagaaaaaccacgcaaacccaagaggcagagggcggctgagatggaaccacctcccgaacccaagaggcggagggtcggtgacgtggaaccgtcacgcaaacccaagaggcggagggccgctgacgtggaaccatcatcacccgaacccaagaggcggagggtcggtgatgtggaaccgtcacgcaaacccaagaggcggagggccgctgacgtggaaccatcatcacccgaacccaagaggcggagggtcggtgacgtggaaccgtcacgcaaacccaagaggcggagggccgctgacgtggaaccatcattacccgaacccaagaggcggaggttgagctgagaagaggccagtgcactcaagcctgagcaataagaataaaaccgagtagaacaaaataaaaaattcaaaaaacaaaacaaaacccacactccaaaaactaacaaagaataaataaataatataaaaataaaataaa

SEQ ID NO: 440898 - DNA, 2849 bp, Homo sapiens
atgttttataggtatgatctcgtgaaaccttgagagaaactgaatgacgaatgaaactattgttcctgtttcacacagaagaaaactgaggttaaaaggggttggcactcatcatgagcccctgttctcattctgcaaatggtgaagctctctattgtcctgaccccacagttcctgtcccatgaccagggccagctcaccaaggagctgcagcagcatgtaaagtcagtgacatgcccatgcgagtacctgaggaaggttatcaatactctggctgaccatcatcatcgtgggactgactttggtggaagtccttggttacatgtcattattgcgtttccgacaagttataaagttgtcattaccctctggatagtttacctttgggtgtctctcctgaagactatcttctggtctcgaaatggacatgatggatccacggatgtacagcagagagcctggaggtccaaccgccgtagacaggaagggctgaggtccatttgtatgcacacaaagaaaagagtttcttcctttcgaggaaataaaattggcctgaaagacgtcattactctacggagacatgtggaaacaaaagttagagctaaaatccgtaagaggaaggtgacaacgaaaatcaaccatcatgacaaaatcaatggaaagaggaagaccgccagaaaacagaaaatgtttcaacgtgcgcaagagttgcggcggcgagcagaggactaccacaaatgcaaagtaaggagcttcctccctgcagttgcaggatagttcagtgctgatgcagatgatgccacggcccttagactctctcaacattcaatttctcatgtgttggctttttcagatccccccttctgcaagaaaggctctttgcaactgggtcagaatggcggcagcggagcatcgtcattcttcaggattgccctactggccctacctcacagctgaaactttaaaaaacaggatgggccaccagccacctcctccaactcaacaacattctataactgataactccctgagcctcaagacacctcccgagtgtctgctcactccccttccaccctcagcggatgataatctcaagacacctcccgagtgtgtgctcactccccttccaccctcagcggatgataatctcaagacacctcccgagtgtgtgctcactccccttccaccctcagcggatgataatctcaagacacctcctgagtgtctgctcactccccttccaccctcagcggatgataatctcaagacacctcccgagtgttctcacggatgataatctcaagacaccttccgagcgtcagctcactccccttccaccctcagctccacccctcagctccaccctcagcagatgataatatcaagacacctgccgagcgtctgcgggggccgcttccaccctcagcagatgataatctcaagacaccttccgagcgtcagctcactccccttccaccctcagctccaccctcagcagatgataatatcaagacacctgccgagcgtctgcgggggccgcttccaccctcagcggatgataatctcaagacaccttccgagcgtcagctcactccctttccaccctcagctccaccctcagcagatgataatatcaagacacctgccgagcgtctgcggggagcgtctgcgggggccgcttccaccctcagcggatgataatctcaagacaccttccgagcgtcagctcactccccttccaccctcagctccaccctcagcagatgataatatcaagacacctgccgagcgtctgcgggggccgcttccaccctcagcggatgataatctcaagacaccttccgagcgtcagctcactccccttccaccctcagctccaccctcagcagatgataatatcaagacacctgccgagcgtctgcgggggccgcttccaccctcagcggatgataatctcaagacaccttccgagcgtcagctcactccccttccaccctcagctccaccctcagcagatgataatatcaagacacctgccgagcgtctgcgggggccgcttccaccctcagcggatgataatctcaagacaccttccgagcgtcagctcactccccttccaccctcagctccaccctcagcagatgataatatcaagacacctgccgagcgtctgcgggggccgcttccaccctcagcggatgataatctcaagacaccttccgagcgtcagctcactccccttccaccctcagctccaccctcagcagatgataatatcaagacacctgccgagcgtctgcgggggccgcttccaccctcagccgatgataatctcaagacacctcccttagctactcaggaggctgaggcagaaaaaccacgcaaacccaagaggcagagggcggctgagatggaaccacctcccgaacccaagaggcggagggtcggtgacgtggaaccgtcacgcaaacccaagaggcggagggccgctgacgtggaaccatcatcacccgaacccaagaggcggagggtcggtgatgtggaaccgtcacgcaaacccaagaggcggagggccgctgacgtggaaccatcatcacccgaacccaagaggcggagggtcggtgacgtggaaccgtcacgcaaacccaagaggcggagggccgctgacgtggaaccatcattacccgaacccaagaggcggaggttgagctgagaagaggccagtgcactcaagcctgagcaataagaataaaaccgagtagaacaaaataaaaaattcaaaaaacaaaacaaaacccacactccaaaaactaacaaagaataaataaataatataaaaataaaataaa

SEQ ID NO: 440899 - DNA, 3073 bp, Homo sapiens
atgttttataggtatgatctcgtgaaaccttgagagaaactgaatgacgaatgaaactattgttcctgtttcacacagaagaaaactgaggttaaaaggggttggcactcatcatgagcccctgttctcattctgcaaatggtgaagctctctattgtcctgaccccacagttcctgtcccatgaccagggccagctcaccaaggagctgcagcagcatgtaaagtcagtgacatgcccatgcgagtacctgaggaaggttatcaatactctggctgaccatcatcatcgtgggactgactttggtggaagtccttggttacatgtcattattgcgtttccgacaagttataaagttgtcattaccctctggatagtttacctttgggtgtctctcctgaagactatcttctggtctcgaaatggacatgatggatccacggatgtacagcagagagcctggaggtccaaccgccgtagacaggaagggctgaggtccatttgtatgcacacaaagaaaagagtttcttcctttcgaggaaataaaattggcctgaaagacgtcattactctacggagacatgtggaaacaaaagttagagctaaaatccgtaagaggaaggtgacaacgaaaatcaaccatcatgacaaaatcaatggaaagaggaagaccgccagaaaacagaaaatgtttcaacgtgcgcaagagttgcggcggcgagcagaggactaccacaaatgcaaaatccccccttctgcaagaaaggctctttgcaactgggtcagaatggcggcagcggagcatcgtcattcttcaggattgccctactggccctacctcacagctgaaactttaaaaaacaggatgggccaccagccacctcctccaactcaacaacattctataactgataactccctgagcctcaagacacctcccgagtgtctgctcactccccttccaccctcagcggatgataatctcaagacacctcccgagtgtgtgctcactccccttccaccctcagcggatgataatctcaagacacctcccgagtgtgtgctcactccccttccaccctcagcggatgataatctcaagacacctcctgagtgtctgctcactccccttccaccctcagcggatgataatctcaagacacctcccgagtgttctcacggatgataatctcaagacaccttccgagcgtcagctcactccccttccaccctcagctccacccctcagctccaccctcagcagatgataatatcaagacacctgccgagcgtctgcgggggccgcttccaccctcagcagatgataatctcaagacaccttccgagcgtcagctcactccccttccaccctcagctccaccctcagcagatgataatatcaagacacctgccgagcgtctgcgggggccgcttccaccctcagcggatgataatctcaagacaccttccgagcgtcagctcactccctttccaccctcagctccaccctcagcagatgataatatcaagacacctgccgagcgtctgcggggagcgtctgcgggggccgcttccaccctcagcggatgataatctcaagacaccttccgagcgtcagctcactccccttccaccctcagctccaccctcagcagatgataatatcaagacacctgccgagcgtctgcgggggccgcttccaccctcagcggatgataatctcaagacaccttccgagcgtcagctcactccccttccaccctcagctccaccctcagcagatgataatatcaagacacctgccgagcgtctgcgggggccgcttccaccctcagcggatgataatctcaagacaccttccgagcgtcagctcactccccttccaccctcagctccaccctcagcagatgataatatcaagacacctgccgagcgtctgcgggggccgcttccaccctcagcggatgataatctcaagacaccttccgagcgtcagctcactccccttccaccctcagctccaccctcagcagatgataatatcaagacacctgccgagcgtctgcgggggccgcttccaccctcagcggatgataatctcaagacaccttccgagcgtcagctcactccccttccaccctcagctccaccctcagcagatgataatatcaagacacctgccgagcgtctgcgggggccgcttccaccctcagccgatgataatctcaagacacctcccttagctactcaggaggctgaggcagaaaaaccacgcaaacccaagaggcagagggcggctgagatggaaccacctcccgaacccaagaggcggagggtcggtgacgtggaaccgtcacgcaaacccaagaggcggagggccgctgacgtggaaccatcatcacccgaacccaagaggcggagggtcggtgatgtggaaccgtcacgcaaacccaagaggcggagggccgctgacgtggaaccatcatcacccgaacccaagaggcggagggtcggtgacgtggaaccgtcacgcaaacccaagaggcggagggccgctgacgtggaaccatcattacccgaacccaagaggcggaggttgagctgagaagaggccagtgcactcaagcctgagcaataagaataaaaccgagtagaacaaaataaaaaattcaaaaaacaaaacaaaacccacactccaaaaactaacaaagaataaataaataatataaaaataaaataaaaaaacaaaaaaggaaaaaagagaaaaaaaaagaaaagaaaaaaagacaaacagagaaacaaagaaggaaaacaaggcggggggggggcaaggagagagacccgcggcggggccaaaatggagcggaaaaccgagaattgggagacaagggggccccacaagagggagccataaatagaaaaagagagaagcgggcgaggaaaacacacgccgagcggaggcggagaccaaagcgcccggggcgaacactgcgagaaggcacccccaactagggggagggagatacaggagcggcaaagaccgtaggagggagaggaggagacagggagggcac

SEQ ID NO: 440900 - DNA, 2862 bp, Homo sapiens
atgttttataggtatgatctcgtgaaaccttgagagaaactgaatgacgaatgaaactattgttcctgtttcacacagaagaaaactgaggttaaaaggggttggcactcatcatgagcccctgttctcattctgcaaatggtgaagctctctattgtcctgaccccacagttcctgtcccatgaccagggccagctcaccaaggagctgcagcagcatgtaaagtcagtgacatgcccatgcgagtacctgaggaaggttatcaatactctggctgaccatcatcatcgtgggactgactttggtggaagtccttggttacatgtcattattgcgtttccgacaagttataaagttgtcattaccctctggatagtttacctttgggtgtctctcctgaagactatcttctggtctcgaaatggacatgatggatccacggatgtacagcagagagcctggaggtccaaccgccgtagacaggaagggctgaggtccatttgtatgcacacaaagaaaagagtttcttcctttcgaggaaataaaattggcctgaaagacgtcattactctacggagacatgtggaaacaaaagttagagctaaaatccgtaagaggaaggtgacaacgaaaatcaaccatcatgacaaaatcaatggaaagaggaagaccgccagaaaacagaaaatgtttcaacgtgcgcaagagttgcggcggcgagcagaggactaccacaaatgcaaaatccccccttctgcaagaaaggctctttgcaactgggtcagaatggcggcagcggagcatcgtcattcttcaggattgccctactggccctacctcacagctgaaactttaaaaaacaggatgggccaccagccacctcctccaactcaacaacattctataactgataactccctgagcctcaagacacctcccgagtgtctgctcactccccttccaccctcagcggatgataatctcaagacacctcccgagtgtgtgctcactccccttccaccctcagcggatgataatctcaagacacctcccgagtgtgtgctcactccccttccaccctcagcggatgataatctcaagacacctcctgagtgtctgctcactccccttccaccctcagcggatgataatctcaagacacctcccgagtgttctcacggatgataatctcaagacaccttccgagcgtcagctcactccccttccaccctcagctccacccctcagctccaccctcagcagatgataatatcaagacacctgccgagcgtctgcgggggccgcttccaccctcagcagatgataatctcaagacaccttccgagcgtcagctcactccccttccaccctcagctccaccctcagcagatgataatatcaagacacctgccgagcgtctgcgggggccgcttccaccctcagcggatgataatctcaagacaccttccgagcgtcagctcactccctttccaccctcagctccaccctcagcagatgataatatcaagacacctgccgagcgtctgcggggagcgtctgcgggggccgcttccaccctcagcggatgataatctcaagacaccttccgagcgtcagctcactccccttccaccctcagctccaccctcagcagatgataatatcaagacacctgccgagcgtctgcgggggccgcttccaccctcagcggatgataatctcaagacaccttccgagcgtcagctcactccccttccaccctcagctccaccctcagcagatgataatatcaagacacctgccgagcgtctgcgggggccgcttccaccctcagcggatgataatctcaagacaccttccgagcgtcagctcactccccttccaccctcagctccaccctcagcagatgataatatcaagacacctgccgagcgtctgcgggggccgcttccaccctcagcggatgataatctcaagacaccttccgagcgtcagctcactccccttccaccctcagctccaccctcagcagatgataatatcaagacacctgccgagcgtctgcgggggccgcttccaccctcagcggatgataatctcaagacaccttccgagcgtcagctcactccccttccaccctcagctccaccctcagcagatgataatatcaagacacctgccgagcgtctgcgggggccgcttccaccctcagccgatgataatctcaagacacctcccttagctactcaggaggctgaggcagaaaaaccacgcaaacccaagaggcagagggcggctgagatggaaccacctcccgaacccaagaggcggagggtcggtgacgtggaaccgtcacgcaaacccaagaggcggagggccgctgacgtggaaccatcatcacccgaacccaagaggcggagggtcggtgatgtggaaccgtcacgcaaacccaagaggcggagggccgctgacgtggaaccatcatcacccgaacccaagaggcggagggtcggtgacgtggaaccgtcacgcaaacccaagaggcggagggccgctgacgtggaaccatcattacccgaacccaagaggcggaggttgagctgagaagaggccagtgcactcaagcctgagcaataagaataaaaccgagtagaacaaaataaaaaattcaaaaaacaaaacaaaacccacactccaaaaactaacaaagaataaataaataatataaaaataaaataaatactgcagtccttatgttattgctttgtttcgatatctggtatgattgcctgagggacctgaggtttttaatcataggggtttttttttaatctttagaagtggttggttatgtaaaatatt

SEQ ID NO: 440901 - DNA, 2701 bp, Homo sapiens
  misc_feature (2659)..(2659): n is a, c, g, or t
  misc_feature (2664)..(2664): n is a, c, g, or t
  misc_feature (2684)..(2684): n is a, c, g, or t
atgttttataggtatgatctcgtgaaaccttgagagaaactgaatgacgaatgaaactattgttcctgtttcacacagaagaaaactgaggttaaaaggggttggcactcatcatgagcccctgttctcattctgcaaatggtgaagctctctattgtcctgaccccacagttcctgtcccatgaccagggccagctcaccaaggagctgcagcagcatgtaaagtcagtgacatgcccatgcgagtacctgaggaaggttatcaatactctggctgaccatcatcatcgtgggactgactttggtggaagtccttggttacatgtcattattgcgtttccgacaagttataaagttgtcattaccctctggatagtttacctttgggtgtctctcctgaagactatcttctggtctcgaaatggacatgatggatccacggatgtacagcagagagcctggaggtccaaccgccgtagacaggaagggctgaggtccatttgtatgcacacaaagaaaagagtttcttcctttcgaggaaataaaattggcctgaaagacgtcattactctacggagacatgtggaaacaaaagttagagctaaaatccgtaagaggaaggtgacaacgaaaatcaaccatcatgacaaaatcaatggaaagaggaagaccgccagaaaacagaaaatgtttcaacgtgcgcaagagttgcggcggcgagcagaggactaccacaaatgcaaaatccccccttctgcaagaaaggctctttgcaactgggtcagaatggcggcagcggagcatcgtcattcttcaggattgccctactggccctacctcacagctgaaactttaaaaaacaggatgggccaccagccacctcctccaactcaacaacattctataactgataactccctgagcctcaagacacctcccgagtgtctgctcactccccttccaccctcagcggatgataatctcaagacacctcccgagtgtgtgctcactccccttccaccctcagcggatgataatctcaagacacctcccgagtgtgtgctcactccccttccaccctcagcggatgataatctcaagacacctcctgagtgtctgctcactccccttccaccctcagcggatgataatctcaagacacctcccgagtgttctcacggatgataatctcaagacaccttccgagcgtcagctcactccccttccaccctcagctccacccctcagctccaccctcagcagatgataatatcaagacacctgccgagcgtctgcgggggccgcttccaccctcagcagatgataatctcaagacaccttccgagcgtcagctcactccccttccaccctcagctccaccctcagcagatgataatatcaagacacctgccgagcgtctgcgggggccgcttccaccctcagcggatgataatctcaagacaccttccgagcgtcagctcactccctttccaccctcagctccaccctcagcagatgataatatcaagacacctgccgagcgtctgcggggagcgtctgcgggggccgcttccaccctcagcggatgataatctcaagacaccttccgagcgtcagctcactccccttccaccctcagctccaccctcagcagatgataatatcaagacacctgccgagcgtctgcgggggccgcttccaccctcagcggatgataatctcaagacaccttccgagcgtcagctcactccccttccaccctcagctccaccctcagcagatgataatatcaagacacctgccgagcgtctgcgggggccgcttccaccctcagcggatgataatctcaagacaccttccgagcgtcagctcactccccttccaccctcagctccaccctcagcagatgataatatcaagacacctgccgagcgtctgcgggggccgcttccaccctcagcggatgataatctcaagacaccttccgagcgtcagctcactccccttccaccctcagctccaccctcagcagatgataatatcaagacacctgccgagcgtctgcgggggccgcttccaccctcagcggatgataatctcaagacaccttccgagcgtcagctcactccccttccaccctcagctccaccctcagcagatgataatatcaagacacctgccgagcgtctgcgggggccgcttccaccctcagccgatgataatctcaagacacctcccttagctactcaggaggctgaggcagaaaaaccacgcaaacccaagaggcagagggcggctgagatggaaccacctcccgaacccaagaggcggagggtcggtgacgtggaaccgtcacgcaaacccaagaggcggagggccgctgacgtggaaccatcatcacccgaacccaagaggcggagggtcggtgatgtggaaccgtcacgcaaacccaagaggcggagggccgctgacgtggaaccatcatcacccgaacccaagaggcggagggtcggtgacgtggaaccgtcacgcaaacccaagaggcggagggccgctgacgtggaaccatcattacccgaacccaagaggcggaggttgagctgagaagaggccagtgcactcaagcctgagcaataagaataaaaccgaggttgctgtntcacnatacctcatgcttcacatanccgagcgagggaccgct

SEQ ID NO: 440902 - DNA, 2225 bp, Homo sapiens
atgttttataggtatgatctcgtgaaaccttgagagaaactgaatgacgaatgaaactattgttcctgtttcacacagaagaaaactgaggttaaaaggggttggcactcatcatgagcccctgttctcattctgcaaatggtgaagctctctattgtcctgaccccacagttcctgtcccatgaccagggccagctcaccaaggagctgcagcagcatgtaaagtcagtgacatgcccatgcgagtacctgaggaaggttatcaatactctggctgaccatcatcatcgtgggactgactttggtggaagtccttggttacatgtcattattgcgtttccgacaagttataaagttgtcattaccctctggatagtttacctttgggtgtctctcctgaagactatcttctggtctcgaaatggacatgatggatccacggatgtacagcagagagcctggaggtccaaccgccgtagacaggaagggctgaggtccatttgtatgcacacaaagaaaagagtttcttcctttcgaggaaataaaattggcctgaaagacgtcattactctacggagacatgtggaaacaaaagttagagctaaaatccgtaagaggaaggtgacaacgaaaatcaaccatcatgacaaaatcaatggaaagaggaagaccgccagaaaacagaaaatgtttcaacgtgcgcaagagttgcggcggcgagcagaggactaccacaaatgcaaaatccccccttctgcaagaaaggctctttgcaactgggtcagaatggcggcagcggagcatcgtcattcttcaggattgccctactggccctacctcacagctgaaactttaaaaaacaggatgggccaccagccacctcctccaactcaacaacattctataactgataactccctgagcctcaagacacctcccgagtgtctgctcactccccttccaccctcagcggatgataatctcaagacacctcccgagtgtgtgctcactccccttccaccctcagcggatgataatctcaagacacctcccgagtgtgtgctcactccccttccaccctcagcggatgataatctcaagacacctcctgagtgtctgctcactccccttccaccctcagcggatgataatctcaagacacctcccgagtgttctcaccaccctcagctctaccctcagctccaccctcagcggaatgataatctcaagacacgtgccgagtgtctgctccatccccttccaccctcagcggatgataatctcaagacaccttccgagcgtcagctcactccccttccaccctcagctccaccctcagcagatgataatatcaagacacctgccgagcgtcgagcgtctgcgggggccgcttccaccctcagcggatgataatctcaagacaccttccgagcgtcagctcactccccttccaccctcagctccaccctcagcagatgataatatcaagacacctgccgagcgtctgcgggggccgcttccaccctcagcggatgataatctcaagacaccttccgagcgtcagctcactccccttccaccctcagctccaccctcagcagatgataatatcaagacacctgccgagcgtctgcgggggccgcttccaccctcagcggatgataatctcaagacaccttccgagcgtcagctcactccccttccaccctcagctccaccctcagcagatgataatatcaagacacctgccgagcgtctgcgggggccgcttccaccctcagccgatgataatctcaagacacctcccttagctactcaggaggctgaggcagaaaaaccacgcaaacccaagaggcagagggcggctgagatggaaccatcatcacccgaacccaagaggcggagggtcggtgatgtggaaccgtcacgcaaacccaagaggcggagggccgctgacgtggaaccatcatcacccgaacccaagaggcggagggtcggtgacgtggaaccgtcacgcaaacccaagaggcggagggccgctgacgtggaaccatcattacccgaacccaagaggcggaggttgagctgagaagaggccagtgcactcaagcctgagcaataagaataaaaccgagtagaacaaaataaaaaattcaaaaaacaaaacaaaacccacactccaaaaactaacaaagaataaataaataatataaaaataaaataaa

SEQ ID NO: 440903 - DNA, 1795 bp, Homo sapiens
atgttttataggtatgatctcgtgaaaccttgagagaaactgaatgacgaatgaaactattgttcctgtttcacacagaagaaaactgaggttaaaaggggttggcactcatcatgagcccctgttctcattctgcaaatggtgaagctctctattgtcctgaccccacagttcctgtcccatgaccagggccagctcaccaaggagctgcagcagcatgtaaagtcagtgacatgcccatgcgagtacctgaggaaggttatcaatactctggctgaccatcatcatcgtgggactgactttggtggaagtccttggttacatgtcattattgcgtttccgacaagttataaagttgtcattaccctctggatagtttacctttgggtgtctctcctgaagactatcttctggtctcgaaatggacatgatggatccacggatgtacagcagagagcctggaggtccaaccgccgtagacaggaagggctgaggtccatttgtatgcacacaaagaaaagagtttcttcctttcgaggaaataaaattggcctgaaagacgtcattactctacggagacatgtggaaacaaaagttagagctaaaatccgtaagaggaaggtgacaacgaaaatcaaccatcatgacaaaatcaatggaaagaggaagaccgccagaaaacagaaaatgtttcaacgtgcgcaagagttgcggcggcgagcagaggactaccacaaatgcaaaatccccccttctgcaagaaaggctctttgcaactgggtcagaatggcggcagcggagcatcgtcattcttcaggattgccctactggccctacctcacagctgaaactttaaaaaacaggatgggccaccagccacctcctccaactcaacaacattctataactgataactccctgagcctcaagacacctcccgagtgtctgctcactccccttccaccctcagcggatgataatctcaagacacctcccgagtgtgtgctcactccccttccaccctcagcggatgataatctcaagacacctcccgagtgtgtgctcactccccttccaccctcagcggatgataatctcaagacacctcctgagtgtctgctcactccccttccaccctcagcggatgataatctcaagacacctcccgagtgttctcacggatgataatctcaagacaccttccgagcgtcagctcactccccttccaccctcagctccacccctcagctccaccctcagcagatgataatatcaagacacctgccgagcgtctgcgggggccgcttccaccctcagcagatgataatctcaagacaccttccgagcgtcagctcactccccttccaccctcagctccaccctcagcagatgataatatcaagacacctgccgagcgtctgcgggggccgcttccaccctcagcggatgataatctcaagacaccttccgagcgtcagctcactccctttccaccctcagctccaccctcagcagatgataatatcaagacacctgccgagcgtctgcggggagcgtctgcgggggccgcttccaccctcagcggatgataatctcaagacaccttccgagcgtcagctcactccccttccaccctcagctccaccctcagcagatgataatatcaagacacctgccgagcgtctgcgggggccgcttccaccctcagcggatgataatcatcagcagcccaggggctgctgatgattatgtgagaagacgcaggccggatgtcagaggggggtcccggagctcg

SEQ ID NO: 440904 - DNA, 817 bp, Homo sapiens
atgttttataggtatgatctcgtgaaaccttgagagaaactgaatgacgaatgaaactattgttcctgtttcacacagaagaaaactgaggttaaaaggggttggcactcatcatgagcccctgttctcattctgcaaatggtgaagctctctattgtcctgaccccacagttcctgtcccatgaccagggccagctcaccaaggagctgcagcagcatgtaaagtcagtgacatgcccatgcgagtacctgaggaaggttatcaatactctggctgaccatcatcatcgtgggactgactttggtggaagtccttggttacatgtcattattgcgtttccgacaagttataaagttgtcattaccctctggatagtttacctttgggtgtctctcctgaagactatcttctggtctcgaaatggacatgatggatccacggatgtacagcagagagcctggaggtccaaccgccgtagacaggaagggctgaggtccatttgtatgcacacaaagaaaagagtttcttcctttcgaggaaataaaattggcctgaaagacgtcattactctacggagacatgtggaaacaaaagttagagctaaaatccgtaagaggaaggtgacaacgaaaatcaaccatcatgacaaaatcaatggaaagaggaagaccgccagaaaacagtaagatgtgccttgacacaaatactgttgtatgaaccatgtgccaatcaaagtagacaactgtaaagtccttgagaatattttctacaatatttgtggcaaattcagtgggttcaaaattgagtttgtccttt

SEQ ID NO: 440905 - DNA, 5131 bp, Homo sapiens
  misc_feature (3523)..(3523): n is a, c, g, or t
  misc_feature (3998)..(3998): n is a, c, g, or t
  misc_feature (4596)..(4596): n is a, c, g, or t
cttaggaacgggttgctaagctggtgtttttgctccaagacatggctgcagcttcccagggaggagcccaggggcatctccaacactcagcctttccctccggacccttttaaaagattcaacagcaccgtctctctccacttccatcctagaatgcagaatctgcaaagtgccttttgtaaagtttcttaagggacccatcccagccaaaatgaatcccagggaagaaaaagtaaaaataattacagaggagttcattgaaaatgatgaggatgcagacatgggaagacagaataagaactcaaaggttcgaagacagccaagaaagaaacaggcagaagccaactcctttctcccgagcctgctggcagatcctcccccacctctccgcaggagttcccctcctaggctgggagcatcccgtgcagggtaaatcttttcaagccaccaactgctgtccccaaggaaatggtgtccgaaaaatcccaccttggcaacccccaggagcctgtgcaggaggagcccaagacccgcctcctgagtatgacagtccggagaggcccacggagcttacctccaattccttcaacttccagaacaggctttgcagaattttccatgaggggacgcatgagggagaaattgcaagcagcgaggtccaaagcagaaagtgcattgctgcaggaaatccccactcctcggcccagacgcttacgaagtcccagtaagaaagaattggagactgaatttggcacagagccagggaaagaggtagaaaggactcaacaagaagttgactcccaaagttactcaagagtcaagttccatgattctgcacgaaaaatcaagcctaaaccccaggttccacctggcttcccttctgcagaagaggcctataacttctttactttcaactttgatcccgaaccagaaggatcagaggaaaaaccaaaagcaagacatagagcgggaactaatcaagaggaggaggaaggggaagaagaagaaccacctgcacaaggaggaggaaaggaaatggatgaggaagaactgcttaatggtgatgatgccgaggacttcctattgggcttagatcacgtggctgacgattttgtagcagtcagacctgcagattatgaaagcatccatgatcggctgcagatggaaagagaaatgctcttcatacccagtaggcagacagtccctacatataaaaagcttcctgagaatgtacagcccaggttcctggaagatgaaggcctttacaccggggtaagaccagaggtggcacgcaccaatcagaacatcatggagaacagattgctgatgcaggaccccgaaagaagatggtttggagatgacggcaggatcctagctctgccaaaccccatcaagccatttccttcaaggccgccagtactaacacaggagcagagcattaaggcagagcttgaaacactgtataaaaaggctgtaaaatacgttcacagtagtcagcatgtgatcagatctggagaccctcctggaaatttccaactggacattgatatttcagggttaatcttcactcatcatccctgttttagccgagagcatgttttggcagccaagctggcccagttatatgaccagtaccttgcaagacaccagagaaacaaggcgaaatttcttactgataagctccaagctttaagaaatgctgttcagactggccttgatccagaaaaacctcatcagtctctcgataccatccaaaaaaccatcaatgagtataaatctgaaattcgacaaacaagaaaattccgtgatgctgaacaagaaaaagatagaacattgcttaagactatcataaaagtttggaaagagatgaaatcccttcgagagttccagagatttacaaatactcccttgaaacttgttttgagaaaggaaaaagctgaccagaaagcagatgaagaagcatatgaagcagaaattcaagctgaaataagtgaactgttagaagagcacacggaggagtacgcacagaagatggaagaatacagaacgtcgttacaacagtggaaggcctggaggaaagtgcaaagggccaagaagaagaaaaggaaacaagcagcagaagaacatcccggtgatgagattgcagagccgtatcccgaggaggaccttgtgaagcccagccctccagagcccactgatcgggcagtgatagagcaggaggtgagggagagagcagcccagagcaggaggaggccttgggagcccacgctggtcccggagctaagcctggcaggaagcgtaacacccaatgaccagtgccccagagcggaggtctcgagaagggaggatgtaaagaagcgctcagtgtacttaaaagtgctgttcaacaacaaggaggtgtccaggacagtcagtcggccactaggagcagacttccgagttcactttgggcagattttcaatttgcaaatagtcaactggccggagagtttaacacttcaggtctatgaaactgtcggacacagtagtcccaccttgctagcagaagtgtttctgcctattcctgagactactgttgtcactggaagggctcctactgaagaagtggagtttagcagtaatcagcatgtgacactggaccacgagggagttggaagtggagtgcccttctcatttgaagctgatggcagtaaccagctgactctgatgacctcagggaaagtgtctcatagtgtggcatgggccattggagaaaacgggatacctttaattcctccattgtcacagcagaacatcggatttcggagtgctttgaagaaagcagatgccatctcatctattggcacatcaggactgacagacatgaaaaaattggccaagtgggcagcagagtccaagctcgacccaaatgaccccaacaatgcccctttgatgcagcttatctcggttgctaccagtggtgaatcctatgtccctgatttctttagactggagcagctgcaacaggagtttaactttgtttcagatcaagaattaaatagatccaaacgatttaggcttcttcatcttagaagccaagaggtgccagaattccgaaattataagcaagttccagtctatgaccgagaaattatggaaaaggtattccaggactatgagaaacggttacgagacagaaatgtaatagaaaccaaggaacacatagacacccatagggccatagtagccaagtacctccagcaggttagagaatcagtgataaatcgtttcttaattgcaaaacaatattttcttcttgctgatatgatagtagaagaagaagttcccaatatcagcattttgggcctaagccttttcaagctggcagaacaaaagcgaccactgcggccaaggagaaaaggtcggaagaaggtgacagcccaaaacctgtctgatggagacataaagctgctggtgaacattgtgcgagcttacgacattccagtgaggaagccggcagtgagcaaattccagcagccgtcgnggtcttcaaggatgttcagtgaaaagcatgctgcttccccaagcacgtacagcccaacccacaatgctgactaccccctcggccaggttttagtacgtccctttgtagaagtctcttttcaacgaacagtttgccatacgactacggctgaaggaccaaaccctagctggaatgaagaactagaacttccatttagggctcctaatggagattatagcacagccagtctgcagtcagtgaaagatgttgtgttcattaacatttttgatgaagtactgcatgatgtcttagaggatgaccgtgaaagaggaagtggaatccatactcgtattgagagacactggctgggatgtgtgaaaatgccatttagcacaatatatttccaagcaaggtttgagtctcaggaagatgagaaattacttcaagcaactgagaagtttcaagctgaatgtgccttaaagtttccaaatcgtcngtgccttacaacagtaattgatataagcggaaaaactgtttttatcacacgttatctcaaacctttaaaccctcctcaggagctccttaatgtctaccccaataatctacaggcaactgcagaactggtggctcgatatgtgtccttgattcccttcttgcctgacactgtctcatttggtggtatctgtgacctctggagcacatctgatcaatttcttgatctcctggcaggggatgaagaagaacatgcagtactattgtgtaattactttctgtctctgggtaagaaggcctggctgttgatgggcaatgctattcctgagggtccaactgcctatgtgctaacttgggagcaaggtcgttatttaatatggaatccctgcagtggacatttttatggacaatttgatacattctgtcccttgaaaaatgtgggctgtttaataggtcctgacaatatttggtttaatattcaacgatatgaatctccactaaggataaattttgatgtcaccaggcccaagctatggaaatctttcttttcaagaagccttccatatcctggcctttccagtgttcagcctgaagagctaatntaccagcgctcagacaaagcagctgcagctgagctacaagacaggattgaaaaaatactaaaagaaaaaatcatggactggaggccacgccatctgactcggtggaataggtattgtacctctactctgcgtcacttcttgcctctgttagaaaaaagtcaaggagaagatgtagaagatgaccacagagcagaactgctaaaacagctgggagactacaggttctctggatttcctcttcacatgccttattctgaagtgaagcctttaattgacgctgtgtatagtactggagtacataatattgatgttcctaatgttgaatttgctttagctgtatacatacacccataccccaaaaatgttttgtctgtttggatctatgttgcctctcttatacgcaacaggtaatttttttcactgtactttctgtatcatgtaaaaactacacttaggatatgagaaaattttaaattatatgcatcacatcagaagaacatattattggcaaataataaaattatcaactgttttc

SEQ ID NO: 440906 - DNA, 3611 bp, Homo sapiens
cttaggaacgggttgctaagctggtgtttttgctccaagacatggctgcagcttcccagggaggagcccaggggcatctccaacactcagcctttccctccggacccttttaaaagattcaacagcaccgtctctctccacttccatcctagaatgcagaatctgcaaagtgccttttgtaaagtttcttaagggacccatcccagccaaaatgaatcccagggaagaaaaagtaaaaataattacagaggagttcattgaaaatgatgaggatgcagacatgggaagacagaataagaactcaaaggttcgaagacagccaagaaagaaacagccaccaactgctgtccccaaggaaatggtgtccgaaaaatcccaccttggcaacccccaggagcctgtgcaggaggagcccaagacccgcctcctgagtatgacagtccggagaggcccacggagcttacctccaattccttcaacttccagaacaggctttgcagaattttccatgaggggacgcatgagggagaaattgcaagcagcgaggtccaaagcagaaagtgcattgctgcaggaaatccccactcctcggcccagacgcttacgaagtcccagtaagaaagaattggagactgaatttggcacagagccagggaaagaggtagaaaggactcaacaagaagttgactcccaaagttactcaagagtcaagttccatgattctgcacgaaaaatcaagcctaaaccccaggttccacctggcttcccttctgcagaagaggcctataacttctttactttcaactttgatcccgaaccagaaggatcagaggaaaaaccaaaagcaagacatagagcgggaactaatcaagaggaggaggaaggggaagaagaagaaccacctgcacaaggaggaggaaaggaaatggatgaggaagaactgcttaatggtgatgatgccgaggacttcctattgggcttagatcacgtggctgacgattttgtagcagtcagacctgcagattatgaaagcatccatgatcggctgcagatggaaagagaaatgctcttcatacccagtaggcagacagtccctacatataaaaagcttcctgagaatgtacagcccaggttcctggaagatgaaggcctttacaccggggtaagaccagaggtggcacgcaccaatcagaacatcatggagaacagattgctgatgcaggaccccgaaagaagatggtttggagatgacggcaggatcctagctctgccaaaccccatcaagccatttccttcaaggccgccagtactaacacaggagcagagcattaaggcagagcttgaaacactgtataaaaaggctgtaaaatacgttcacagtagtcagcatgtgatcagatctggagaccctcctggaaatttccaactggacattgatatttcagggttaatcttcactcatcatccctgttttagccgagagcatgttttggcagccaagctggcccagttatatgaccagtaccttgcaagacaccagagaaacaaggcgaaatttcttactgataagctccaagctttaagaaatgctgttcagactggccttgatccagaaaaacctcatcagtctctcgataccatccaaaaaaccatcaatgagtataaatctgaaattcgacaaacaagaaaattccgtgatgctgaacaagaaaaagatagaacattgcttaagactatcataaaagtttggaaagagatgaaatcccttcgagagttccagagatttacaaatactcccttgaaacttgttttgagaaaggaaaaagctgaccagaaagcagatgaagaagcatatgaagcagaaattcaagctgaaataagtgaactgttagaagagcacacggaggagtacgcacagaagatggaagaatacagaacgtcgttacaacagtggaaggcctggaggaaagtgcaaagggccaagaagaagaaaaggaaacaagcagcagaagaacatcccggtgatgagattgcagagccgtatcccgaggaggaccttgtgaagcccagccctccagagcccactgatcgggcagtgatagagcaggaggtgagggagagagcagcccagagcaggaggaggccttgggagcccacgctggtcccggagctaagcctggcaggaagcgtaacacccaatgaccagtgccccagagcggaggtctcgagaagggaggatgtaaagaagcgctcagtgtacttaaaagtgctgttcaacaacaaggaggtgtccaggacagtcagtcggccactaggagcagacttccgagttcactttgggcagattttcaatttgcaaatagtcaactggccggagagtttaacacttcaggtctatgaaactgtcggacacagtagtcccaccttgctagcagaagtgtttctgcctattcctgagactactgttgtcactggaagggctcctactgaagaagtggagtttagcagtaatcagcatgtgacactggaccacgagggagttggaagtggagtgcccttctcatttgaagctgatggcagtaaccagctgactctgatgacctcagggaaagtgtctcatagtgtggcatgggccattggagaaaacgggatacctttaattcctccattgtcacagcagaacatcggatttcggagtgctttgaagaaagcagatgccatctcatctattggcacatcaggactgacagacatgaaaaaattggccaagtgggcagcagagtccaagctcgacccaaatgaccccaacaatgcccctttgatgcagcttatctcggttgctaccagtggtgaatcctatgtccctgatttctttagactggagcagctgcaacaggagtttaactttgtttcagatcaagaattaaatagatccaaacgatttaggcttcttcatcttagaagccaagaggtgccagaattccgaaattataagcaagttccagtctatgaccgagaaattatggaaaaggtattccaggactatgagaaacggttacgagacagaaatgtaatagaaaccaaggaacacatagacacccatagggccatagtagccaagtacctccagcagctaaaagaaaaaatcatggactggaggccacgccatctgactcggtggaataggtattgtacctctactctgcgtcacttcttgcctctgttagaaaaaagtcaaggagaagatgtagaagatgaccacagagcagaactgctaaaacagctgggagactacaggttctctggatttcctcttcacatgccttattctgaagtgaagcctttaattgacgctgtgtatagtactggagtacataatattgatgttcctaatgttgaatttgctttagctgtatacatacacccataccccaaaaatgttttgtctgtttggatctatgttgcctctcttatacgcaacaggtaatttttttcactgtactttctgtatcatgtaaaaactacacttaggatatgagaaaattttaaattatatgcatcacatcagaagaacatattattggcaaataataaaattatcaactgttttc

SEQ ID NO: 440907 - DNA, 1563 bp, Homo sapiens
cttaggaacgggttgctaagctggtgtttttgctccaagacatggctgcagcttcccagggaggagcccaggggcatctccaacactcagcctttccctccggacccttttaaaagattcaacagcaccgtctctctccacttccatcctagaatgcagaatctgcaaagtgccttttgtaaagtttcttaagctatattctaatggatatgggctgacattaacaaggacccatcccagccaaaatgaatcccagggaagaaaaagtaaaaataattacagaggagttcattgaaaatgatgaggatgcagacatgggaagacagaataagaactcaaaggttcgaagacagccaagaaagaaacagccaccaactgctgtccccaaggaaatggtgtccgaaaaatcccaccttggcaacccccaggagcctgtgcaggaggagcccaagacccgcctcctgagtatgacagtccggagaggcccacggagagagctggttgttaaaaagagcctgggcaggccaggcacggtgactcacgtctgtaatcccagcactttggaaggccgaggcgggtaaatcacctgaggttgggagttcaagaccagcctgaccaacatggagaaaccccatctctactaaaaatacaaaaaaattagccaggcgtggtggcgcatgcctgtaatcccagctacttgggaggctgaggcatgagaattgcttgaacctgggaggtggaggttgcagtgagccgagatcggagcactgcactccagcctaggcaacagagcaagactccatctcagaaaacaaacaaacaaaaaagagcctggaacctcctcccctctctcttgctccctctctcaccatgcgacacacctgtttccccttccccttctgacataagtgaaagcttcctaaggcctcaccagaggcagatgctggcaccatgcttattgcacagtctgcagaacagtgagccaaaataaacctcttttctttataaattacccagtctcagatattcctttatagcaatgcaaaatggactaacaatacataagttagggagtgttaattagaatggaaattaaatatgcagaaactcaaaggaagatgaaattgttagggaagacatatgtgttaacctagtgaggcttgaatcagatgtttggaagaaatgagggaggtttctgaggctcctggtgaccttgccattgaggacacatatacttctccccctacacacgccttttcttcttccccagtacaatgaacattaggaattacctgctcattgtagggaaaatgaccacccttcaggcattgcttttcatgaaaagtggattagacaagaggagaagtggttacactttttaattgttacataattgttagactgttttccctatggcaaagttgggaaataagtaactgttggaaactagaggcctttggaagcaagtagactcttagattggaaaaatgtggttctaatctaaaagcaatgatacaatgagagctgttatgaattaataaaaacagaaccaaaatttaaaca

SEQ ID NO: 440908 - DNA, 1183 bp, Homo sapiens
cttaggaacgggttgctaagctggtgtttttgctccaagacatggctgcagcttcccagggaggagcccaggggcatctccaacactcagcctttccctccggacccttttaaaagattcaacagcaccgtctctctccacttccatcctagaatgcagaatctgcaaagtgccttttgtaaagtttcttaagggacccatcccagccaaaatgaatcccagggaagaaaaagtaaaaataattacagaggagttcattgaaaatgatgaggatgcagacatgggaagacagaataagaactcaaaggttcgaagacagccaagaaagaaacagccaccaactgctgtccccaaggaaatggtgtccgaaaaatcccaccttggcaacccccaggagcctgtgcaggaggagcccaagacccgcctcctgagtatgacagtccggagaggcccacggagcttacctccaattccttcaacttccagaacaggctttgcagaattttccatgaggggacgcatgagggagaaattgcaagcagcgaggtccaaagcagaaagtgcattgctgcaggaaatccccactcctcggcccagacgcttacgaagtcccagtaagaaagaattggagactgaatttggcacagagccagggaaagaggtagaaaggactcaacaagaagttgactcccaaagttactcaagagtcaagttccatgattctgcacgaaaaatcaagcctaaaccccaggttccacctggcttcccttctgcagaagaggcctataacttctttactttcaactttgatcccgaaccagaaggatcagaggaaaaaccaaaagcaagacatagagcgggaactaatcaagaggaggaggaaggggaagaagaagaaccacctgcacaaggaggaggaaaggaaatggtatttaatatcaggatggtaatgaggtgtgggtggagggctaggaggaaaaagctgatgtccctgcaagaaagaaagtggctgaggagaaacctgccaccaccaggagaatgacactccacgtctgagttgaaatcccaagtactgaattcacatggctccctgtagctctgggttagaccctacaatgtggtaggaagaaccttgattaaacctgtttatttttcttttgtggaaaaaagaattaaataatgt

SEQ ID NO: 440909 - DNA, 2177 bp, Homo sapiens
cttaggaacgggttgctaagctggtgtttttgctccaagacatggctgcagcttcccagggaggagcccaggggcatctccaacactcagcctttccctccggacccttttaaaagattcaacagcaccgtctctctccacttccatcctagaatgcagaatctgcaaagtgccttttgtaaagtttcttaagggacccatcccagccaaaatgaatcccagggaagaaaaagtaaaaataattacagaggagttcattgaaaatgatgaggatgcagacatgggaagacagaataagaactcaaaggttcgaagacagccaagaaagaaacagccaccaactgctgtccccaaggaaatggtgtccgaaaaatcccaccttggcaacccccaggagcctgtgcaggaggagcccaagacccgcctcctgagtatgacagtccggagaggcccacggagcttacctccaattccttcaacttccagaacaggctttgcagaattttccatgaggggacgcatgagggagaaattgcaagcagcgaggtccaaagcagaaagtgcattgctgcaggaaatccccactcctcggcccagacgcttacgaagtcccagtaagaaagaattggagactgaatttggcacagagccagggaaagaggtagaaaggactcaacaagaagttgactcccaaagttactcaagagtcaagttccatgattctgcacgaaaaatcaagcctaaaccccaggttccacctggcttcccttctgcagaagaggcctataacttctttactttcaactttgatcccgaaccagaaggatcagaggaaaaaccaaaagcaagacatagagcgggaactaatcaagaggaggaggaaggggaagaagaagaaccacctgcacaaggaggaggaaaggaaatggatgaggaagaactgcttaatggtgatgatgccgaggacttcctattgggcttagatcacgtggctgacgattttgtagcagtcagacctgcagattatgaaagcatccatgatcggctgcagatggaaagagaaatgctcttcatacccagtaggcagacagtccctacatataaaaagcttcctgagaatgtacagcccaggttcctggaagatgaaggcctttacaccggggtaagaccagaggtggcacgcaccaatcagaacatcatggagaacagattgctgatgcaggaccccgaaagaagatggtttggagatgacggcaggatcctagctctgccaaaccccatcaagccatttccttcaaggccgccagtactaacacaggagcagagcattaaggcagagcttgaaacactgtataaaaaggctgtaaaatacgttcacagtagtcagcatgtgatcagatctggagaccctcctggaaatttccaactggacattgatatttcagggttaatcttcactcatcatccctgttttagccgagagcatgttttggcagccaagctggcccagttatatgaccagtaccttgcaagacaccagagaaacaaggcgaaatttcttactgataagctccaagctttaagaaatgctgttcagactggccttgatccagaaaaacctcatcagtctctcgataccatccaaaaaaccatcaatgagtataaatctgaaattcgacaaacaagaaaattccgtgatgctgaacaagaaaaagatagaacattgcttaagactatcataaaagtttggaaagagatgaaatcccttcgagagttccagagatttacaaatactcccttgaaacttgttttgagaaagtaggcttttttgaaaaattattttattgggctatatcatacattaagaaaaatgtataaaacatggatacagttttaaaagtaattacaaacaaatatgcatgtaaccacttcccaggttaagaaatagaacattgcatacctgagcagcccctcccaaataacattctcctcaatccccaaaataacaactacctagacttttgtgatcattgttttcttgcttttatacttttgccaactatgtgcaatctctaagaatatatagtttaatattgcctgtatttgacttatacataactgaaagtatgttgtgtgtattctttagggaatacatacatgcttcttttcttcagtac

SEQ ID NO: 440910 - DNA, 375 bp, Homo sapiens
gttactttttaacattatgcaggatgaggaagaactgcttaatggtgatgatgccgaggacttcctattgggcttagatcacgtggctgacgattttgtagcagtcagacctgcagattatgaaagcatccatgatcggctgcagatggaaagagaaatgctcttcatacccagtaggcagacaggtacttgctctttttattttcttgttcagcttagacatcgtcacttaccttgtcatgaaatatggctagtgtataaggatgcctcatctccagaactgattccagtttctaatctaacaatcaagaaatatcttcaaacaaacaaaaaaaacacaacatggaaaaatatccattcaacaaacacttattg

SEQ ID NO: 440911 - DNA, 333 bp, Homo sapiens
tttttattttgttttgtttttgtttttgttttttaggcttacctccaattccttcaacttccagaacaggctttgcagaattttccatgaggggacgcatgagggagaaattgcaagcagcgagggtgagagaaaccacatgaatattctgttcagtgctgattgcaatcttccagggcttgtctagcttactttttatgctccaaactgcatggatttgaataccattcaatttgtctttcaagttttaaatgttaatgtcttattttgcattggcacagatgaaaattatgcttcagaatttaatgtcacttttctgaaccattttccttg

SEQ ID NO: 440912 - DNA, 5141 bp, Homo sapiens
  misc_feature (3413)..(3413): n is a, c, g, or t
  misc_feature (4067)..(4067): n is a, c, g, or t
  misc_feature (4606)..(4606): n is a, c, g, or t
cttaggaacgggttgctaagctggtgtttttgctccaagacatggctgcagcttcccagggaggagcccaggggcatctccaacactcagcctttccctccggacccttttaaaagattcaacagcaccgtctctctccacttccatcctagaatgcagaatctgcaaagtgccttttgtaaagtttcttaagggacccatcccagccaaaatgaatcccagggaagaaaaagtaaaaataattacagaggagttcattgaaaatgatgaggatgcagacatgggaagacagaataagaactcaaaggttcgaagacagccaagaaagaaacagccaccaactgctgtccccaaggaaatggtgtccgaaaaatcccaccttggcaacccccaggagcctgtgcaggaggagcccaagacccgcctcctgagtatgacagtccggagaggcccacggagcttacctccaattccttcaacttccagaacaggctttgcagaattttccatgaggggacgcatgagggagaaattgcaagcagcgaggtccaaagcagaaagtgcattgctgcaggaaatccccactcctcggcccagacgcttacgaagtcccagtaagaaagaattggagactgaatttggcacagagccagggaaagaggtagaaaggactcaacaagaagttgactcccaaagttactcaagagtcaagttccatgattctgcacgaaaaatcaagcctaaaccccaggttccacctggcttcccttctgcagaagaggcctataacttctttactttcaactttgatcccgaaccagaaggatcagaggaaaaaccaaaagcaagacatagagcgggaactaatcaagaggaggaggaaggggaagaagaagaaccacctgcacaaggaggaggaaaggaaatggatgaggaagaactgcttaatggtgatgatgccgaggacttcctattgggcttagatcacgtggctgacgattttgtagcagtcagacctgcagattatgaaagcatccatgatcggctgcagatggaaagagaaatgctcttcatacccagtaggcagacagtccctacatataaaaagcttcctgagaatgtacagcccaggttcctggaagatgaaggcctttacaccggggtaagaccagaggtggcacgcaccaatcagaacatcatggagaacagattgctgatgcaggaccccgaaagaagatggtttggagatgacggcaggatcctagctctgccaaaccccatcaagccatttccttcaaggccgccagtactaacacaggagcagagcattaaggcagagcttgaaacactgtataaaaaggctgtaaaatacgttcacagtagtcagcatgtgatcagatctggagaccctcctggaaatttccaactggacattgatatttcagggttaatcttcactcatcatccctgttttagccgagagcatgttttggcagccaagctggcccagttatatgaccagtaccttgcaagacaccagagaaacaaggcgaaatttcttactgataagctccaagctttaagaaatgctgttcagactggccttgatccagaaaaacctcatcagtctctcgataccatccaaaaaaccatcaatgagtataaatctgaaattcgacaaacaagaaaattccgtgatgctgaacaagaaaaagatagaacattgcttaagactatcataaaagtttggaaagagatgaaatcccttcgagagttccagagatttacaaatactcccttgaaacttgttttgagaaaggaaaaagctgaccagaaagcagatgaagaagcatatgaagcagaaattcaagctgaaataagtgaactgttagaagagcacacggaggagtacgcacagaagatggaagaatacagaacgtcgttacaacagtggaaggcctggaggaaagtgcaaagggccaagaagaagaaaaggaaacaagcagcagaagaacatcccggtgatgagattgcagagccgtatcccgaggaggaccttgtgaagcccagccctccagagcccactgatcgggcagtgatagagcaggaggtgagggagagagcagcccagagcaggaggaggccttgggagcccacgctggtcccggagctaagcctggcaggaagcgtaacacccaatgaccagtgccccagagcggaggtctcgagaagggaggatgtaaagaagcgctcagtgtacttaaaagtgctgttcaacaacaaggaggtgtccaggacagtcagtcggccactaggagcagacttccgagttcactttgggcagattttcaatttgcaaatagtcaactggccggagagtttaacacttcaggtctatgaaactgtcggacacagtagtcccaccttgctagcagaagtgtttctgcctattcctgagactactgttgtcactggaagggctcctactgaagaagtggagtttagcagtaatcagcatgtgacactggaccacgagggagttggaagtggagtgcccttctcatttgaagctgatggcagtaaccagctgactctgatgacctcagggaaagtgtctcatagtgtggcatgggccattggagaaaacgggatacctttaattcctccattgtcacagcagaacatcggatttcggagtgctttgaagaaagcagatgccatctcatctattggcacatcaggactgacagacatgaaaaaattggccaagtgggcagcagagtccaagctcgacccaaatgaccccaacaatgcccctttgatgcagcttatctcggttgctaccagtggtgaatcctatgtccctgatttctttagactggagcagctgcaacaggagtttaactttgtttcagatcaagaattaaatagatccaaacgatttaggcttcttcatcttagaagccaagaggtgccagaattccgaaattataagcaagttccagtctatgaccgagaaattatggaaaaggtattccaggactatgagaaacggttacgagacagaaatgtaatagaaaccaaggaacacatagacacccatagggccatagtagccaagtacctccagcaggttagagaatcagtgataaatcgtttcttaattgcaaaacaatattttcttcttgctgatatgatagtagaagaagaagttcccaatatcagcattttgggcctaagccttttcaagctggcagaacaaaagcgaccactgcggccaaggagaaaaggtcggaagaaggtgacagcccaaaacctgtctgatggagacataaagctgctggtgaacattgtgcgagcttacgacattccagtgaggaagccggcagtgagcaaattccagcagccgtcgnggtcttcaaggatgttcagtgaaaagcatgctgcttccccaagcacgtacagcccaacccacaatgctgactaccccctcggccaggttttagtacgtccctttgtagaagtctcttttcaacgaacagtttgccatacgactacggctgaaggaccaaaccctagctggaatgaagaactagaacttccatttagggctcctaatggagattatagcacagccagtctgcagtcagtgaaagatgttgtgttcattaacatttttgatgaagtactgcatgatgtcttagaggatgaccgtgaaagaggaagtggaatccatactcgtattgagagacactggctgggatgtgtgaaaatgccatttagcacaatatatttccaagcaaggattgatggaacatttaaaatagatattcccccagttcttctgggctacagtaaggagcgaaatatgattcttgagcgggggttttgattctgtccgaagcttaaagtgaaggctcctacattaccctctttattaccattgagccccagctggttcctggagagtccattcgagaaaagtttgagtctcaggaagatgagaaattacttcaagcaactgagaagtttcaagctgaatgtgccttaaagtttccaaatcgtcngtgccttacaacagtaattgatataagcggaaaaactgtttttatcacacgttatctcaaacctttaaaccctcctcaggagctccttaatgtctaccccaataatctacaggcaactgcagaactggtggctcgatatgtgtccttgattcccttcttgcctgacactgtctcatttggtggtatctgtgacctctggagcacatctgatcaatttcttgatctcctggcaggggatgaagaagaacatgcagtactattgtgtaattactttctgtctctgggtaagaaggcctggctgttgatgggcaatgctattcctgagggtccaactgcctatgtgctaacttgggagcaaggtcgttatttaatatggaatccctgcagtggacatttttatggacaatttgatacattctgtcccttgaaaaatgtgggctgtttaataggtcctgacaatgcccaagctatggaaatctttcttttcaagaagccttccatatcctggcctttccagtgttcagcctgaagagctaatntaccagcgctcagacaaagcagctgcagctgagctacaagacaggattgaaaaaatactaaaagaaaaaatcatggactggaggccacgccatctgactcggtggaataggtattgtacctctactctgcgtcacttcttgcctctgttagaaaaaagtcaaggagaagatgtagaagatgaccacagagcagaactgctaaaacagctgggagactacaggttctctggatttcctcttcacatgccttattctgaagtgaagcctttaattgacgctgtgtatagtactggagtacataatattgatgttcctaatgttgaatttgctttagctgtatacatacacccataccccaaaaatgttttgtctgtttggatctatgttgcctctcttatacgcaacaggtaatttttttcactgtactttctgtatcatgtaaaaactacacttaggatatgagaaaattttaaattatatgcatcacatcagaagaacatattattggcaaataataaaattatcaactgttttc

SEQ ID NO: 440913 - DNA, 1529 bp, Homo sapiens
cttaggaacgggttgctaagctggtgtttttgctccaagacatggctgcagcttcccagggaggagcccaggggcatctccaacactcagcctttccctccggacccttttaaaagattcaacagcaccgtctctctccacttccatcctagaatgcagaatctgcaaagtgccttttgtaaagtttcttaagggacccatcccagccaaaatgaatcccagggaagaaaaagtaaaaataattacagaggagttcattgaaaatgatgaggatgcagacatgggaagacagaataagaactcaaaggttcgaagacagccaagaaagaaacagccaccaactgctgtccccaaggaaatggtgtccgaaaaatcccaccttggcaacccccaggagcctgtgcaggaggagcccaagacccgcctcctgagtatgacagtccggagaggcccacggagagagctggttgttaaaaagagcctgggcaggccaggcacggtgactcacgtctgtaatcccagcactttggaaggccgaggcgggtaaatcacctgaggttgggagttcaagaccagcctgaccaacatggagaaaccccatctctactaaaaatacaaaaaaattagccaggcgtggtggcgcatgcctgtaatcccagctacttgggaggctgaggcatgagaattgcttgaacctgggaggtggaggttgcagtgagccgagatcggagcactgcactccagcctaggcaacagagcaagactccatctcagaaaacaaacaaacaaaaaagagcctggaacctcctcccctctctcttgctccctctctcaccatgcgacacacctgtttccccttccccttctgacataagtgaaagcttcctaaggcctcaccagaggcagatgctggcaccatgcttattgcacagtctgcagaacagtgagccaaaataaacctcttttctttataaattacccagtctcagatattcctttatagcaatgcaaaatggactaacaatacataagttagggagtgttaattagaatggaaattaaatatgcagaaactcaaaggaagatgaaattgttagggaagacatatgtgttaacctagtgaggcttgaatcagatgtttggaagaaatgagggaggtttctgaggctcctggtgaccttgccattgaggacacatatacttctccccctacacacgccttttcttcttccccagtacaatgaacattaggaattacctgctcattgtagggaaaatgaccacccttcaggcattgcttttcatgaaaagtggattagacaagaggagaagtggttacactttttaattgttacataattgttagactgttttccctatggcaaagttgggaaataagtaactgttggaaactagaggcctttggaagcaagtagactcttagattggaaaaatgtggttctaatctaaaagcaatgatacaatgagagctgttatgaattaataaaaacagaaccaaaatttaaaca

SEQ ID NO: 440914 - DNA, 1639 bp, Homo sapiens
cttaggaacgggttgctaagctggtgtttttgctccaagacatggctgcagcttcccagggaggagcccaggggcatctccaacactcagcctttccctccggacccttttaaaagattcaacagcaccgtctctctccacttccatcctagaatgcagaatctgcaaagtgccttttgtaaagtttcttaagggacccatcccagccaaaatgaatcccagggaagaaaaagtaaaaataattacagaggagttcattgaaaatgatgaggatgcagacatgggaagacagaataagaactcaaaggttcgaagacagccaagaaagaaacaggcagaagccaactcctttctcccgagcctgctggcagatcctcccccacctctccgcaggagttcccctcctaggctgggagcatcccgtgcagggtaaatcttttcaagccaccaactgctgtccccaaggaaatggtgtccgaaaaatcccaccttggcaacccccaggagcctgtgcaggaggagcccaagacccgcctcctgagtatgacagtccggagaggcccacggagagagctggttgttaaaaagagcctgggcaggccaggcacggtgactcacgtctgtaatcccagcactttggaaggccgaggcgggtaaatcacctgaggttgggagttcaagaccagcctgaccaacatggagaaaccccatctctactaaaaatacaaaaaaattagccaggcgtggtggcgcatgcctgtaatcccagctacttgggaggctgaggcatgagaattgcttgaacctgggaggtggaggttgcagtgagccgagatcggagcactgcactccagcctaggcaacagagcaagactccatctcagaaaacaaacaaacaaaaaagagcctggaacctcctcccctctctcttgctccctctctcaccatgcgacacacctgtttccccttccccttctgacataagtgaaagcttcctaaggcctcaccagaggcagatgctggcaccatgcttattgcacagtctgcagaacagtgagccaaaataaacctcttttctttataaattacccagtctcagatattcctttatagcaatgcaaaatggactaacaatacataagttagggagtgttaattagaatggaaattaaatatgcagaaactcaaaggaagatgaaattgttagggaagacatatgtgttaacctagtgaggcttgaatcagatgtttggaagaaatgagggaggtttctgaggctcctggtgaccttgccattgaggacacatatacttctccccctacacacgccttttcttcttccccagtacaatgaacattaggaattacctgctcattgtagggaaaatgaccacccttcaggcattgcttttcatgaaaagtggattagacaagaggagaagtggttacactttttaattgttacataattgttagactgttttccctatggcaaagttgggaaataagtaactgttggaaactagaggcctttggaagcaagtagactcttagattggaaaaatgtggttctaatctaaaagcaatgatacaatgagagctgttatgaattaataaaaacagaaccaaaatttaaaca

SEQ ID NO: 440915 - DNA, 1090 bp, Homo sapiens
cttaggaacgggttgctaagctggtgtttttgctccaagacatggctgcagcttcccagggaggagcccaggggcatctccaacactcagcctttccctccggacccttttaaaagattcaacagcaccgtctctctccacttccatcctagaatgcagaatctgcaaagtgccttttgtaaagtttcttaagggacccatcccagccaaaatgaatcccagggaagaaaaagtaaaaataattacagaggagttcattgaaaatgatgaggatgcagacatgggaagacagaataagaactcaaaggttcgaagacagccaagaaagaaacaggcagaagccaactcctttctcccgagcctgctggcagatcctcccccacctctccgcaggagttcccctcctaggctgggagcatcccgtgcagggtaaatcttttcaagccaccaactgctgtccccaaggaaatggtgtccgaaaaatcccaccttggcaacccccaggagcctgtgcaggaggagcccaagacccgcctcctgagtatgacagtccggagaggcccacggaagagctggttgttaaaaagagcctgggattacaggcgtgagccaccgcgcctggccaaaacaacattttaagtagaagatccaggttttagtgcagcttctgccgttaactaggcttaataaatcacaaccttggggccacagttgccttatatgtcaactgaacgtgtttagaatacacatagttaaatttccttatttttcccttggtggctgccctgtggaaaccgtttagaatattggtaagtgtgtaggaacctagtagtgtaagtatacctgggtgttccacagctgatcagtgattgccttgaaataaattcaagggcaatttattcatttttactagggagatagaactttacagcaatcagatatttggtccatatccaggttagctggtaagaggattatgggagaaaaaatggtagtagaagttattctaattccggatggaataaaaccatttgagtagtgtatcatgtgaaaagaggtggatatctgtgaagtgccatctgtgtacaac

SEQ ID NO: 440916 - DNA, 1787 bp, Homo sapiens
ggcggaagtgggaagccgaggtctgaattgcgcgtggtggccatggcggccagcggggctgtggaaccagggcccccgggggctgccgtcgccccgtcgcccgccccggccccgccgcctgcccctgatcacctgttccggcccatcagcgccgaggacgaggagcagcagcccaccgagatcgagtcgctatgcatgaactgttactgcaatggcatgacgcgcctcctgctcaccaagattcccttcttcagagaaataatagtgagctccttttcctgcgagcactgtggctggaacaacacggagatccagtcggcaggcaggatccaggaccagggagtgcgctacactttgtctgtcagggctctggaggacatgaacagagaagtggtgaagactgactctgctgccacaaggattcctgagctagattttgaaattcctgcctttagccagaaaggagctctgaccactgttgaaggattgatcacccgtgctatctctggcctggagcaggaccagcctgcacgaagggcaaacaaagatgctacagctgaaagaattgatgagttcattgtcaaactgaaggagctaaagcaagtagcctcccctttcactctgatcattgatgatccctcagggaacagttttgtggaaaacccacatgctcctcagaaagatgatgccctggtgatcacacactacaaccggacccgacagcaggaagagatgctggggcttcaagaagaagcaccagcagagaagccagaagaggaagatctcagaaatgaagtgctccagttcagcacaaactgcccagaatgcaatgcccccgctcagaccaacatgaagctagtacaaatccctcactttaaggaggttatcatcatggctaccaactgcgagaactgtgggcatcggaccaatgaggtgaaatctggaggagcagtagaacccttgggcaccaggatcaccctccacatcacagatgcctcagatatgaccagagacctcctcaagtctgagacttgcagtgtggaaatcccagagctagaatttgaactgggaatggcagtcctcgggggcaagttcaccacactggaagggctgctgaaagacatccgggaactggtgaccaaaaatcctttcacactgggcgacagttccaatcctggacagacggagagactacaggagtttagccagaagatggaccagatcatcgaaggtaacatgaaggcccactttattatggatgatccagcaggaaacagttacttgcagaatgtgtatgcgcctgaagatgatcctgagatgaaggtggagcgttacaagcgcacctttgaccaaaatgaggagctagggctcaatgacatgaagacagagggctatgaggcaggcctggctccgcaacggtagcagtgggtggctcaagggccagcctccagcgctgctctttctgtaggttatttattagtattggatgaaggcgaaggctgggagtgtctttcccaccagcccttgcccatggtggggaggacatctggtctgagtcagagatctgtgcacactttctaaacagcttgtgatgcaagtgtgagcctattgtgttacttgaccttattttggaagttttgaattggcctaggaggaaacccagaaatgaaccaggggtatgtcatcacttttttcatatcaagtcctcaccctccttccacataatgctctatcctctaaggttggaactctgaagttggagaaggtggaataaagttacacctgga

SEQ ID NO: 440917 - DNA, 1837 bp, Homo sapiens
ggcggaagtgggaagccgaggtctgaattgcgcgtggtggccatggcggccagcggggctgtggaaccagggcccccgggggctgccgtcgccccgtcgcccgccccggccccgccgcctgcccctgatcacctgttccggcccatcagcgccgaggacgaggagcagcagcccaccgagatcgagtcgctatgcatgaactgttactgcaatggcatgacgcgcctcctgctcaccaagattcccttcttcagagaaataatagtgagctccttttcctgcgagcactgtggctggaacaacacggagatccagtcggcaggcaggatccaggaccagggagtgcgctacactttgtctgtcagggctctggaggacatgaacagagaagtggtgaagactgactctgctgccacaaggattcctgagctagattttgaaattcctgcctttagccagaaaggagctctgaccactgttgaaggattgatcacccgtgctatctctggcctggagcaggaccagcctgcacgaagggcaaacaaagatgctacagctgaaagaattgatgagttcattgtcaaactgaaggagctaaagcaagtagcctcccctttcactctgatcattgatgatccctcagggaacagttttgtggaaaacccacatgctcctcagaaagatgatgccctggtgatcacacactacaaccggacccgacagcaggaagagatgctggggcttcaagaagaagcaccagcagagaagccagaagaggaagatctcagaaatgaagtgctccagttcagcacaaactgcccagaatgcaatgcccccgctcagaccaacatgaagctagtacatggtggtcttgttcgcctggaagtagatttccttaactccgttttccagaaatccctcactttaaggaggttatcatcatggctaccaactgcgagaactgtgggcatcggaccaatgaggtgaaatctggaggagcagtagaacccttgggcaccaggatcaccctccacatcacagatgcctcagatatgaccagagacctcctcaagtctgagacttgcagtgtggaaatcccagagctagaatttgaactgggaatggcagtcctcgggggcaagttcaccacactggaagggctgctgaaagacatccgggaactggtgaccaaaaatcctttcacactgggcgacagttccaatcctggacagacggagagactacaggagtttagccagaagatggaccagatcatcgaaggtaacatgaaggcccactttattatggatgatccagcaggaaacagttacttgcagaatgtgtatgcgcctgaagatgatcctgagatgaaggtggagcgttacaagcgcacctttgaccaaaatgaggagctagggctcaatgacatgaagacagagggctatgaggcaggcctggctccgcaacggtagcagtgggtggctcaagggccagcctccagcgctgctctttctgtaggttatttattagtattggatgaaggcgaaggctgggagtgtctttcccaccagcccttgcccatggtggggaggacatctggtctgagtcagagatctgtgcacactttctaaacagcttgtgatgcaagtgtgagcctattgtgttacttgaccttattttggaagttttgaattggcctaggaggaaacccagaaatgaaccaggggtatgtcatcacttttttcatatcaagtcctcaccctccttccacataatgctctatcctctaaggttggaactctgaagttggagaaggtggaataaagttacacctgga

SEQ ID NO: 440918 - DNA, 1739 bp, Homo sapiens
ggcggaagtgggaagccgaggtctgaattgcgcgtggtggccatggcggccagcggggctgtggaaccagggcccccgggggctgccgtcgccccgtcgcccgccccggccccgccgcctgcccctgatcacctgttccggcccatcagcgccgaggacgaggagcagcagcccaccgagatcgagtcgctatgcatgaactgttactgcaatggcatgacgcgcctcctgctcaccaagattcccttcttcagagaaataatagtgagctccttttcctgcgagcactgtggctggaacaacacggagatccagtcggcaggcaggatccaggaccagggagtgcgctacactttgtctgtcagggctctggaggacatgaacagagaagtggtgaagactgactctgctgccacaaggattcctgagctagattttgaaattcctgcctttagccagaaaggagctctgaccactgttgaaggattgatcacccgtgctatctctggcctggagcaggaccagcctgcacgaagggcaaacaaagatgctacagctgaaagaattgatgagttcattgtcaaactgaaggagctaaagcaagtagcctcccctttcactctgatcattgatgatccctcagggaacagttttgtggaaaacccacatgctcctcagaaagatgatgccctggtgatcacacactacaaccggacccgacagcaggaagagatgctggggcttcaagtgctccagttcagcacaaactgcccagaatgcaatgcccccgctcagaccaacatgaagctagtacaaatccctcactttaaggaggttatcatcatggctaccaactgcgagaactgtgggcatcggaccaatgaggtgaaatctggaggagcagtagaacccttgggcaccaggatcaccctccacatcacagatgcctcagatatgaccagagacctcctcaagtctgagacttgcagtgtggaaatcccagagctagaatttgaactgggaatggcagtcctcgggggcaagttcaccacactggaagggctgctgaaagacatccgggaactggtgaccaaaaatcctttcacactgggcgacagttccaatcctggacagacggagagactacaggagtttagccagaagatggaccagatcatcgaaggtaacatgaaggcccactttattatggatgatccagcaggaaacagttacttgcagaatgtgtatgcgcctgaagatgatcctgagatgaaggtggagcgttacaagcgcacctttgaccaaaatgaggagctagggctcaatgacatgaagacagagggctatgaggcaggcctggctccgcaacggtagcagtgggtggctcaagggccagcctccagcgctgctctttctgtaggttatttattagtattggatgaaggcgaaggctgggagtgtctttcccaccagcccttgcccatggtggggaggacatctggtctgagtcagagatctgtgcacactttctaaacagcttgtgatgcaagtgtgagcctattgtgttacttgaccttattttggaagttttgaattggcctaggaggaaacccagaaatgaaccaggggtatgtcatcacttttttcatatcaagtcctcaccctccttccacataatgctctatcctctaaggttggaactctgaagttggagaaggtggaataaagttacacctgga

SEQ ID NO: 440919 - DNA, 1772 bp, Homo sapiens
cccggttatttcatcacggcgtggcgttcagtgcttagttacgtgtctggtgcctgcacttcacaggctagcgtcgccccagacgccagcctaggcacgcgagctagccctgatcacctgttccggcccatcagcgccgaggacgaggagcagcagcccaccgagatcgagtcgctatgcatgaactgttactgcaatggcatgacgcgcctcctgctcaccaagattcccttcttcagagaaataatagtgagctccttttcctgcgagcactgtggctggaacaacacggagatccagtcggcaggcaggatccaggaccagggagtgcgctacactttgtctgtcagggctctggaggacatgaacagagaagtggtgaagactgactctgctgccacaaggattcctgagctagattttgaaattcctgcctttagccagaaaggagctctgaccactgttgaaggattgatcacccgtgctatctctggcctggagcaggaccagcctgcacgaagggcaaacaaagatgctacagctgaaagaattgatgagttcattgtcaaactgaaggagctaaagcaagtagcctcccctttcactctgatcattgatgatccctcagggaacagttttgtggaaaacccacatgctcctcagaaagatgatgccctggtgatcacacactacaaccggacccgacagcaggaagagatgctggggcttcaagaagaagcaccagcagagaagccagaagaggaagatctcagaaatgaagtgctccagttcagcacaaactgcccagaatgcaatgcccccgctcagaccaacatgaagctagtacaaatccctcactttaaggaggttatcatcatggctaccaactgcgagaactgtgggcatcggaccaatgaggtgaaatctggaggagcagtagaacccttgggcaccaggatcaccctccacatcacagatgcctcagatatgaccagagacctcctcaagtctgagacttgcagtgtggaaatcccagagctagaatttgaactgggaatggcagtcctcgggggcaagttcaccacactggaagggctgctgaaagacatccgggaactggtgaccaaaaatcctttcacactgggcgacagttccaatcctggacagacggagagactacaggagtttagccagaagatggaccagatcatcgaaggtaacatgaaggcccactttattatggatgatccagcaggaaacagttacttgcagaatgtgtatgcgcctgaagatgatcctgagatgaaggtggagcgttacaagcgcacctttgaccaaaatgaggagctagggctcaatgacatgaagacagagggctatgaggcaggcctggctccgcaacggtagcagtgggtggctcaagggccagcctccagcgctgctctttctgtaggttatttattagtattggatgaaggcgaaggctgggagtgtctttcccaccagcccttgcccatggtggggaggacatctggtctgagtcagagatctgtgcacactttctaaacagcttgtgatgcaagtgtgagcctattgtgttacttgaccttattttggaagttttgaattggcctaggaggaaacccagaaatgaaccaggggtatgtcatcacttttttcatatcaagtcctcaccctccttccacataatgctctatcctctaaggttggaactctgaagttggagaaggtggaataaagttacacctgga

SEQ ID NO: 440920 - DNA, 1702 bp, Homo sapiens
tggtactggtgttgtcatcagctcaagtgagataagatttgtgaaaatgctttgtaaatgttgtctgagggtatgaaatgagcagtagttgttatgaatagtattctcaccatttggacagcctggctcacaccacctgtactattcgaaaggagcagtctggaccctgtggagtggcgagagggagagacagctgggctgcggtctgatggaaggggacggtctggttattacttgaggagaagctgttctgcagtctctttgtactgaacgtattcttttcttcccaggacatgaacagagaagtggtgaagactgactctgctgccacaaggattcctgagctagattttgaaattcctgcctttagccagaaaggagctctgaccactgttgaaggattgatcacccgtgctatctctggcctggagcaggaccagcctgcacgaagggcaaacaaagatgctacagctgaaagaattgatgagttcattgtcaaactgaaggagctaaagcaagtagcctcccctttcactctgatcattgatgatccctcagggaacagttttgtggaaaacccacatgctcctcagaaagatgatgccctggtgatcacacactacaaccggacccgacagcaggaagagatgctggggcttcaagaagaagcaccagcagagaagccagaagaggaagatctcagaaatgaagtgctccagttcagcacaaactgcccagaatgcaatgcccccgctcagaccaacatgaagctagtacaaatccctcactttaaggaggttatcatcatggctaccaactgcgagaactgtgggcatcggaccaatgaggtgaaatctggaggagcagtagaacccttgggcaccaggatcaccctccacatcacagatgcctcagatatgaccagagacctcctcaagtctgagacttgcagtgtggaaatcccagagctagaatttgaactgggaatggcagtcctcgggggcaagttcaccacactggaagggctgctgaaagacatccgggaactggtgaccaaaaatcctttcacactgggcgacagttccaatcctggacagacggagagactacaggagtttagccagaagatggaccagatcatcgaaggtaacatgaaggcccactttattatggatgatccagcaggaaacagttacttgcagaatgtgtatgcgcctgaagatgatcctgagatgaaggtggagcgttacaagcgcacctttgaccaaaatgaggagctagggctcaatgacatgaagacagagggctatgaggcaggcctggctccgcaacggtagcagtgggtggctcaagggccagcctccagcgctgctctttctgtaggttatttattagtattggatgaaggcgaaggctgggagtgtctttcccaccagcccttgcccatggtggggaggacatctggtctgagtcagagatctgtgcacactttctaaacagcttgtgatgcaagtgtgagcctattgtgttacttgaccttattttggaagttttgaattggcctaggaggaaacccagaaatgaaccaggggtatgtcatcacttttttcatatcaagtcctcaccctccttccacataatgctctatcctctaaggttggaactctgaagttggagaaggtggaataaagttacacctgga

SEQ ID NO: 440921 - DNA, 327 bp, Homo sapiens
ctttggttggggctttactttgtggtttctctaactgatgaggtggcacctgacataactgatgaggtggcacctgagcatttctcccactccagggcagggtgttggggacactgaggtatacctgccaacttgcgacctgcatctttgctattttaggaagaagcaccagcagagaagccagaagaggaagatctcagaaatgaagtgagtcacattggctactggtgaggaaggagcagagttgtgggctgagactgatgctgttcagcatctgtcttccttgtcaccaacatagatgaccactagcataccaactgagtgtct

SEQ ID NO: 440922 - DNA, 305 bp, Homo sapiens
cctttggttggggctttactttgtggtttctctaactgatgaggtggcacctgacataactgatgaggtggcacctgagcatttctcccactccagggcagggtgttggggacactgaggtatacctgccaacttgcgacctgcatctttgctattttaggaagaagcaccagcagagaagccagaagaggaagatctcagaaatgaagtgagtcacattggctactggtgaggaaggagcagagttgtgggctgagactgatgctgttcagcatctgtcttccttgtcaccaacatagatgacc

SEQ ID NO: 440923 - DNA, 232 bp, Homo sapiens
gttgggaacttgccctcttctggaggactctgtgggctgcctcttgtgaatatttcctgcagttctgggaccagcatatgtttgtgtggggtttggctttgtttttccccagatggtggtcttgttcgcctggaagtagatttccttaactccgttttccagaaatccctcactttaaggaggttatcatcatggctaccaactgcgagaactgtgggcatcggaccaatga

SEQ ID NO: 440924 - DNA, 414 bp, Homo sapiens
gcggccgcgagcggcgggtgggtagggcttgtgccgggacgagccgggggtcagacccagccaggtgggcccggccggggaccccgaggagcgcccggagatagtagggcggggaaagggagtttcattgatttttttccttagctactttctacttcaccagggcatgacgcgcctcctgctcaccaagattcccttcttcagagaaataatagtgagctccttttcctgcgagcactgtggctggaacaacacggagatccagtcggcaggcaggatccaggaccagggagtgcgctacactttgtctgtcagggctctggaggtgagaggacctcagagcaggtacctcagtattctagagagagattcggtactggggtcagagctctggtccaggcggtcggatcttaa

SEQ ID NO: 440925 - DNA, 2826 bp, Homo sapiens
ggcggaagtgggaagccgaggtctgaattgcgcgtggtggccatggcggccagcggggctgtggaaccagggcccccgggggctgccgtcgccccgtcgcccgccccggccccgccgcctgcccctgatcacctgttccggcccatcagcgccgaggacgaggagcagcagcccaccgagatcgagtcgctatgcatgaactgttactgcaatggcatgacgcgcctcctgctcaccaagattcccttcttcagagaaataatagtgagctccttttcctgcgagcactgtggctggaacaacacggagatccagtcggcaggcaggatccaggaccagggagtgcgctacactttgtctgtcagggctctggaggacatgaacagagaagtggtgaagactgactctgctgccacaaggattcctgagctagattttgaaattcctgcctttagccagaaaggagctctgaccactgttgaaggattgatcacccgtgctatctctggcctggagcaggaccagcctgcacgaagggcaaacaaagatgctacagctgaaagaattgatgagttcattgtcaaactgaaggagctaaagcaagtagcctcccctttcactctgatcattgatgatccctcagggaacagttttgtggaaaacccacatgctcctcagaaagatgatgccctggtgatcacacactacaaccggacccgacagcaggaagagatgctggggcttcaagaagaagcaccagcagagaagccagaagaggaagatctcagaaatgaagtgctccagttcagcacaaactgcccagaatgcaatgcccccgctcagaccaacatgaagctagtacaaatccctcactttaaggaggttatcatcatggctaccaactgcgagaactgtgggcatcggaccaatgaggtgaaatctggaggagcagtagaacccttgggcaccaggatcaccctccacatcacagatgcctcagatatgaccagagacctcctcaagtctgagacttgcagtgtggaaatcccagagctagaatttgaactgggaatggcagtcctcgggggcaagttcaccacactggaagggctgctgaaagacatccgggaactggtgaccaaaaatcctttcacactgggcgacagttccaatcctggacagacggagagactacaggagtttagccagaagatggaccagatcatcgaaggtaacatgaaggcccactttattatggatgatccagcaggaaacagttacttgcagaatgtgtatgcgcctgaagatgatcctgagatgaaggtggagcgttacaagcgcacctttgaccaaaatgaggagctagggctcaatgacatgaagacagagggctatgaggcaggcctggctccgcaacggtagcagtgggtggctcaagggccagcctccagcgctgctctttctgtaggttatttattagtattggatgaaggcgaaggctgggagtgtctttcccaccagcccttgcccatggtggggaggacatctggtctgagtcagagatctgtgcacactttctaaacagcttgtgatgcaagtgtgagcctattgtgttacttgaccttattttggaagttttgaattggcctaggaggaaacccagaaatgaaccaggggtatgtcatcacttttttcatatcaagtcctcaccctccttccacataatgctctatcctctaaggttggaactctgaagttggagaaggtggaataaagttacacctggagtttgttgttggttttgagtatataaaatactgactttgaacaggaaaggagtctcctgaggggagaccgagtccagcacaagtgaaggagttaccattgaaatgatgactttcaaacagcactggcctctgtattgaccctatccttgtttgatatcatgctgttagaattcagcctcctaaagaaaattttcccgtgtatctactgtaatttggggattgcagctggcatttaattcattccttcagcagatgcttgcttatctactttatgccaagcacaccacagaacagaggacaaaataaatctctttcatggaacttgaagtctagtggggaaaaatgacaataaacagatgaggaaaacagtacatcagatggtgattagtgtcatggaggaatgtaaagcagggaatggggctgggttgtgcaaggaaatggggagtagggaagatcttctgaacaagaaggtgataatttgacatttgggcaaagctgaggaggaggtcagggagtgagctgtgtgggtatctgggggaagagatttcctggcagagggaactgcaaatgctagagctgtgaggttagagccagtgggggtacctgatcagttagccctactctcagttagaaatgttgaaacacattcatccagagagaaaggaggctctctgcagttcttctgaaagttaaggaccagtgaacactctgctgcttgggccctggacttcccagccagtgttctttgcactgtagtctcctgcctctcataaacaaaaggtgactcctgtggtgcagactgcagggtatttgttcaataaagaccagttcattgattaggaaaaaaaaaaaaaaaaaaaaaaaaaaaaaaatttttggggcggccctgtgggccccttggaaaagagctttttgaagaaccattcgcggtggggggcggcgggggccccagtggggttagcgtggaacacaggtggggccaaagagggtgttccccagagaggagagacaccgggggccaagagacaagagcggcgga

SEQ ID NO: 440926 - DNA, 1287 bp, Homo sapiens
ggcggaagtgggaagccgaggtctgaattgcgcgtggtggccatggcggccagcggggctgtggaaccagggcccccgggggctgccgtcgccccgtcgcccgccccggccccgccgcctgcccctgatcacctgttccggcccatcagcgccgaggacgaggagcagcagcccaccgagatcgagtcgctatgcatgaactgttactgcaatggcatgacgcgcctcctgctcaccaagattcccttcttcagagaaataatagtgagctccttttcctgcgagcactgtggctggaacaacacggagatccagtcggcaggcaggatccaggaccagggagtgcgctacactttgtctgtcagggctctggaggacatgaacagagaagtggtgaagactgactctgctgccacaaggattcctgagctagattttgaaattcctgcctttagccagaaaggagctctgaccactgttgaaggattgatcacccgtgctatctctggcctggagcaggaccagcctgcacgaagggcaaacaaagatgctacagctgaaagaattgatgagttcattgtcaaactgaaggagctaaagcaagtagcctcccctttcactctgatcattgatgatccctcagggaacagttttgtggaaaacccacatgctcctcagaaagatgatgccctggtgatcacacactacaaccggacccgacagcaggaagagatgctggggcttcaagaagaagcaccagcagagaagccagaagaggaagatctcagaaatgaagtgctccagttcagcacaaactgcccagaatgcaatgcccccgctcagaccaacatgaagctagtacaaatccctcactttaaggaggttatcatcatggctaccaactgcgagaactgtgggcatcggaccaatgaggtgaaatctggaggagcagtagaacccttgggcaccaggatcaccctccacatcacagatgcctcagatatgaccagagacctcctcaagtctgagacttgcagtgtggaaatcccagagctagaatttgaactgggaatggcagtcctcgggggcaagttcaccacactggaagggctgctgaaagacatccgggaactggtgaccaaaaatcctttcacactgggcgacagttccaatcctggacagacggagagactacaggagtttagccagaagatggaccagatcatcgaaggtaacatgagcccactttattatggatgtccgacgaccgagatctgtagagcgacc

SEQ ID NO: 440927 - DNA, 1772 bp, Homo sapiens
ggtatgaatctgctcatcatggacaaatgataccatatgcttgagcgacatcagtggcccccgggggctgccgtcgccccgtcgcccgccccggccccgccgcctgcccctgatcacctgttccggcccatcagcgccgaggacgaggagcagcagcccaccgagatcgagtcgctatgcatgaactgttactgcaatggcatgacgcgcctcctgctcaccaagattcccttcttcagagaaataatagtgagctccttttcctgcgagcactgtggctggaacaacacggagatccagtcggcaggcaggatccaggaccagggagtgcgctacactttgtctgtcagggctctggaggacatgaacagagaagtggtgaagactgactctgctgccacaaggattcctgagctagattttgaaattcctgcctttagccagaaaggagctctgaccactgttgaaggattgatcacccgtgctatctctggcctggagcaggaccagcctgcacgaagggcaaacaaagatgctacagctgaaagaattgatgagttcattgtcaaactgaaggagctaaagcaagtagcctcccctttcactctgatcattgatgatccctcagggaacagttttgtggaaaacccacatgctcctcagaaagatgatgccctggtgatcacacactacaaccggacccgacagcaggaagagatgctggggcttcaagaagaagcaccagcagagaagccagaagaggaagatctcagaaatgaagtgctccagttcagcacaaactgcccagaatgcaatgcccccgctcagaccaacatgaagctagtacaaatccctcactttaaggaggttatcatcatggctaccaactgcgagaactgtgggcatcggaccaatgaggtgaaatctggaggagcagtagaacccttgggcaccaggatcaccctccacatcacagatgcctcagatatgaccagagacctcctcaagtctgagacttgcagtgtggaaatcccagagctagaatttgaactgggaatggcagtcctcgggggcaagttcaccacactggaagggctgctgaaagacatccgggaactggtgaccaaaaatcctttcacactgggcgacagttccaatcctggacagacggagagactacaggagtttagccagaagatggaccagatcatcgaaggtaacatgaaggcccactttattatggatgatccagcaggaaacagttacttgcagaatgtgtatgcgcctgaagatgatcctgagatgaaggtggagcgttacaagcgcacctttgaccaaaatgaggagctagggctcaatgacatgaagacagagggctatgaggcaggcctggctccgcaacggtagcagtgggtggctcaagggccagcctccagcgctgctctttctgtaggttatttattagtattggatgaaggcgaaggctgggagtgtctttcccaccagcccttgcccatggtggggaggacatctggtctgagtcagagatctgtgcacactttctaaacagcttgtgatgcaagtgtgagcctattgtgttacttgaccttattttggaagttttgaattggcctaggaggaaacccagaaatgaaccaggggtatgtcatcacttttttcatatcaagtcctcaccctccttccacataatgctctatcctctaaggttggaactctgaagttggagaaggtggaataaagttacacctgga

SEQ ID NO: 440928 - DNA, 525 bp, Homo sapiens
ggcggaagtgggaagccgaggtctgaattgcgcgtggtggccatggcggccagcggggctgtggaaccagggcccccgggggctgccgtcgccccgtcgcccgccccggccccgccgcctgcccctgatcacctgttccggcccatcagcgccgaggacgaggagcagcagcccaccgagatcgagtcgctatgcatgaactgttactgcaatggcatgacgcgcctcctgctcaccaagattcccttcttcagagaaataatagtgagctccttttcctgcgagcactgtggctggaacaacacggagatccagtcggcaggcaggatccaggaccagggagtgcgctacactttgtctgtcagggctctggaggacatgaacagagaagtggtgaagactgactctgctgccacaaggattcctgagctagattttgaaattcctgcctttagccagaaaggagctctgaccactgttgaaggattgatcacccgtagcggggtgttccgggatcctctaaat

SEQ ID NO: 440929 - DNA, 1818 bp, Homo sapiens
cctcagcctcccaagtagccggaattacaggcatgtgccaccatgctgggctaatttttgtatttttagtggagacggtgtttcaccatgttggccaggctgttcttgaactcctggcctcaagtgacccgcccacattggcctcccaaagtgctgggattacaggcgtgagcccccgtgcccagcaaggattgctgttttaattcttgtatcttcgttgcttctttggtctttgcttaaacaaaacaataaagcttaatagttggggagaatgctgttaccagtgtcctctaggaaggctgttagcatatggctctactgagcagcagtgccatctggtgcctgagatcatgtgcttcaggcagttgtcacactgcatctacagccaagcatcacagaaacacttcactcatgtggtcagggaaggtgggactgattcacatgttagagacaggtcagatgggaaaattaaggcccaacttggtgttggggaataaccatactctggtctttcaagtgtagtagctgatgattcccaagaaactgatgaattttctgagtccagacaaaatttccccaagcctgctctctctgttggatatacataatagagaaagtcaaatcagccctttggggtttgtggtaaaaattcactcacccattgaagcctaaggtggctttgtaccttccagatctctcagcaaatcccctgggcagaaatgtcacctgcttgccatgtctttgaggggttcaggtcagcctggagaacaggctccttaggtcaaaaaccttgttttaagagccactgtggtacagtcaatgtaacccacttgtgcagaagccatgcttccaaggaaggtctcaggttgacaactagacatcaaatctgagaagccaactgtggagtaatgtgtttttttctctgtggacaagagtgatcagaaaggtgcttgatcttgaacaattgatccatgatgaaaaaatgaccattagctctcccccagaagcgtctgtgtttgctgaatggagctgagattttgatccgctatcagactccagaaagatccaggagttccaagaacatggcaaagagtcaaaatcttaggacaaggaattaaaatgccagaatgcaaatgtccaacaggcctggtagctcacagctatcaacaccctagaattccacactgcctcactgcagttgctcaaggatgggtatgtttctgtctctgaaattcgggaaaaagccttaagtgccagagaaggtgcttccaagactgtctgcagaattcctttcctagggtctgtctctgggtacccaaaagggcagagaaggaaccctaagattagcatagagccactcatctctcctcccctccccaccccttcttcccctgcttccattccccatggctctctcctctgactgtgaaacacttcctctccagcagtgttgggaaagttctggacctctactggatctagccataaatggtggtcttcagaaaaatggagattgtggctgccagcacccacaagacagcagcctcatgccatgcaggcagcaagccatcctgaacagcgttcctcccagagtctgtttcctcacctgctgttcactggtgagaggaaaagggacttgttctcccttgaccagttttctagttttcctgttcccaccctggtctttgcctgatgacagagaaactttctaaaaaaaaacaaaaacaaaagctataaaaaatctgcaaaacaaaaaagaaaggaggagaaacaaaacatgttgtggggcgcatggggccttggaagaggctttaaaac

SEQ ID NO: 440930 - DNA, 824 bp, Homo sapiens
  misc_feature (376)..(377): n is a, c, g, or t
  misc_feature (379)..(379): n is a, c, g, or t
  misc_feature (383)..(384): n is a, c, g, or t
  misc_feature (388)..(388): n is a, c, g, or t
  misc_feature (401)..(401): n is a, c, g, or t
  misc_feature (408)..(408): n is a, c, g, or t
  misc_feature (424)..(424): n is a, c, g, or t
  misc_feature (426)..(426): n is a, c, g, or t
  misc_feature (438)..(438): n is a, c, g, or t
  misc_feature (440)..(440): n is a, c, g, or t
  misc_feature (442)..(442): n is a, c, g, or t
  misc_feature (454)..(454): n is a, c, g, or t
  misc_feature (464)..(464): n is a, c, g, or t
  misc_feature (467)..(467): n is a, c, g, or t
  misc_feature (469)..(469): n is a, c, g, or t
  misc_feature (475)..(475): n is a, c, g, or t
  misc_feature (477)..(477): n is a, c, g, or t
aaatttattgccagatattttcccactgagaatactgaggttattcacataatcacttccttaacaaaggaagaagcacttttaacttgggctgcattccctttgtgagggtccacatttaggatcctcctgctaccataaggccccttttggggttctttgggtgtggctgcatctcaccatgttgaggattgcctttttttttttttttttttttttaaacacaagaagcctttgtgctcgtgttcctcccagggcgtggagtgtgcggggggtgcaactcttgggcctccagcgtgaacccttctgtgcctctcccgaggtttcaggcaattctcctcctggccctcagcctctcccaagttaccgggaattnnangggnntgtngtgcccccagtgngggggcntaattttgggtttttntnagggggagaacngngngtgtttacccantgtgtgtggncgngngttgtntntttgaaccttccgtggccctccagttgacccgcccacattgggcccccccaaagggggggggatatcaacggggggtgacccccgcgggccccagaagcggaattggccggtataaaatcctggggatcctcacgagggcatacatgaggcctcgggcttaacacaaaaccaaatgacgcctaaacggcggcggaaaaggggcgtcaccagtgggtcctctaggaagggggcggcagcatatggccaaatgggagcagaggcccacggtgtccgaaacaaagtgctccaggacgagtcacacggcatcaagcgcagattcaagaaacataccctgtgccgaagggga

SEQ ID NO: 440931 - DNA, 1060 bp, Homo sapiens
aacactcttgttgatacaaagaaagatctagaattaaaaactttacaggaggaaagtgaaaaggctggaactaactcacccaaaatatttagcaagttaatcataaataagataatagattttgagtctttcggttttcagtggagaactttatatttgattttgcctaatgtgtgaaactgtataaagcatactctatagtatatgttcctgctgcctggaagcagacacatcatcaaagtgtgtgtgtgtgcaagagaaaacacattaatttctctttctcagtttgtcataagaggggagtgctataaagaatcttctggctgggtgtggtggctcaaacctgtaatcccagaactttgggagaccaaggcttgcagtgagctgtgattgcaccactgcactccagcctgaatgacagagcaggaccgtgtctcaaaaaaaaaaaaaaaaggaatctttttacctgcaaattgtaaggtactcgagggcagacattggcattttcagatacatgtgaccctgtgtgtttgtgtgaatttctgtgcacacgtacatccccctcccacgccttgacataatgcatacagataaatgttgaggttcagtggcagctgttttgtttcccacagacattttacttagattattctggaaaacattctgaagagaatcacaagcattgatcataaagttagaagatgtgatgtttaagacaacatggacataggaattgaaattttctttcccattgtctctcgagtgtttttgaggccagtgtttcttactcttgcttgagtatacctggataacaaaatccagtttctaagatttctgccctagagattctgatggatttggtgtgctgcgtgcccctagaccctggagattcttaggacaaagcaaatttgggacactggggaagaaaagaaaaagagaataagataaagttcacctgaaaggatattccaggaatggggagcagagtttgcaaggtcatagaggctcaaaagaacaatggagaaagggcagtagatggtgggggtaggaagaacaaagc

SEQ ID NO: 440932 - DNA, 683 bp, Homo sapiens
  misc_feature (672)..(672): n is a, c, g, or t
  misc_feature (674)..(674): n is a, c, g, or t
ggcagagggcggggcctgcttctcctcagcttcaggcggctgcgacgagccctcaggcgaacctctcggctttcccgcgcggcgccgcctcttgctgcgcctccgcctcctcctctgctccgccaccggcttcctcctcctgagcagtcagcccgcgcgccggccggctccgttatggcgacccgcagccctggcgtcgtgattagtgatgatgaaccaggttatgaccttgatttattttgcatacctaatcattatgctgaggatttggaaagggtgtttattcctcatggactaattatggacaggactgaacgtcttgctcgagatgtgatgaaggagatgggaggccatcacattgtagccctctgtgtgctcaaggggggctataaattctttgctgacctgctggattacatcaaagcactgaatagaaatagtgatagatccattcctatgactgtagattttatcagactgaagagctattgtaatgaccagtcaacaggggacataaaagtaattggtggagatgatctctcaactttaactggaaagaatgtcttgatgtggaagatataatgacactggcaaaacaagcagactttgctttcctggtcagcatatatccgaggtcaagtcgcaactgccggtggaccccagaggttgggnangccagcttg

SEQ ID NO: 440933 - DNA, 266 bp, Homo sapiens
tcaattttcacatcaaagacagcatcttacttttctaacacacggtggtataattaacaatattcaatcaccgtgtgttagaaaagtaagaagcagtcaattttcacatcaaagacagcatctaagaagttttgttctgtcctggaattattttagtagtgtttcagtaatgttgactgtattttccaacttgttcaaattattaccagtgaatctttgtcagcagttcccttttaaatgcaaatcaataaattcccaaaaattta

SEQ ID NO: 440934 - DNA, 355 bp, Homo sapiens
tcaattttcacatcaaagacagcatcttacttttctaacacacggtggtataattaacaatattcaatcaccgtgtgttagaaaagtaagaagcagtcaattttcacatcaaagacagcatctaagaagttttgttctgtcctggaattattttagtagtgtttcagtaatgttgactgtattttccaacttgttcaaattattaccagtgaatctttgtcagcagttcccttttaaatgcaaatcaataaattcccaaaaatttaactgctttatgaattcaatttaaaaatccttaaaataagtcctgtctctttaaaaaaacctatgcatagttatcatttctctacaaatt

SEQ ID NO: 440935 - DNA, 1510 bp, Homo sapiens
ggcagagggcggggcctgcttctcctcagcttcaggcggctgcgacgagccctcaggcgaacctctcggctttcccgcgcggcgccgcctcttgctgcgcctccgcctcctcctctgctccgccaccggcttcctcctcctgagcagtcagcccgcgcgccggccggctccgttatggcgacccgcagccctggcgtcgtgattagtgatgatgaaccaggttatgaccttgatttattttgcatacctaatcattatgctgaggatttggaaagggtgtttattcctcatggactaattatggacaggactgaacgtcttgctcgagatgtgatgaaggagatgggaggccatcacattgtagccctctgtgtgctcaaggggggctataaattctttgctgacctgctggattacatcaaagcactgaatagaaatagtgatagatccattcctatgactgtagattttatcagactgaagagctattgtaatgaccagtcaacaggggacataaaagtaattggtggagatgatctctcaactttaactggaaagaatgtcttgattgtggaagatataattgacactggcaaaacaatgcagactttgctttccttggtcaggcagtataatccaaagatggtcaaggtcgcaagcttgctggtgaaaaggaccccacgaagtgttggatataagccagactttgttggatttgaaattccagacaagtttgttgtaggatatgcccttgactataatgaatacttcagggatttgaatcatgtttgtgtcattagtgaaactggaaaagcaaaatacaaagcctaagatgagagttcaagttgagtttggaaacatctggagtcctattgacatcgccagtaaaattatcaatgttctagttctgtggccatctgcttagtagagctttttgcatgtatcttctaagaattttatctgttttgtactttagaaatgtcagttgctgcattcctaaactgtttatttgcactatgagcctatagactatcagttccctttgggcggattgttgtttaacttgtaaatgaaaaaattctcttaaaccacagcactattgagtgaaacattgaactcatatctgtaagaaataaagagaagatatattagttttttaattggtattttaatttttatatatgcaggaaagaatagaagtgattgaatattgttaattataccaccgtgtgttagaaaagtaagaagcagtcaattttcacatcaaagacagcatctaagaagttttgttctgtcctggaattattttagtagtgtttcagtaatgttgactgtattttccaacttgttcaaattattaccagtgaatctttgtcagcagttcccttttaaatgcaaatcaataaattcccaaaaatttaactgctttatgaattcaatttaaaaatccttaaaataagtcctgtctctttaaaaaaacctatgcatagttatcatttctctacaaatt

SEQ ID NO: 440936 - DNA, 1611 bp, Homo sapiens
ctggcgtcgtgattagtgatgatgaaccaggttatgaccttgatttattttgcatacctaatcattatgctgaggatttggaaagggtgtttattcctcatggactaattatggacaggactgaacgtcttgctcgagatgtgatgaaggagatgggaggccatcacattgtagccctctgtgtgctcaaggggggctataaattctttgctgacctgctggattacatcaaagcactgaatagaaatagtgatagatccattcctatgactgtagattttatcagactgaagagctattgtattagtgatgatgaaccaggttatgaccttgatttattttgcatacctaatcattatgctgaggatttggaaagggtgtttattcctcatggactaattatggacaggactgaacgtcttgctcgagatgtgatgaaggagatgggaggccatcacattgtagccctctgtgtgctcaaggggggctataaattctttgctgacctgctggattacatcaaagcactgaatagaaatagtgatagatccattcctatgactgtagattttatcagactgaagagctattgtaatgaccagtcaacaggggacataaaagtaattggtggagatgatctctcaactttaactggaaagaatgtcttgattgtggaagatataattgacactggcaaaacaatgcagactttgctttccttggtcaggcagtataatccaaagatggtcaaggtcgcaagcttgctggtgaaaaggaccccacgaagtgttggatataagccagactttgttggatttgaaattccagacaagtttgttgtaggatatgcccttgactataatgaatacttcagggatttgaatcatgtttgtgtcattagtgaaactggaaaagcaaaatacaaagcctaagatgagagttcaagttgagtttggaaacatctggagtcctattgacatcgccagtaaaattatcaatgttctagttctgtggccatctgcttagtagagctttttgcatgtatcttctaagaattttatctgttttgtactttagaaatgtcagttgctgcattcctaaactgtttatttgcactatgagcctatagactatcagttccctttgggcggattgttgtttaacttgtaaatgaaaaaattctcttaaaccacagcactattgagtgaaacattgaactcatatctgtaagaaataaagagaagatatattagttttttaattggtattttaatttttatatatgcaggaaagaatagaagtgattgaatattgttaattataccaccgtgtgttagaaaagtaagaagcagtcaattttcacatcaaagacagcatctaagaagttttgttctgtcctggaattattttagtagtgtttcagtaatgttgactgtattttccaacttgttcaaattattaccagtgaatctttgtcagcagttcccttttaaatgcaaatcaataaattcccaaaaatttaactgctttatgaattcaatttaaaaatccttaaaataagtcctgtctctttaaaaaaacctatgcatagttatcatttctctacaaatt

SEQ ID NO: 440937 - DNA, 848 bp, Homo sapiens
ggcagagggcggggcctgcttctcctcagcttcaggcggctgcgacgagccctcaggcgaacctctcggctttcccgcgcggcgccgcctcttgctgcgcctccgcctcctcctctgctccgccaccggcttcctcctcctgagcagtcagcccgcgcgccggccggctccgttatggcgacccgcagccctggcgtcgtgattagtgatgatgaaccaggttatgaccttgatttattttgcatacctaatcattatgctgaggatttggaaagggtgtttattcctcatggactaattatggacaggactgaacgtcttgctcgagatgtgatgaaggagatgggaggccatcacattgtagccctctgtgtgctcaaggggggctataaattctttgctgacctgctggattacatcaaagcactgaatagaaatagtgatagatccattcctatgactgtagattttatcagactgaagagctattgtaatgaccagtcaacaggggacataaaagtaattggtggagatgatctctcaactttaactggaaagaatgtcttgattgtggaagatataattgacactggcaaaacaatgcagactttgctttccttggtcaggcagtataatccaaagatggtcaaggtcgcaaggtatgtatgacattttgacacagaatattttcctcatttgaagggggattaagtgattgcttctttttaaggataaatgttttcaactgtcattttatcttcgaaaagtaatgtaatctcatataagacttaagatataatccttttaaataattttgtcatgtgttaataaagctcataattacagtc

SEQ ID NO: 440938 - DNA, 357 bp, Homo sapiens
aatgaccagtcaacaggggacataaaagtaattggtggagatgatctctcaactttaactggaaaggtatgtatcttgaaagggaagaaaaaaaagcacttcataccgagtcaattagtaacagtgtgctttcaatcaatcactaagagataatttacatagtataactaaatgggttatttaacccttggaagcagtctaggttaattatcgttccctaggtcatgtagtaaaaagacagtagaatccaacattaaccttaaatgtccatattgtcaagtactgctgtctgcctctgtgggactctaatttgggatccttcaaaaaacattgatgggggaaaagatagcctttaaa

SEQ ID NO: 440939 - DNA, 517 bp, Homo sapiens
gggcgcctatagtctcagctactcgggaggctgaggcaggagaatggcgtgaacccgggaggcagagcttgcagtgagcagagatcgtgccactgcactccagtctgggtgacagagcaagactccgtctcaaaaaaaaaaacaaaaacaagaaacaaattaaactaatgtgatagactactgctttgttttcaaaagatacactccccaaaagttactgatctaaaatacagtagtactatctctgtttagtaagaaccctgacaactaatagtgttcttatatgtaaaatgctattcttgcctttcatttcagaatatactttttaaatgtgaatttctggatttttttttatagcatgtttgtgtcattagtgaaactggaaaagcaaaatacaaagcctaagatgagagttcaagttgagtttggaaacatctggagtcctattgacatcgccagtaaaattatcaatgttctagttctgtggccatctgcttagtagagctttttgcatgta

SEQ ID NO: 440940 - DNA, 1421 bp, Homo sapiens
ggcagagggcggggcctgcttctcctcagcttcaggcggctgcgacgagccctcaggcgaacctctcggctttcccgcgcggcgccgcctcttgctgcgcctccgcctcctcctctgctccgccaccggcttcctcctcctgagcagtcagcccgcgcgccggccggctccgttatggcgacccgcagccctggcgtcgtgattagtgatgatgaaccaggttatgaccttgatttattttgcatacctaatcattatgctgaggatttggaaagggtgtttattcctcatggactaattatggacaggactgaacgtcttgctcgagatgtgatgaaggagatgggaggccatcacattgtagccctctgtgtgctcaaggggggctataaattctttgctgacctgctggattacatcaaagcactgaatagaaatagtgatagatccattcctatgactgtagattttatcagactgaagagctattgtaatgaccagtcaacaggggacataaaagtaattggtggagatgatctctcaactttaactggaaagaatgtcttgattgtggaagatataattgacactggcaaaacaatgcagactttgctttccttggtcaggcagtataatccaaagatggtcaaggtcgcaagcttgctggtgaaaaggaccccacgaagtgttggatataagccagactttgttggatttgaaattccagacaagtttgttgtaggatatgcccttgactataatgaatacttcagggatttgaatcatgtttgtgtcattagtgaaactggaaaagcaaaatacaaagcctaagatgagagttcaagttgagtttggaaacatctggagtcctattgacatcgccagtaaaattatcaatgttctagttctgtggccatctgcttagtagagctttttgcatgtatcttctaagaattttatctgttttgtactttagaaatgtcagttgctgcattcctaaactgtttatttgcactatgagcctatagactatcagttccctttgggcggattgttgtttaacttgtaaatgaaaaaattctcttaaaccacagcactattgagtgaaacattgaactcatatctgtaagaaataaagagaagatatattagttttttaattggtattttaatttttatatatgcaggaaagaatagaagtgattgaatattgttaattataccaccgtgtgttagaaaagtaagaagcagtcaattttcacatcaaagacagcatctaagaagttttgttctgtcctggaattattttagtagtgtttcagtaatgttgactgtattttccaacttgttcaaattattaccagtgaatctttgtcagcagttcccttttaaatgcaaatcaataaattcccaaaaattta

SEQ ID NO: 440941 - DNA, 1367 bp, Homo sapiens
ggcagagggcggggcctgcttctcctcagcttcaggcggctgcgacgagccctcaggcgaacctctcggctttcccgcgcggcgccgcctcttgctgcgcctccgcctcctcctctgctccgccaccggcttcctcctcctgagcagtcagcccgcgcgccggccggctccgttatggcgacccgcagccctggcgtcgtgattagtgatgatgaaccaggttatgaccttgatttattttgcatacctaatcattatgctgaggatttggaaagggtgtttattcctcatggactaattatggacaggactgaacgtcttgctcgagatgtgatgaaggagatgggaggccatcacattgtagccctctgtgtgctcaaggggggctataaattctttgctgacctgctggattacatcaaagcactgaatagaaatagtgatagatccattcctatgactgtagattttatcagactgaagagctattgtaatgaccagtcaacaggggacataaaagtaattggtggagatgatctctcaactttaactggaaagaatgtcttgattgtggaagatataattgacactggcaaaacaatgcagactttgctttccttggtcaggcagtataatccaaagatggtcaaggtcgcaagcttgctggtgaaaaggaccccacgaagtgttggatataagccagactttgttggatttgaaattccagacaagtttgttgtaggatatgcccttgactataatgaatacttcagggatttgaatcatgtttgtgtcattagtgaaactggaaaagcaaaatacaaagcctaagatgagagttcaagttgagtttggaaacatctggagtcctattgacatcgccagtaaaattatcaatgttctagttctgtggccatctgcttagtagagctttttgcatgtatcttctaagaattttatctgttttgtactttagaaatgtcagttgctgcattcctaaactgtttatttgcactatgagcctatagactatcagttccctttgggcggattgttgtttaacttgtaaatgaaaaaattctcttaaaccacagcactattgagtgaaacattgaactcatatctgtaagaaataaagagaagatatattagttttttaattggtattttaatttttatatatgcaggaaagaatagaagtgattgaatattgttaattataccaccgtgtgttagtctgtcctggaattattttagtagtgtttcagtaatgttgactgtattttccaacttgttcaaattattaccagtgaatctttgtcagcagttcccttttaaatgcaaatcaataaattcccaaaaattta

SEQ ID NO: 440942 - DNA, 1244 bp, Homo sapiens
aggccggtacctctgttgagggtctgtatgtcacctatcactgtaatcaagacgcgctatgagagtgggaaatagggctaggagagtatctacgctgcccctctgtgtgctcaaggggggctataaattctttgctgacctgctggattacatcaaagcactgaatagaaatagtgatagatccattcctatgactgtagattttatcagactgaagagctattgtaatgaccagtcaacaggggacataaaagtaattggtggagatgatctctcaactttaactggaaagaatgtcttgattgtggaagatataattgacactggcaaaacaatgcagactttgctttccttggtcaggcagtataatccaaagatggtcaaggtcgcaagcttgctggtgaaaaggaccccacgaagtgttggatataagccagactttgttggatttgaaattccagacaagtttgttgtaggatatgcccttgactataatgaatacttcagggatttgaatcatgtttgtgtcattagtgaaactggaaaagcaaaatacaaagcctaagatgagagttcaagttgagtttggaaacatctggagtcctattgacatcgccagtaaaattatcaatgttctagttctgtggccatctgcttagtagagctttttgcatgtatcttctaagaattttatctgttttgtactttagaaatgtcagttgctgcattcctaaactgtttatttgcactatgagcctatagactatcagttccctttgggcggattgttgtttaacttgtaaatgaaaaaattctcttaaaccacagcactattgagtgaaacattgaactcatatctgtaagaaataaagagaagatatattagttttttaattggtattttaatttttatatatgcaggaaagaatagaagtgattgaatattgttaattataccaccgtgtgttagaaaagtaagaagcagtcaattttcacatcaaagacagcatctaagaagttttgttctgtcctggaattattttagtagtgtttcagtaatgttgactgtattttccaacttgttcaaattattaccagtgaatctttgtcagcagttcccttttaaatgcaaatcaataaattcccaaaaatttaactgctttatgaattcaatttaaaaatccttaaaataagtcctgtctctttaaaaaaacctatgcatagttatcatttctctacaaatt

SEQ ID NO: 440943 - DNA, 2803 bp, Homo sapiens
caggaggtgggagctgcccgcttcaggcctcagaatcactcttggagttagatatttaagaatccttcctgccttgacagccagtctgtgaaatgatggtgaggtgggcacttctttgtggtgagtgcagaattctggggagacattgccaaggaattttactggaagactccatgccctggcccattccttcggtacaactttgatgtgactaaagggaaaatcttcattgagtggatgaaaggagcaactaccaacatctgctacaatgtactggatcgaaatgtccatgagaaaaagcttggagataaagttgctttttactgggagggcaatgagccaggggagaccactcagatcacataccatcagcttctggtccaagtgtgtcagttcagcaatgttctccgaaaacagggcattcagaagggggaccgagtggccatctacatgcctatgatcccagagcttgtggtggccatgctggcatgtgcccgcattggggctttgcactccattgtgtttgcaggcttctcttcagagtctctatgtgaacggatcttggattccagctgcagtcttctcatcactacagatgccttctacaggggggaaaagcttgtgaacctgaaggagctggctgacgaggccctgcagaagtgtcaggagaagggtttcccagtaagatgctgcattgtggtcaagcacctggggcgggcagagctcggcatgggtgactccaccagccagtcccccccaattaagaggtcatgcccagatgtgcagatctcatggaaccaagggattgacttgtggtggcatgagctcatgcaagaggcaggggatgagtgtgagcccgagtggtgtgatgccgaggacccactcttcatcctgtacaccagtggctccacaggcaaacccaagggtgtggttcacacagttgggggctacatgctctatgtagccacaaccttcaagtatgtgtttgacttccatgcagaggatgtgttctggtgcacggcagacattggttggatcactggtcattcctacgtcacctatgggccactggccaatggtgccaccagtgttttgtttgaggggattcccacatatccggacgtgaaccgcctgtggagcattgtggacaaatacaaggtgaccaagttctacacagcacccacagccatccgtctgctcatgaagtttggagatgagcctgtcaccaagcatagccgggcatccttgcaggtgttaggcacagtgggtgaacccatcaaccctgaggcctggctatggtaccaccgggtggtaggtgcccagcgctgccccatcgtggacaccttctggcaaacagagacaggtggccacatgttgactccccttcctggtgccacacccatgaaacccggttctgctactttcccattctttggtgtagctcctgcaatcctgaatgagtccggggaagagttggaaggtgaagctgaaggttatctggtgttcaagcagccctggccagggatcatgcgcacagtctatgggaaccacgaacgctttgagacaacctactttaagaagtttcctggatactatgttacaggagatggctgccagcgggaccaggatggctattactggatcactggcaggattgatgacatgctcaatgtatctggacacctgctgagtacagcagaggtggagtcagcacttgtggaacatgaggctgttgcagaggcagctgtggtgggccaccctcatcctgtgaagggtgaatgcctctactgctttgtcaccttgtgtgatggccacaccttcagccccaagctcaccgaggagctcaagaagcagattagagaaaagattggccccattgccacaccagactacatccagaatgcacctggcttgcctaaaacccgctcagggaaaatcatgaggcgagtgcttcggaagattgctcagaatgaccatgacctcggggacatgtctactgtggctgacccatctgtcatcagtcacctcttcagccaccgctgcctgaccatccagtgaacatgatcctgacctttacctaggattcctcctgctccaaactttgcccatcctctttgccccctcaggagtgctgagggccagtgttgacccacactaccctcccttgaccagctgtctgggaccggaaaccagctttgtctccaggtagagacaacatcctgtgactgccaggcagaaaggacagggcccaggtcagcctcagtctgctgtgcctccagactgcagagctctcagaacccagaacagagacgaaaaggctacctctcctacccaagttaagtgttcaaaggggatgtgagggcctccactgaagcagggaggcagctgtgtaatcctatgtcagctctcttaggaagccccagtacttatattgggcatgcacttgcccttaaaaacaatgatttgtgagtccaggaacaatttactatttttaaaatattttgctgcttctgttctgggtctgaattcccttttgtgccagatgccagtactgtctgcccattggctccaggggctgtatgggcagattcagtctccagagggtattcagatcatctgcttctttgaaggagtaaatgtgttttgttcctagggccagaggagcttgtcttccttgtcctctgttcccaccctcccctgaacagaacccagcccataagagacattctcagatgaaactctgttttcttgccccagtcaggctcaagccctgtggttgtaggaataaagcctgtgatctcaa

SEQ ID NO: 440944 - DNA, 847 bp, Homo sapiens
  misc_feature (713)..(713): n is a, c, g, or t
  misc_feature (727)..(727): n is a, c, g, or t
ttggtatttggggctactcagcatagagggtagagactgcctgccttttctctcctggtcccacctcagctgaccctctgtcagctcgaatcagctggaagagccagagttaagaggcctactcaggaagggccctatggacattgtgcccactaggcagcatggggcttactaaggcctggaatgtctgttgctccccaaagatgccttctacaggggggaaaagcttgtgaacctgaaggagctggctgacgaggccctgcagaagtgtcaggagaagggtttcccagtaagatgctgcattgtggtcaagcacctggggcgggcagagctcggcatgggtgactccaccagccagtcccccccaattaagaggtcatgcccagatgtgcagatctcatggaaccaagggattgacttgtggtggcatgagctcatgcaagaggcaggggatgagtgtgagcccgagtggtgtgatgccgaggacccactcttcatcctgtacaccagtggctccacaggcaaacccaagggtgtggttcacacagttgggggctacatgctctatgtagccacaaccttcaagtatgtgtttgacttccatgcagaggatgtgttctggtgcacggcagacattggttggatcactggtcattcctacgtcacctatgggccactggccaatggtgccaccagtgttttgtgtggggggnttcccccatattcnggacgtgaaccggctgtggggcctttgtgggcccttcaccgggggcccagtttttcacaatggccccaggccgtcgctggtcatgaaggttggcgattacctgtttcccagcataccggg

SEQ ID NO: 440945 - DNA, 876 bp, Homo sapiens
ccgagtatgaaatgtgttctggagtgtaaagtgaatatacaggttggcggattaagcagatcgtgaggaacagtagagccaattaatgatcgtgaagtccgtgtaacgccgctggtggctacaaaaaatgttgagccgtatatgccgtcggaaatggtgacgggagattcgaagtactctgaggcttgtacggagggtaaaatatagagcccagtaaatttgtcataagccgtgcttgaatatttcggattcggtggttctctataagactatggtgagctcaggtgattgatactgctcgtcctattaaaacggatgtgtccaggagtgggactatagggtctgtcttggaggcccagttatcactgcaagttgttggggaggggctagagcaagctgctccccaaaccacaaacagattccagggggccccatgggctgattgccctcttcctgttcagtctccactagtctcccactaggataataataatagccaacatttctagaatactttgtgccaccgctaggctaagtgctttaaatgaattaccccacttaatccctagagtcacctccatgaaacagatcttattgttaccttcatgctaaagatgatgaaactgagactcatggaagttaaatcacttgcccaaggccacactgctagaaaggtggcatttaaactctagcaggctcattctacagcctgagttccataagataaaatgagagagtaaagagacaagtgtgttgagagcaagagaagcagtgaacctgaggctgtctctgtgggcagggacttgaggaggaaacaggtggggaacaaagccatctctactttgatttttgaaaagtctggctaagggtgctgaa

SEQ ID NO: 440946 - DNA, 624 bp, Homo sapiens
cttggggcacttggcctagttagatagtggagaactggactgacatgtgtgaagaatttggggttctggggccccttgggagttgagtcagagttgcctcattcctcttcttgggttctgtctcccgtttgcttctagactttcccattctttggtgtagctcctgcaatcctgaatgagtccggggaagagttggaaggtgaagctgaaggttatctgctgcttaggactgaaacttcatggttggaggtttgctcactgagagaccctggaggggaccctcgatactttgcctgcatctcttccttttgggccataagtctcctaagggcgttttaagagttgctcagattcctgatggtacctttttgggtctggaagactaagtcccatcttcttttgacaaagattctacagaaaggaggctttataacatagtagaaaatcacgtaggatctggagtcaccctgcctgggttcgaatcctagctctgcctcttctgtgacctcagataagttatttaacacctctgaatctacattttctaatttgtaaaatagggttaaagtggtgtctctggccgggcacggtggctcacacctgtaatcctagcactttgggagg

SEQ ID NO: 440947 - DNA, 361 bp, Homo sapiens
agttcggcctgttttctcagtcccggcacccgccgcgaccgcaaaggcggccgcggttctaggaacttgacgtgatggggcttcctgaggagcgggtccggagcggcagcgggagccggggccaggaggaagctggagccggaggccgggcgcggagttggtctccgccgcccgaggtcagccgctccgcgcacgtcccctcgctgcagcgctaccgcgagctgcaccggcgctccgtggaggagccgcggggtgaggcccggcccgggcgggcctggggtgtcagtgaggagaagagtgggggctccctgggggagtcgggggctcccttgggaagctgaggggtgggtgaggagatgga

SEQ ID NO: 440948 - DNA, 2882 bp, Homo sapiens
caggaggtgggagctgcccgcttcaggcctcagaatcactcttggagttagatatttaagaatccttcctgccttgacagccagtctgtgaaatgatggtgaggtgggcacttctttgtggtgagtgcagatctggatggagatttgtgaaggcaaggagattgaagacatgtcctcataagagggagaaaatctgagctggttccaggaattctggggagacattgccaaggaattttactggaagactccatgccctggcccattccttcggtacaactttgatgtgactaaagggaaaatcttcattgagtggatgaaaggagcaactaccaacatctgctacaatgtactggatcgaaatgtccatgagaaaaagcttggagataaagttgctttttactgggagggcaatgagccaggggagaccactcagatcacataccatcagcttctggtccaagtgtgtcagttcagcaatgttctccgaaaacagggcattcagaagggggaccgagtggccatctacatgcctatgatcccagagcttgtggtggccatgctggcatgtgcccgcattggggctttgcactccattgtgtttgcaggcttctcttcagagtctctatgtgaacggatcttggattccagctgcagtcttctcatcactacagatgccttctacaggggggaaaagcttgtgaacctgaaggagctggctgacgaggccctgcagaagtgtcaggagaagggtttcccagtaagatgctgcattgtggtcaagcacctggggcgggcagagctcggcatgggtgactccaccagccagtcccccccaattaagaggtcatgcccagatgtgcagatctcatggaaccaagggattgacttgtggtggcatgagctcatgcaagaggcaggggatgagtgtgagcccgagtggtgtgatgccgaggacccactcttcatcctgtacaccagtggctccacaggcaaacccaagggtgtggttcacacagttgggggctacatgctctatgtagccacaaccttcaagtatgtgtttgacttccatgcagaggatgtgttctggtgcacggcagacattggttggatcactggtcattcctacgtcacctatgggccactggccaatggtgccaccagtgttttgtttgaggggattcccacatatccggacgtgaaccgcctgtggagcattgtggacaaatacaaggtgaccaagttctacacagcacccacagccatccgtctgctcatgaagtttggagatgagcctgtcaccaagcatagccgggcatccttgcaggtgttaggcacagtgggtgaacccatcaaccctgaggcctggctatggtaccaccgggtggtaggtgcccagcgctgccccatcgtggacaccttctggcaaacagagacaggtggccacatgttgactccccttcctggtgccacacccatgaaacccggttctgctactttcccattctttggtgtagctcctgcaatcctgaatgagtccggggaagagttggaaggtgaagctgaaggttatctggtgttcaagcagccctggccagggatcatgcgcacagtctatgggaaccacgaacgctttgagacaacctactttaagaagtttcctggatactatgttacaggagatggctgccagcgggaccaggatggctattactggatcactggcaggattgatgacatgctcaatgtatctggacacctgctgagtacagcagaggtggagtcagcacttgtggaacatgaggctgttgcagaggcagctgtggtgggccaccctcatcctgtgaagggtgaatgcctctactgctttgtcaccttgtgtgatggccacaccttcagccccaagctcaccgaggagctcaagaagcagattagagaaaagattggccccattgccacaccagactacatccagaatgcacctggcttgcctaaaacccgctcagggaaaatcatgaggcgagtgcttcggaagattgctcagaatgaccatgacctcggggacatgtctactgtggctgacccatctgtcatcagtcacctcttcagccaccgctgcctgaccatccagtgaacatgatcctgacctttacctaggattcctcctgctccaaactttgcccatcctctttgccccctcaggagtgctgagggccagtgttgacccacactaccctcccttgaccagctgtctgggaccggaaaccagctttgtctccaggtagagacaacatcctgtgactgccaggcagaaaggacagggcccaggtcagcctcagtctgctgtgcctccagactgcagagctctcagaacccagaacagagacgaaaaggctacctctcctacccaagttaagtgttcaaaggggatgtgagggcctccactgaagcagggaggcagctgtgtaatcctatgtcagctctcttaggaagccccagtacttatattgggcatgcacttgcccttaaaaacaatgatttgtgagtccaggaacaatttactatttttaaaatattttgctgcttctgttctgggtctgaattcccttttgtgccagatgccagtactgtctgcccattggctccaggggctgtatgggcagattcagtctccagagggtattcagatcatctgcttctttgaaggagtaaatgtgttttgttcctagggccagaggagcttgtcttccttgtcctctgttcccaccctcccctgaacagaacccagcccataagagacattctcagatgaaactctgttttcttgccccagtcaggctcaagccctgtggttgtaggaataaagcctgtgatctcaa

SEQ ID NO: 440949 - DNA, 3076 bp, Homo sapiens
agttcggcctgttttctcagtcccggcacccgccgcgaccgcaaaggcggccgcggttctaggaacttgacgtgatggggcttcctgaggagcgggtccggagcggcagcgggagccggggccaggaggaagctggagccggaggccgggcgcggagttggtctccgccgcccgaggtcagccgctccgcgcacgtcccctcgctgcagcgctaccgcgagctgcaccggcgctccgtggaggagccgcgggaattctggggagacattgccaaggaattttactggaagactccatgccctggcccattccttcggtacaactttgatgtgactaaagggaaaatcttcattgagtggatgaaaggagcaactaccaacatctgctacaatgtactggatcgaaatgtccatgagaaaaagcttggagataaagttgctttttactgggagggcaatgagccaggggagaccactcagatcacataccatcagcttctggtccaagtgtgtcagttcagcaatgttctccgaaaacagggcattcagaagggggaccgagtggccatctacatgcctatgatcccagagcttgtggtggccatgctggcatgtgcccgcattggggctttgcactccattgtgtttgcaggcttctcttcagagtctctatgtgaacggatcttggattccagctgcagtcttctcatcactacagatgccttctacaggggggaaaagcttgtgaacctgaaggagctggctgacgaggccctgcagaagtgtcaggagaagtaagtgtgtttggctactgtctgagttgactgagcctttccccagtgccaggttccctttgtcccctctaccctaaatggacatgggtgggtcttgccaagttccctttgagccaacaaggctaccactttaggcttttctcttctccaggggtttcccagtaagatgctgcattgtggtcaagcacctggggcgggcagagctcggcatgggtgactccaccagccagtcccccccaattaagaggtcatgcccagatgtgcagatctcatggaaccaagggattgacttgtggtggcatgagctcatgcaagaggcaggggatgagtgtgagcccgagtggtgtgatgccgaggacccactcttcatcctgtacaccagtggctccacaggcaaacccaagggtgtggttcacacagttgggggctacatgctctatgtagccacaaccttcaagtatgtgtttgacttccatgcagaggatgtgttctggtgcacggcagacattggttggatcactggtcattcctacgtcacctatgggccactggccaatggtgccaccagtgttttgtttgaggggattcccacatatccggacgtgaaccgcctgtggagcattgtggacaaatacaaggtgaccaagttctacacagcacccacagccatccgtctgctcatgaagtttggagatgagcctgtcaccaagcatagccgggcatccttgcaggtgttaggcacagtgggtgaacccatcaaccctgaggcctggctatggtaccaccgggtggtaggtgcccagcgctgccccatcgtggacaccttctggcaaacagagacaggtggccacatgttgactccccttcctggtgccacacccatgaaacccggttctgctactttcccattctttggtgtagctcctgcaatcctgaatgagtccggggaagagttggaaggtgaagctgaaggttatctggtgttcaagcagccctggccagggatcatgcgcacagtctatgggaaccacgaacgctttgagacaacctactttaagaagtttcctggatactatgttacaggagatggctgccagcgggaccaggatggctattactggatcactggcaggattgatgacatgctcaatgtatctggacacctgctgagtacagcagaggtggagtcagcacttgtggaacatgaggctgttgcagaggcagctgtggtgggccaccctcatcctgtgaagggtgaatgcctctactgctttgtcaccttgtgtgatggccacaccttcagccccaagctcaccgaggagctcaagaagcagattagagaaaagattggccccattgccacaccagactacatccagaatgcacctggcttgcctaaaacccgctcagggaaaatcatgaggcgagtgcttcggaagattgctcagaatgaccatgacctcggggacatgtctactgtggctgacccatctgtcatcagtcacctcttcagccaccgctgcctgaccatccagtgaacatgatcctgacctttacctaggattcctcctgctccaaactttgcccatcctctttgccccctcaggagtgctgagggccagtgttgacccacactaccctcccttgaccagctgtctgggaccggaaaccagctttgtctccaggtagagacaacatcctgtgactgccaggcagaaaggacagggcccaggtcagcctcagtctgctgtgcctccagactgcagagctctcagaacccagaacagagacgaaaaggctacctctcctacccaagttaagtgttcaaaggggatgtgagggcctccactgaagcagggaggcagctgtgtaatcctatgtcagctctcttaggaagccccagtacttatattgggcatgcacttgcccttaaaaacaatgatttgtgagtccaggaacaatttactatttttaaaatattttgctgcttctgttctgggtctgaattcccttttgtgccagatgccagtactgtctgcccattggctccaggggctgtatgggcagattcagtctccagagggtattcagatcatctgcttctttgaaggagtaaatgtgttttgttcctagggccagaggagcttgtcttccttgtcctctgttcccaccctcccctgaacagaacccagcccataagagacattctcagatgaaactctgttttcttgccccagtcaggctcaagccctgtggttgtaggaataaagcctgtgatctcaa

SEQ ID NO: 440950 - DNA, 2150 bp, Homo sapiens
aagctggaagcacaaaactaacggctaggtacgaggctgggtgttgggtcagcacctggggcgggcagagctcggcatgggtgactccaccagccagtcccccccaattaagaggtcatgcccagatgtgcagatctcatggaaccaagggattgacttgtggtggcatgagctcatgcaagaggcaggggatgagtgtgagcccgagtggtgtgatgccgaggacccactcttcatcctgtacaccagtggctccacaggcaaacccaagggtgtggttcacacagttgggggctacatgctctatgtagccacaaccttcaagtatgtgtttgacttccatgcagaggatgtgttctggtgcacggcagacattggttggatcactggtcattcctacgtcacctatgggccactggccaatggtgccaccagtgttttgtttgaggggattcccacatatccggacgtgaaccgcctgtggagcattgtggacaaatacaaggtgaccaagttctacacagcacccacagccatccgtctgctcatgaagtttggagatgagcctgtcaccaagcatagccgggcatccttgcaggtgttaggcacagtgggtgaacccatcaaccctgaggcctggctatggtaccaccgggtggtaggtgcccagcgctgccccatcgtggacaccttctggcaaacagagacaggtggccacatgttgactccccttcctggtgccacacccatgaaacccggttctgctactttcccattctttggtgtagctcctgcaatcctgaatgagtccggggaagagttggaaggtgaagctgaaggttatctggtgttcaagcagccctggccagggatcatgcgcacagtctatgggaaccacgaacgctttgagacaacctactttaagaagtttcctggatactatgttacaggagatggctgccagcgggaccaggatggctattactggatcactggcaggattgatgacatgctcaatgtatctggacacctgctgagtacagcagaggtggagtcagcacttgtggaacatgaggctgttgcagaggcagctgtggtgggccaccctcatcctgtgaagggtgaatgcctctactgctttgtcaccttgtgtgatggccacaccttcagccccaagctcaccgaggagctcaagaagcagattagagaaaagattggccccattgccacaccagactacatccagaatgcacctggcttgcctaaaacccgctcagggaaaatcatgaggcgagtgcttcggaagattgctcagaatgaccatgacctcggggacatgtctactgtggctgacccatctgtcatcagtcacctcttcagccaccgctgcctgaccatccagtgaacatgatcctgacctttacctaggattcctcctgctccaaactttgcccatcctctttgccccctcaggagtgctgagggccagtgttgacccacactaccctcccttgaccagctgtctgggaccggaaaccagctttgtctccaggtagagacaacatcctgtgactgccaggcagaaaggacagggcccaggtcagcctcagtctgctgtgcctccagactgcagagctctcagaacccagaacagagacgaaaaggctacctctcctacccaagttaagtgttcaaaggggatgtgagggcctccactgaagcagggaggcagctgtgtaatcctatgtcagctctcttaggaagccccagtacttatattgggcatgcacttgcccttaaaaacaatgatttgtgagtccaggaacaatttactatttttaaaatattttgctgcttctgttctgggtctgaattcccttttgtgccagatgccagtactgtctgcccattggctccaggggctgtatgggcagattcagtctccagagggtattcagatcatctgcttctttgaaggagtaaatgtgttttgttcctagggccagaggagcttgtcttccttgtcctctgttcccaccctcccctgaacagaacccagcccataagagacattctcagatgaaactctgttttcttgccccagtcaggctcaagccctgtggttgtaggaataaagcctgtgatctcaa

SEQ ID NO: 440951 - DNA, 2411 bp, Homo sapiens
ttggtatttggggctactcagcatagagggtagagactgcctgccttttctctcctggtcccacctcagctgaccctctgtcagctcgaatcagctggaagagccagagttaagaggcctactcaggaagggccctatggacattgtgcccactaggcagcatggggcttactaaggcctggaatgtctgttgctccccaaagatgccttctacaggggggaaaagcttgtgaacctgaaggagctggctgacgaggccctgcagaagtgtcaggagaagggtttcccagtaagatgctgcattgtggtcaagcacctggggcgggcagagctcggcatgggtgactccaccagccagtcccccccaattaagaggtcatgcccagatgtgcagatctcatggaaccaagggattgacttgtggtggcatgagctcatgcaagaggcaggggatgagtgtgagcccgagtggtgtgatgccgaggacccactcttcatcctgtacaccagtggctccacaggcaaacccaagggtgtggttcacacagttgggggctacatgctctatgtagccacaaccttcaagtatgtgtttgacttccatgcagaggatgtgttctggtgcacggcagacattggttggatcactggtcattcctacgtcacctatgggccactggccaatggtgccaccagtgttttgtttgaggggattcccacatatccggacgtgaaccgcctgtggagcattgtggacaaatacaaggtgaccaagttctacacagcacccacagccatccgtctgctcatgaagtttggagatgagcctgtcaccaagcatagccgggcatccttgcaggtgttaggcacagtgggtgaacccatcaaccctgaggcctggctatggtaccaccgggtggtaggtgcccagcgctgccccatcgtggacaccttctggcaaacagagacaggtggccacatgttgactccccttcctggtgccacacccatgaaacccggttctgctactttcccattctttggtgtagctcctgcaatcctgaatgagtccggggaagagttggaaggtgaagctgaaggttatctggtgttcaagcagccctggccagggatcatgcgcacagtctatgggaaccacgaacgctttgagacaacctactttaagaagtttcctggatactatgttacaggagatggctgccagcgggaccaggatggctattactggatcactggcaggattgatgacatgctcaatgtatctggacacctgctgagtacagcagaggtggagtcagcacttgtggaacatgaggctgttgcagaggcagctgtggtgggccaccctcatcctgtgaagggtgaatgcctctactgctttgtcaccttgtgtgatggccacaccttcagccccaagctcaccgaggagctcaagaagcagattagagaaaagattggccccattgccacaccagactacatccagaatgcacctggcttgcctaaaacccgctcagggaaaatcatgaggcgagtgcttcggaagattgctcagaatgaccatgacctcggggacatgtctactgtggctgacccatctgtcatcagtcacctcttcagccaccgctgcctgaccatccagtgaacatgatcctgacctttacctaggattcctcctgctccaaactttgcccatcctctttgccccctcaggagtgctgagggccagtgttgacccacactaccctcccttgaccagctgtctgggaccggaaaccagctttgtctccaggtagagacaacatcctgtgactgccaggcagaaaggacagggcccaggtcagcctcagtctgctgtgcctccagactgcagagctctcagaacccagaacagagacgaaaaggctacctctcctacccaagttaagtgttcaaaggggatgtgagggcctccactgaagcagggaggcagctgtgtaatcctatgtcagctctcttaggaagccccagtacttatattgggcatgcacttgcccttaaaaacaatgatttgtgagtccaggaacaatttactatttttaaaatattttgctgcttctgttctgggtctgaattcccttttgtgccagatgccagtactgtctgcccattggctccaggggctgtatgggcagattcagtctccagagggtattcagatcatctgcttctttgaaggagtaaatgtgttttgttcctagggccagaggagcttgtcttccttgtcctctgttcccaccctcccctgaacagaacccagcccataagagacattctcagatgaaactctgttttcttgccccagtcaggctcaagccctgtggttgtaggaataaagcctgtgatctcaa

SEQ ID NO: 440952 - DNA, 3239 bp, Homo sapiens
agttcggcctgttttctcagtcccggcacccgccgcgaccgcaaaggcggccgcggttctaggaacttgacgtgatggggcttcctgaggagcgggtccggagcggcagcgggagccggggccaggaggaagctggagccggaggccgggcgcggagttggtctccgccgcccgaggtcagccgctccgcgcacgtcccctcgctgcagcgctaccgcgagctgcaccggcgctccgtggaggagccgcgggaattctggggagacattgccaaggaattttactggaagactccatgccctggcccattccttcggtacaactttgatgtgactaaagggaaaatcttcattgagtggatgaaaggagcaactaccaacatctgctacaatgtactggatcgaaatgtccatgagaaaaagcttggagataaagttgctttttactgggagggcaatgagccaggggagaccactcagatcacataccatcagcttctggtccaagtgtgtcagttcagcaatgttctccgaaaacagggcattcagaagggggaccgagtggccatctacatgcctatgatcccagagcttgtggtggccatgctggcatgtgcccgcattggggctttgcactccattgtgtttgcaggcttctcttcagagtctctatgtgaacggatcttggattccagctgcagtcttctcatcactacagatgccttctacaggggggaaaagcttgtgaacctgaaggagctggctgacgaggccctgcagaagtgtcaggagaagggtttcccagtaagatgctgcattgtggtcaagcacctggggcgggcagagctcggcatgggtgactccaccagccagtcccccccaattaagaggtcatgcccagatgtgcagatctcatggaaccaagggattgacttgtggtggcatgagctcatgcaagaggcaggggatgagtgtgagcccgagtggtgtgatgccgaggacccactcttcatcctgtacaccagtggctccacaggcaaacccaagggtgtggttcacacagttgggggctacatgctctatgtagccacaaccttcaagtatgtgtttgacttccatgcagaggatgtgttctggtgcacggcagacattggttggatcactggtcattcctacgtcacctatgggccactggccaatggtgccaccagtgttttgtttgaggggattcccacatatccggacgtgaaccgcctgtggagcattgtggacaaatacaaggtgaccaagttctacacagcacccacagccatccgtctgctcatgaagtttggagatgagcctgtcaccaagcatagccgggcatccttgcaggtgttaggcacagtgggtgaacccatcaaccctgaggcctggctatggtaccaccgggtggtaggtgcccagcgctgccccatcgtggacaccttctggcaaacagagacaggtggccacatgttgactccccttcctggtgccacacccatgaaacccggttctgctactttcccattctttggtgtagctcctgcaatcctgaatgagtccggggaagagttggaaggtgaagctgaaggttatctggtgttcaagcagccctggccagggatcatgcgcacagtctatgggaaccacgaacgctttgagacaacctactttaagaagtttcctggatactatgttacaggagatggctgccagcgggaccaggatggctattactggatcactggcaggattgatgacatgctcaatgtatctggacacctgctgagtacagcagaggtggagtcagcacttgtggaacatgaggctgttgcagaggcagctgtggtgggccaccctcatcctgtgaagggtgaatgcctctactgctttgtcaccttgtgtgatggccacaccttcagccccaagctcaccgaggagctcaagaagcagattagagaaaagattggccccattgccacaccagactacatccagaatgcacctggcttgcctaaaacccgctcagggaaaatcatgaggcgagtgcttcggaagattgctcagaatgaccatgacctcggggacatgtctactgtggctgacccatctgtcatcagtcacctcttcagccaccgctgcctgaccatccagtgaacatgatcctgacctttacctaggattcctcctgctccaaactttgcccatcctctttgccccctcaggagtgctgagggccagtgttgacccacactaccctcccttgaccagctgtctgggaccggaaaccagctttgtctccaggtagagacaacatcctgtgactgccaggcagaaaggacagggcccaggtcagcctcagtctgctgtgcctccagactgcagagctctcagaacccagaacagagacgaaaaggctacctctcctacccaagttaagtgttcaaaggggatgtgagggcctccactgaagcagggaggcagctgtgtaatcctatgtcagctctcttaggaagccccagtacttatattgggcatgcacttgcccttaaaaacaatgatttgtgagtccaggaacaatttactatttttaaaatattttgctgcttctgttctgggtctgaattcccttttgtgccagatgccagtactgtctgcccattggctccaggggctgtatgggcagattcagtctccagagggtattcagatcatctgcttctttgaaggagtaaatgtgttttgttcctagggccagaggagcttgtcttccttgtcctctgttcccaccctcccctgaacagaacccagcccataagagacattctcagatgaaactctgttttcttgccccagtcaggctcaagccctgtggttgtaggaataaagcctgtgatctcaaaaaaaaaaaaaaaaaaaaaaaaaaaagaaacacaacaaaaaaacagggggggcgcgcccaaagaaaattccccagggaggggccccatgttacgcgggctacccgaggtctctgtggtcacacggggggcaccacacaatagggaggcccggaatataaaagccgtgagagaaccgaggaacagcctattaccaaacagcggagagacacggagaaacaccggtgccgccatcgtgggaacaccctcggggagagagagcagcactaaaaccgggagggagcgaccacacaatgtgggaccacaaatacacaaa

SEQ ID NO: 440953 - DNA, 2492 bp, Homo sapiens
agttcggcctgttttctcagtcccggcacccgccgcgaccgcaaaggcggccgcggttctaggaacttgacgtgatggggcttcctgaggagcgggtccggagcggcagcgggagccggggccaggaggaagctggagccggaggccgggcgcggagttggtctccgccgcccgaggtcagccgctccgcgcacgtcccctcgctgcagcgctaccgcgagctgcaccggcgctccgtggaggagccgcgggaattctggggagacattgccaaggaattttactggaagactccatgccctggcccattccttcggtacaactttgatgtgactaaagggaaaatcttcattgagtggatgaaaggagcaactaccaacatctgctacaatgtactggatcgaaatgtccatgagaaaaagcttggagataaagttgctttttactgggagggcaatgagccaggggagaccactcagatcacataccatcagcttctggtccaagtgtgtcagttcagcaatgttctccgaaaacagggcattcagaagggggaccgagtggccatctacatgcctatgatcccagagcttgtggtggccatgctggcatgtgcccgcattggggctttgcactccattgtgtttgcaggcttctcttcagagtctctatgtgaacggatcttggattccagctgcagtcttctcatcactacagatgccttctacaggggggaaaagcttgtgaacctgaaggagctggctgacgaggccctgcagaagtgtcaggagaagggtttcccagtaagatgctgcattgtggtcaagcacctggggcgggcagagctcggcatgggtgactccaccagccagtcccccccaattaagaggtcatgcccagatgtgcagatctcatggaaccaagggattgacttgtggtggcatgagctcatgcaagaggcaggggatgagtgtgagcccgagtggtgtgatgccgaggacccactcttcatcctgtacaccagtggctccacaggcaaacccaagggtgtggttcacacagttgggggctacatgctctatgtagccacaaccttcaagtatgtgtttgacttccatgcagaggatgtgttctggtgcacggcagacattggttggatcactggtcattcctacgtcacctatgggccactggccaatggtgccaccagtgttttgtttgaggggattcccacatatccggacgtgaaccgcctgtggagcattgtggacaaatacaaggtgaccaagttctacacagcacccacagccatccgtctgctcatgaagtttggagatgagcctgtcaccaagcatagccgggcatccttgcaggtgttaggcacagtgggtgaacccatcaaccctgaggcctggctatggtaccaccgggtggtaggtgcccagcgctgccccatcgtggacaccttctggcaaacagagacaggtggccacatgttgactccccttcctggtgccacacccatgaaacccggttctgctactttcccattctttggtgtagctcctgcaatcctgaatgagtccggggaagagttggaaggtgaagctgaaggttatctggtgttcaagcagccctggccagggatcatgcgcacagtctatgggaaccacgaacgctttgagacaacctactttaagaagtttcctggatactatgttacaggagatggctgccagcgggaccaggatggctattactggatcactggcaggattgatgacatgctcaatgtatctggacacctgctgagtacagcagaggtggagtcagcacttgtggaacatgaggctgttgcagaggcagctgtggtgggccaccctcatcctgtgaagggtgaatgcctctactgctttgtcaccttgtgtgatggccacaccttcagccccaagctcaccgaggagctcaagaagcagattagagaaaagattggccccattgccacaccagactacatccagaatgcacctggcttgcctaaaacccgctcagggaaaatcatgaggcgagtgcttcggaagattgctcagaatgaccatgacctcggggacatgtctactgtggctgacccatctgtcatcagtcacctcttcagccaccgctgcctgaccatccagtgaacatgatcctgacctttacctaggattcctcctgctccaaactttgcccatcctctttgccccctcaggagtgctgagggccagtgttgacccacactaccctcccttgaccagctgtctgggaccggaaaccagctttgtctccaggtagagacaacatcctgtgactgccaggcagaaaggacagggcccaggtcagcctcagtctgctgtgcctccagacatcagcctcagtttacccacccagaaaaaggcgagaacataacacttcgctcagaagagccagagggccttgttccatgtgatcgtggg

SEQ ID NO: 440954 - DNA, 2519 bp, Homo sapiens
caggaggtgggagctgcccgcttcaggcctcagaatcactcttggagttagatatttaagaatccttcctgccttgacagccagtctgtgaaatgatggtgaggtgggcacttctttgtggtgagtgcagatctggatggagatttgtgaaggcaaggagattgaagacatgtcctcataagagggagaaaatctgagctggttccaggaattctggggagacattgccaaggaattttactggaagactccatgccctggcccattccttcggtacaactttgatgtgactaaagggaaaatcttcattgagtggatgaaaggagcaactaccaacatctgctacaatgtactggatcgaaatgtccatgagaaaaagcttggagataaagttgctttttactgaaattagccaggtgtggtggtgcacgcctgtaatcccagctactcgggagtctgaggcagaagaattgcctgaacccaggaggcggaggttgcagtgagccaagatcgcgccattttactccagcctgggcaacaggagcttagataatccacatgaaggggttagcagagaaactaacaattagtacttgataaacattagctgttgtgattattgtattcatacttgcaggagcctcacctgtcccttcaaccccaccccatttcactttcccaagagcaagttagtaacagggacagggcttacatccaggccttctgactcagcctagaattccatccattccatcgatctgctgccaaagaatgttactgattgggcaataattatttacttggtgtgtgggcaccactgttttttaaatgagtgttttcatttgtatcaaactggacctgctttcctcaaggattgcccaaaaggagacacaaatttactaaacacttatcaataatagaacaccgtgctaggcaatttccatatactattaatttaatcctcacaataactttggaagacagaaagtattttctctgatttacagatgaggatcctgaagctcagaggggtaaagttacttctctgaggtcacctagctagtaagtggtagagctgggattccaagccaggatcctctgtctccaaagcctgtacttcattcaggacactttcccccacatttagaaaagctgtaattatcttccagtgagacagcatagcaaatgtgatcactgtcccttcctcactccccaggtgttcaagcagccctggccagggatcatgcgcacagtctatgggaaccacgaacgctttgagacaacctactttaagaagtttcctggatactatgttacaggagatggctgccagcgggaccaggatggctattactggatcactggcaggattgatgacatgctcaatgtatctggacacctgctgagtacagcagaggtggagtcagcacttgtggaacatgaggctgttgcagaggcagctgtggtgggccaccctcatcctgtgaagggtgaatgcctctactgctttgtcaccttgtgtgatggccacaccttcagccccaagctcaccgaggagctcaagaagcagattagagaaaagattggccccattgccacaccagactacatccagaatgcacctggcttgcctaaaacccgctcagggaaaatcatgaggcgagtgcttcggaagattgctcagaatgaccatgacctcggggacatgtctactgtggctgacccatctgtcatcagtcacctcttcagccaccgctgcctgaccatccagtgaacatgatcctgacctttacctaggattcctcctgctccaaactttgcccatcctctttgccccctcaggagtgctgagggccagtgttgacccacactaccctcccttgaccagctgtctgggaccggaaaccagctttgtctccaggtagagacaacatcctgtgactgccaggcagaaaggacagggcccaggtcagcctcagtctgctgtgcctccagactgcagagctctcagaacccagaacagagacgaaaaggctacctctcctacccaagttaagtgttcaaaggggatgtgagggcctccactgaagcagggaggcagctgtgtaatcctatgtcagctctcttaggaagccccagtacttatattgggcatgcacttgcccttaaaaacaatgatttgtgagtccaggaacaatttactatttttaaaatattttgctgcttctgttctgggtctgaattcccttttgtgccagatgccagtactgtctgcccattggctccaggggctgtatgggcagattcagtctccagagggtattcagatcatctgcttctttgaaggagtaaatgtgttttgttcctagggccagaggagcttgtcttccttgtcctctgttcccaccctcccctgaacagaacccagcccataagagacattctcagatgaaactctgttttcttgccccagtcaggctcaagccctgtggttgtaggaataaagcctgtgatctcaa

SEQ ID NO: 440955 - DNA, 2396 bp, Homo sapiens
agttcggcctgttttctcagtcccggcacccgccgcgaccgcaaaggcggccgcggttctaggaacttgacgtgatggggcttcctgaggagcgggtccggagcggcagcgggagccggggccaggaggaagctggagccggaggccgggcgcggagttggtctccgccgcccgaggtcagccgctccgcgcacgtcccctcgctgcagcgctaccgcgagctgcaccggcgctccgtggaggagccgcgggaattctggggagacattgccaaggaattttactggaagactccatgccctggcccattccttcggtacaactttgatgtgactaaagggaaaatcttcattgagtggatgaaaggagcaactaccaacatctgctacaatgtactggatcgaaatgtccatgagaaaaagcttggagataaagttgctttttactgggagggcaatgagccaggggagaccactcagatcacataccatcagcttctggtccaagtgtgtcagttcagcaatgttctccgaaaacagggcattcagaagggggaccgagtggccatctacatgcctatgatcccagagcttgtggtggccatgctggcatgtgcccgcattggggctttgcactccattgtgtttgcaggcttctcttcagagtctctatgtgaacggatcttggattccagctgcagtcttctcatcactacagatgccttctacaggggggaaaagcttgtgaacctgaaggagctggctgacgaggccctgcagaagtgtcaggagaagggtttcccagtaagatgctgcattgtggtcaagcacctggggcgggcagagctcggcatgggtgactccaccagccagtcccccccaattaagaggtcatgcccagatgtgcagatctcatggaaccaagggattgacttgtggtggcatgagctcatgcaagaggcaggggatgagtgtgagcccgagtggtgtgatgccgaggacccactcttcatcctgtacaccagtggctccacaggcaaacccaagggtgtggttcacacagttgggggctacatgctctatgtagccacaaccttcaagtatgtgtttgacttccatgcagaggatgtgttctggtgcacggcagacattggttggatcactggtcattcctacgtcacctatgggccactggccaatggtgccaccagtgttttgtttgaggggattcccacatatccggacgtgaaccgcctgtggagcattgtggacaaatacaaggtgaccaagttctacacagcacccacagccatccgtctgctcatgaagtttggagatgagcctgtcaccaagcatagccgggcatccttgcaggtgttaggcacagtgggtgaacccatcaaccctgaggcctggctatggtaccaccgggtggtaggtgcccagcgctgccccatcgtggacaccttctggcaaacagagacaggtggccacatgttgactccccttcctggtgccacacccatgaaacccggttctgctactttcccattctttggtgtagctcctgcaatcctgaatgagtccggggaagagttggaaggtgaagctgaaggttatctggtgttcaagcagccctggccagggatcatgcgcacagtctatgggaaccacgaacgctttgagacaacctactttaagaagtttcctggatactatgttacaggagatggctgccagcgggaccaggatggctattactggatcactggcaggattgatgacatgctcaatgtatctggacacctgctgagtacagcagaggtggagtcagcacttgtggaacatgaggctgttgcagaggcagctgtggtgggccaccctcatcctgtgaagggtgaatgcctctactgctttgtcaccttgtgtgatggccacaccttcagccccaagctcaccgaggagctcaagaagcagattagagaaaagattggccccattgccacaccagactacatccagaatgcacctggcttgcctaaaacccgctcaggtatgttcagaggcctccatggattgggatgggctgaggcctggtggtggtggggtgtgcgtggatgaaagcctttggcagggctagggtgggtcagtgctttcaccaagtaactagaggtctgtggttccccagggaaaatcatgaggcgagtgcttcggaagattgctcagaatgaccatgagcttaataccctgaccaaaagcactgctgacagagcatgatgaagatggaaaaaaagcaacaaaataaaacaagatagaatagtgtaacaaggtactctattcaatttctaagcaaatcttaagtgtcattctaggtcgtatcttcatatcttggaagac

SEQ ID NO: 440956 - DNA, 2121 bp, Homo sapiens
agttcggcctgttttctcagtcccggcacccgccgcgaccgcaaaggcggccgcggttctaggaacttgacgtgatggggcttcctgaggagcgggtccggagcggcagcgggagccggggccaggaggaagctggagccggaggccgggcgcggagttggtctccgccgcccgaggtcagccgctccgcgcacgtcccctcgctgcagcgctaccgcgagctgcaccggcgctccgtggaggagccgcgggaattctggggagacattgccaaggaattttactggaagactccatgccctggcccattccttcggtacaactttgatgtgactaaagggaaaatcttcattgagtggatgaaaggagcaactaccaacatctgctacaatgtactggatcgaaatgtccatgagaaaaagcttggagataaagttgctttttactgggagggcaatgagccaggggagaccactcagatcacataccatcagcttctggtccaagtgtgtcagttcagcaatgttctccgaaaacagggcattcagaagggggaccgagtggccatctacatgcctatgatcccagagcttgtggtggccatgctggcatgtgcccgcattggggctttgcactccattgtgtttgcaggcttctcttcagagtctctatgtgaacggatcttggattccagctgcagtcttctcatcactacagatgccttctacaggggggaaaagcttgtgaacctgaaggagctggctgacgaggccctgcagaagtgtcaggagaagggtttcccagtaagatgctgcattgtggtcaagcacctggggcgggcagagctcggcatgggtgactccaccagccagtcccccccaattaagaggtcatgcccagatgtgcagatctcatggaaccaagggattgacttgtggtggcatgagctcatgcaagaggcaggggatgagtgtgagcccgagtggtgtgatgccgaggacccactcttcatcctgtacaccagtggctccacaggcaaacccaagggtgtggttcacacagttgggggctacatgctctatgtagccacaaccttcaagtatgtgtttgacttccatgcagaggatgtgttctggtgcacggcagacattggttggatcactggtcattcctacgtcacctatgggccactggccaatggtgccaccagtgttttgtttgaggggattcccacatatccggacgtgaaccgcctgtggagcattgtggacaaatacaaggtgaccaagttctacacagcacccacagccatccgtctgctcatgaagtttggagatgagcctgtcaccaagcatagccgggcatccttgcaggtgttaggcacagtgggtgaacccatcaaccctgaggcctggctatggtaccaccgggtggtaggtgcccagcgctgccccatcgtggacaccttctggcaaacagagacaggtggccacatgttgactccccttcctggtgccacacccatgaaacccggttctgctactttcccattctttggtgtagctcctgcaatcctgaatgagtccggggaagagttggaaggtgaagctgaaggttatctggtgagccctggccctaggagtctttaaggagagagggaaagggtctgccaagggtactttgctttagagttaataacctaatctctcctggtagctgcttaggactgaaacttcatggttggaggtttgctcactgagagaccctggaggggaccctcgatactttgcctgcatctcttccttttgggccataagtctcctaagggcgttttaagagttgctcagattcctgatggtacctttttgggtctggaagactaagtcccatcttcttttgacaaagattctacagaaaggaggctttataacatagtagaaaatcacgtaggatctggagtcaccctgcctgggttcgaatcctagctctgcctcttctgtgacctcagataagttatttaacacctctgaatctacattttctaatttgtaaaatagggttaaagtggtgtctctggccgggcacggtggctcacacctgtaatcctagcactttgggagg

SEQ ID NO: 440957 - DNA, 1640 bp, Homo sapiens
agttcggcctgttttctcagtcccggcacccgccgcgaccgcaaaggcggccgcggttctaggaacttgacgtgatggggcttcctgaggagcgggtccggagcggcagcgggagccggggccaggaggaagctggagccggaggccgggcgcggagttggtctccgccgcccgaggtcagccgctccgcgcacgtcccctcgctgcagcgctaccgcgagctgcaccggcgctccgtggaggagccgcgggaattctggggagacattgccaaggaattttactggaagactccatgccctggcccattccttcggtacaactttgatgtgactaaagggaaaatcttcattgagtggatgaaaggagcaactaccaacatctgctacaatgtactggatcgaaatgtccatgagaaaaagcttggagataaagttgctttttactgggagggcaatgagccaggggagaccactcagatcacataccatcagcttctggtccaagtgtgtcagttcagcaatgttctccgaaaacagggcattcagaagggggaccgagtggccatctacatgcctatgatcccagagcttgtggtggccatgctggcatgtgcccgcattggggctttgcactccattgtgtttgcaggcttctcttcagagtctctatgtgaacggatcttggattccagctgcagtcttctcatcactacagatgccttctacaggggggaaaagcttgtgaacctgaaggagctggctgacgaggccctgcagaagtgtcaggagaagtaagtgtgtttggctactgtctgagttgactgagcctttccccagtgccaggttccctttgtcccctctaccctaaatggacatgggtgggtcttgccaagttccctttgagccaacaaggctaccactttaggcttttctcttctccaggggtttcccagtaagatgctgcattgtggtcaagcacctggggcgggcagagctcggcatgggtgactccaccagccagtcccccccaattaagaggtcatgcccagatgtgcaggtgagtctggcactgctatgcctttctccaggctcaaattccttcacttttcctgcctagaaaattcttgatgtccttctttgcctgctcatcagtatactgaggatccaggagcaattctaggaatgcctcctctagcagggctaggtgggaactggaagactttgaccttgactgtgggtagagaggcccttgtaccttgagaacatagcacaagcgattgtaagggagactcctatgctggttggggtatccttgtgggcacaggggatcctcagggcctaggcttgtgttagaaatgtctaacttgagtgacaatatatagtcatctccattactaggctgtgatgtggggtgggctatctttgtggcctaagggatgcccaccttggaaggaccagagtccagccctcacaatatggcctttgttagctttggacccccaggcttctggtgggaatggtagaaatgcccagtgatggcctccaggctgagcagcatgagggatcaaagttctggggttgagtaagagtctgtgacttgaggctccctgaggggtcttagggctagagaggctgtag

SEQ ID NO: 440958 - DNA, 289 bp, Homo sapiens
ggggctctggagaagtaggttgggcctagatgatggagggtcttaaataacaaactaaggagcttagaaggtttgtgtcataggtccatattagttattcagtttcttctaggaccctggcttagagatcctgaaagttccatgagcaacccctttcttcattcactcaatccctggggctttcttctctccctcagactttcttcccttccctagtttgcaggcttctcttcagagtctctatgtgaacggatcttggattccagctgcagtcttctcatcactacag

SEQ ID NO: 440959 - DNA, 2925 bp, Homo sapiens
agttcggcctgttttctcagtcccggcacccgccgcgaccgcaaaggcggccgcggttctaggaacttgacgtgatggggcttcctgaggagcgggtccggagcggcagcgggagccggggccaggaggaagctggagccggaggccgggcgcggagttggtctccgccgcccgaggtcagccgctccgcgcacgtcccctcgctgcagcgctaccgcgagctgcaccggcgctccgtggaggagccgcgggaattctggggagacattgccaaggaattttactggaagactccatgccctggcccattccttcggtacaactttgatgtgactaaagggaaaatcttcattgagtggatgaaaggagcaactaccaacatctgctacaatgtactggatcgaaatgtccatgagaaaaagcttggagataaagttgctttttactgggagggcaatgagccaggggagaccactcagatcacataccatcagcttctggtccaagtgtgtcagttcagcaatgttctccgaaaacagggcattcagaagggggaccgagtggccatctacatgcctatgatcccagagcttgtggtggccatgctggcatgtgcccgcattggggctttgcactccattgtgtttgcaggcttctcttcagagtctctatgtgaacggatcttggattccagctgcagtcttctcatcactacagatgccttctacaggggggaaaagcttgtgaacctgaaggagctggctgacgaggccctgcagaagtgtcaggagaagggtttcccagtaagatgctgcattgtggtcaagcacctggggcgggcagagctcggcatgggtgactccaccagccagtcccccccaattaagaggtcatgcccagatgtgcagatctcatggaaccaagggattgacttgtggtggcatgagctcatgcaagaggcaggggatgagtgtgagcccgagtggtgtgatgccgaggacccactcttcatcctgtacaccagtggctccacaggcaaacccaagggtgtggttcacacagttgggggctacatgctctatgtagccacaaccttcaagtatgtgtttgacttccatgcagaggatgtgttctggtgcacggcagacattggttggatcactggtcattcctacgtcacctatgggccactggccaatggtgccaccagtgttttgtttgaggggattcccacatatccggacgtgaaccgcctgtggagcattgtggacaaatacaaggtgaccaagttctacacagcacccacagccatccgtctgctcatgaagtttggagatgagcctgtcaccaagcatagccgggcatccttgcaggtgttaggcacagtgggtgaacccatcaaccctgaggcctggctatggtaccaccgggtggtaggtgcccagcgctgccccatcgtggacaccttctggcaaacagagacaggtggccacatgttgactccccttcctggtgccacacccatgaaacccggttctgctactttcccattctttggtgtagctcctgcaatcctgaatgagtccggggaagagttggaaggtgaagctgaaggttatctggtgttcaagcagccctggccagggatcatgcgcacagtctatgggaaccacgaacgctttgagacaacctactttaagaagtttcctggatactatgttacaggagatggctgccagcgggaccaggatggctattactggatcactggcaggattgatgacatgctcaatgtatctggacacctgctgagtacagcagaggtggagtcagcacttgtggaacatgaggctgttgcagaggcagctgtggtgggccaccctcatcctgtgaagggtgaatgcctctactgctttgtcaccttgtgtgatggccacaccttcagccccaagctcaccgaggagctcaagaagcagattagagaaaagattggccccattgccacaccagactacatccagaatgcacctggcttgcctaaaacccgctcagggaaaatcatgaggcgagtgcttcggaagattgctcagaatgaccatgacctcggggacatgtctactgtggctgacccatctgtcatcagtcacctcttcagccaccgctgcctgaccatccagtgaacatgatcctgacctttacctaggattcctcctgctccaaactttgcccatcctctttgccccctcaggagtgctgagggccagtgttgacccacactaccctcccttgaccagctgtctgggaccggaaaccagctttgtctccaggtagagacaacatcctgtgactgccaggcagaaaggacagggcccaggtcagcctcagtctgctgtgcctccagactgcagagctctcagaacccagaacagagacgaaaaggctacctctcctacccaagttaagtgttcaaaggggatgtgagggcctccactgaagcagggaggcagctgtgtaatcctatgtcagctctcttaggaagccccagtacttatattgggcatgcacttgcccttaaaaacaatgatttgtgagtccaggaacaatttactatttttaaaatattttgctgcttctgttctgggtctgaattcccttttgtgccagatgccagtactgtctgcccattggctccaggggctgtatgggcagattcagtctccagagggtattcagatcatctgcttctttgaaggagtaaatgtgttttgttcctagggccagaggagcttgtcttccttgtcctctgttcccaccctcccctgaacagaacccagcccataagagacattctcagatgaaactctgttttcttgccccagtcaggctcaagccctgtggttgtaggaataaagcctgtgatctcaa

SEQ ID NO: 440960 - DNA, 808 bp, Homo sapiens
aagctggaagcacaaaactaacggctaggtacgaggctgggtgttgggtcagcacctggggcgggcagagctcggcatgggtgactccaccagccagtcccccccaattaagaggtcatgcccagatgtgcagatctcatggaaccaagggattgacttgtggtggcatgagctcatgcaagaggcaggggatgagtgtgagcccgagtggtgtgatgccgaggacccactcttcatcctgtacaccagtggctccacaggcaaacccaagggtgtggttcacacagttgggggctacatgctctatgtagccacaaccttcaagtatgtgtttgacttccatgcagaggatgtgttctggtgcacggcagacattggttggatcactggtcattcctacgtcacctatgggccactggccaatggtgccaccagtgttttgtttgaggggattcccacatatccggacgtgaaccgcctgtggagcattgtggacaaatacaaggtgaccaagttctacacagcacccacagccatccgtctgctcatgaagtttggagatgagcctgtcaccaagcatagccgggcatccttgcaggtgttaggcacagtgggtgaacccatcaaccctgaggcctggctatggtaccaccgggtggtaggtgcccagcgctgccccatcgtggacaccttctggcaaacagagacaggtggccacatgttgactccccttcctggtgccacacccatgaaacccggttctgctactttccattcttgggttatccggatcgataatcgggaaatg

SEQ ID NO: 440961 - DNA, 2954 bp, Homo sapiens
agttcggcctgttttctcagtcccggcacccgccgcgaccgcaaaggcggccgcggttctaggaacttgacgtgatggggcttcctgaggagcgggtccggagcggcagcgggagccggggccaggaggaagctggagccggaggccgggcgcggagttggtctccgccgcccgaggtcagccgctccgcgcacgtcccctcgctgcagcgctaccgcgagctgcaccggcgctccgtggaggagccgcgggaattctggggagacattgccaaggaattttactggaagactccatgccctggcccattccttcggtacaactttgatgtgactaaagggaaaatcttcattgagtggatgaaaggagcaactaccaacatctgctacaatgtactggatcgaaatgtccatgagaaaaagcttggagataaagttgctttttactgggagggcaatgagccaggggagaccactcagatcacataccatcagcttctggtccaagtgtgtcagttcagcaatgttctccgaaaacagggcattcagaagggggaccgagtggccatctacatgcctatgatcccagagcttgtggtggccatgctggcatgtgcccgcattggggctttgcactccattgtgtttgcaggcttctcttcagagtctctatgtgaacggatcttggattccagctgcagtcttctcatcactacagatgccttctacaggggggaaaagcttgtgaacctgaaggagctggctgacgaggccctgcagaagtgtcaggagaagggtttcccagtaagatgctgcattgtggtcaagcacctggggcgggcagagctcggcatgggtgactccaccagccagtcccccccaattaagaggtcatgcccagatgtgcagatctcatggaaccaagggattgacttgtggtggcatgagctcatgcaagaggcaggggatgagtgtgagcccgagtggtgtgatgccgaggacccactcttcatcctgtacaccagtggctccacaggcaaacccaagggtgtggttcacacagttgggggctacatgctctatgtagccacaaccttcaagtatgtgtttgacttccatgcagaggatgtgttctggtgcacggcagacattggttggatcactggtcattcctacgtcacctatgggccactggccaatggtgccaccagtgttttgtttgaggggattcccacatatccggacgtgaaccgcctgtggagcattgtggacaaatacaaggtgaccaagttctacacagcacccacagccatccgtctgctcatgaagtttggagatgagcctgtcaccaagcatagccgggcatccttgcaggtgttaggcacagtgggtgaacccatcaaccctgaggcctggctatggtaccaccgggtggtaggtgcccagcgctgccccatcgtggacaccttctggcaaacagagacaggtggccacatgttgactccccttcctggtgccacacccatgaaacccggttctgctactttcccattctttggtgtagctcctgcaatcctgaatgagtccggggaagagttggaaggtgaagctgaaggttatctggtgttcaagcagccctggccagggatcatgcgcacagtctatgggaaccacgaacgctttgagacaacctactttaagaagtttcctggatactatgttacaggagatggctgccagcgggaccaggatggctattactggatcactggcaggattgatgacatgctcaatgtatctggacacctgctgagtacagcagaggtggagtcagcacttgtggaacatgaggctgttgcagaggcagctgtggtgggccaccctcatcctgtgaagggtgaatgcctctactgctttgtcaccttgtgtgatggccacaccttcagccccaagctcaccgaggagctcaagaagcagattagagaaaagattggccccattgccacaccagactacatccagaatgcacctggcttgcctaaaacccgctcagggaaaatcatgaggcgagtgcttcggaagattgctcagaatgaccatgacctcggggacatgtctactgtggctgacccatctgtcatcagtcacctcttcagccaccgctgcctgaccatccagtgaacatgatcctgacctttacctaggattcctcctgctccaaactttgcccatcctctttgccccctcaggagtgctgagggccagtgttgacccacactaccctcccttgaccagctgtctgggaccggaaaccagctttgtctccaggtagagacaacatcctgtgactgccaggcagaaaggacagggcccaggtcagcctcagtctgctgtgcctccagactgcagagctctcagaacccagaacagagacgaaaaggctacctctcctacccaagttaagtgttcaaaggggatgtgagggcctccactgaagcagggaggcagctgtgtaatcctatgtcagctctcttaggaagccccagtacttatattgggcatgcacttgcccttaaaaacaatgatttgtgagtccaggaacaatttactatttttaaaatattttgctgcttctgttctgggtctgaattcccttttgtgccagatgccagtactgtctgcccattggctccaggggctgtatgggcagattcagtctccagagggtattcagatcatctgcttctttgaaggagtaaatgtgttttgttcctagggccagaggagcttgtcttccttgtcctctgttcccaccctcccctgaacagaacccagcccataagagacattctcagatgaaactctgttttcttgccccagtcaggctcaagccctgtggttgtaggaataaagcctgtgatctcaaaaaaagtgacttgttttcttaggtatctg

SEQ ID NO: 440962 - DNA, 2834 bp, Homo sapiens
caggaggtgggagctgcccgcttcaggcctcagaatcactcttggagttagatatttaagaatccttcctgccttgacagccagtctgtgaaatgatggtgaggtgggcacttctttgtggtgagtgcagatctggatggagatttgtgaaggcaaggagattgaagacatgtcctcataagagggagaaaatctgagctggttccaggaattctggggagacattgccaaggaattttactggaagactccatgccctggcccattccttcggtacaactttgatgtgactaaagggaaaatcttcattgagtggatgaaaggagcaactaccaacatctgctacaatgtactggatcgaaatgtccatgagaaaaagcttggagataaagttgctttttactgggagggcaatgagccaggggagaccactcagatcacataccatcagcttctggtccaagtgtgtcagttcagcaatgttctccgaaaacaggagcttgtggtggccatgctggcatgtgcccgcattggggctttgcactccattgtgtttgcaggcttctcttcagagtctctatgtgaacggatcttggattccagctgcagtcttctcatcactacagatgccttctacaggggggaaaagcttgtgaacctgaaggagctggctgacgaggccctgcagaagtgtcaggagaagggtttcccagtaagatgctgcattgtggtcaagcacctggggcgggcagagctcggcatgggtgactccaccagccagtcccccccaattaagaggtcatgcccagatgtgcagatctcatggaaccaagggattgacttgtggtggcatgagctcatgcaagaggcaggggatgagtgtgagcccgagtggtgtgatgccgaggacccactcttcatcctgtacaccagtggctccacaggcaaacccaagggtgtggttcacacagttgggggctacatgctctatgtagccacaaccttcaagtatgtgtttgacttccatgcagaggatgtgttctggtgcacggcagacattggttggatcactggtcattcctacgtcacctatgggccactggccaatggtgccaccagtgttttgtttgaggggattcccacatatccggacgtgaaccgcctgtggagcattgtggacaaatacaaggtgaccaagttctacacagcacccacagccatccgtctgctcatgaagtttggagatgagcctgtcaccaagcatagccgggcatccttgcaggtgttaggcacagtgggtgaacccatcaaccctgaggcctggctatggtaccaccgggtggtaggtgcccagcgctgccccatcgtggacaccttctggcaaacagagacaggtggccacatgttgactccccttcctggtgccacacccatgaaacccggttctgctactttcccattctttggtgtagctcctgcaatcctgaatgagtccggggaagagttggaaggtgaagctgaaggttatctggtgttcaagcagccctggccagggatcatgcgcacagtctatgggaaccacgaacgctttgagacaacctactttaagaagtttcctggatactatgttacaggagatggctgccagcgggaccaggatggctattactggatcactggcaggattgatgacatgctcaatgtatctggacacctgctgagtacagcagaggtggagtcagcacttgtggaacatgaggctgttgcagaggcagctgtggtgggccaccctcatcctgtgaagggtgaatgcctctactgctttgtcaccttgtgtgatggccacaccttcagccccaagctcaccgaggagctcaagaagcagattagagaaaagattggccccattgccacaccagactacatccagaatgcacctggcttgcctaaaacccgctcagggaaaatcatgaggcgagtgcttcggaagattgctcagaatgaccatgacctcggggacatgtctactgtggctgacccatctgtcatcagtcacctcttcagccaccgctgcctgaccatccagtgaacatgatcctgacctttacctaggattcctcctgctccaaactttgcccatcctctttgccccctcaggagtgctgagggccagtgttgacccacactaccctcccttgaccagctgtctgggaccggaaaccagctttgtctccaggtagagacaacatcctgtgactgccaggcagaaaggacagggcccaggtcagcctcagtctgctgtgcctccagactgcagagctctcagaacccagaacagagacgaaaaggctacctctcctacccaagttaagtgttcaaaggggatgtgagggcctccactgaagcagggaggcagctgtgtaatcctatgtcagctctcttaggaagccccagtacttatattgggcatgcacttgcccttaaaaacaatgatttgtgagtccaggaacaatttactatttttaaaatattttgctgcttctgttctgggtctgaattcccttttgtgccagatgccagtactgtctgcccattggctccaggggctgtatgggcagattcagtctccagagggtattcagatcatctgcttctttgaaggagtaaatgtgttttgttcctagggccagaggagcttgtcttccttgtcctctgttcccaccctcccctgaacagaacccagcccataagagacattctcagatgaaactctgttttcttgccccagtcaggctcaagccctgtggttgtaggaataaagcctgtgatctcaa

SEQ ID NO: 440963 - DNA, 2452 bp, Homo sapiens
ggtaattcatcctacagatatacttgcagggagggcaatgagccaggggagaccactcagatcacataccatcagcttctggtccaagtgtgtcagttcagcaatgttctccgaaaacagggcattcagaagggggaccgagtggccatctacatgcctatgatcccagagcttgtggtggccatgctggcatgtgcccgcattggggctttgcactccattgtgtttgcaggcttctcttcagagtctctatgtgaacggatcttggattccagctgcagtcttctcatcactacagatgccttctacaggggggaaaagggtttcccagtaagatgctgcattgtggtcaagcacctggggcgggcagagctcggcatgggtgactccaccagccagtcccccccaattaagaggtcatgcccagatgtgcagatctcatggaaccaagggattgacttgtggtggcatgagctcatgcaagaggcaggggatgagtgtgagcccgagtggtgtgatgccgaggacccactcttcatcctgtacaccagtggctccacaggcaaacccaagggtgtggttcacacagttgggggctacatgctctatgtagccacaaccttcaagtatgtgtttgacttccatgcagaggatgtgttctggtgcacggcagacattggttggatcactggtcattcctacgtcacctatgggccactggccaatggtgccaccagtgttttgtttgaggggattcccacatatccggacgtgaaccgcctgtggagcattgtggacaaatacaaggtgaccaagttctacacagcacccacagccatccgtctgctcatgaagtttggagatgagcctgtcaccaagcatagccgggcatccttgcaggtgttaggcacagtgggtgaacccatcaaccctgaggcctggctatggtaccaccgggtggtaggtgcccagcgctgccccatcgtggacaccttctggcaaacagagacaggtggccacatgttgactccccttcctggtgccacacccatgaaacccggttctgctactttcccattctttggtgtagctcctgcaatcctgaatgagtccggggaagagttggaaggtgaagctgaaggttatctggtgttcaagcagccctggccagggatcatgcgcacagtctatgggaaccacgaacgctttgagacaacctactttaagaagtttcctggatactatgttacaggagatggctgccagcgggaccaggatggctattactggatcactggcaggattgatgacatgctcaatgtatctggacacctgctgagtacagcagaggtggagtcagcacttgtggaacatgaggctgttgcagaggcagctgtggtgggccaccctcatcctgtgaagggtgaatgcctctactgctttgtcaccttgtgtgatggccacaccttcagccccaagctcaccgaggagctcaagaagcagattagagaaaagattggccccattgccacaccagactacatccagaatgcacctggcttgcctaaaacccgctcagggaaaatcatgaggcgagtgcttcggaagattgctcagaatgaccatgacctcggggacatgtctactgtggctgacccatctgtcatcagtcacctcttcagccaccgctgcctgaccatccagtgaacatgatcctgacctttacctaggattcctcctgctccaaactttgcccatcctctttgccccctcaggagtgctgagggccagtgttgacccacactaccctcccttgaccagctgtctgggaccggaaaccagctttgtctccaggtagagacaacatcctgtgactgccaggcagaaaggacagggcccaggtcagcctcagtctgctgtgcctccagactgcagagctctcagaacccagaacagagacgaaaaggctacctctcctacccaagttaagtgttcaaaggggatgtgagggcctccactgaagcagggaggcagctgtgtaatcctatgtcagctctcttaggaagccccagtacttatattgggcatgcacttgcccttaaaaacaatgatttgtgagtccaggaacaatttactatttttaaaatattttgctgcttctgttctgggtctgaattcccttttgtgccagatgccagtactgtctgcccattggctccaggggctgtatgggcagattcagtctccagagggtattcagatcatctgcttctttgaaggagtaaatgtgttttgttcctagggccagaggagcttgtcttccttgtcctctgttcccaccctcccctgaacagaacccagcccataagagacattctcagatgaaactctgttttcttgccccagtcaggctcaagccctgtggttgtaggaataaagcctgtgatctcaa

SEQ ID NO: 440964 - DNA, 2880 bp, Homo sapiens
agttcggcctgttttctcagtcccggcacccgccgcgaccgcaaaggcggccgcggttctaggaacttgacgtgatggggcttcctgaggagcgggtccggagcggcagcgggagccggggccaggaggaagctggagccggaggccgggcgcggagttggtctccgccgcccgaggtcagccgctccgcgcacgtcccctcgctgcagcgctaccgcgagctgcaccggcgctccgtggaggagccgcgggaattctggggagacattgccaaggaattttactggaagactccatgccctggcccattccttcggtacaactttgatgtgactaaagggaaaatcttcattgagtggatgaaaggagcaactaccaacatctgctacaatgtactggatcgaaatgtccatgagaaaaagcttggagataaagttgctttttactgggagggcaatgagccaggggagaccactcagatcacataccatcagcttctggtccaagtgtgtcagttcagcaatgttctccgaaaacagggcattcagaagggggaccgagtggccatctacatgcctatgatcccagagcttgtggtggccatgctggcatgtgcccgcattggggctttgcactccattgtgtttgcaggcttctcttcagagtctctatgtgaacggatcttggattccagctgcagtcttctcatcactacagatgccttctacaggggggaaaagcttgtgaacctgaaggagctggctgacgaggccctgcagaagtgtcaggagaagggtttcccagtaagatgctgcattgtggtcaagcacctggggcgggcagagctcggcatgggtgactccaccagccagtcccccccaattaagaggtcatgcccagatgtgcagatctcatggaaccaagggattgacttgtggtggcatgagctcatgcaagaggcaggggatgagtgtgagcccgagtggtgtgatgccgaggacccactcttcatcctgtacaccagtggctccacaggcaaacccaagggtgtggttcacacagttgggggctacatgctctatgtagccacaaccttcaagtatgtgtttgacttccatgcagaggatgtgttctggtgcacggcagacattggttggatcactggtcattcctacgtcacctatgggccactggccaatggtgccaccagtgttttgtttgaggggattcccacatatccggacgtgaaccgcctgtggagcattgtggacaaatacaaggtgaccaagttctacacagcacccacagccatccgtctgctcatgaagtttggagatgagcctgtcaccaagcatagccgggcatccttgcaggtgttaggcacagtgggtgaacccatcaaccctgaggcctggctatggtaccaccgggtggtaggtgcccagcgctgccccatcgtggacaccttctggcaaacagagacaggtggccacatgttgactccccttcctggtgccacacccatgaaacccggttctgctactttcccattctttggtgtagctcctgcaatcctgaatgagtccggggaagagttggaaggtgaagctgaaggttatctggtgttcaagcagccctggccagggatcatgcgcacagtctatgggaaccacgaacgctttgagacaacctactttaagaagtttcctggatactatgttacaggagatggctgccagcgggaccaggatggctattactggatcactggcaggattgatgacatgctcaatgtatctggacacctgctgagtacagcagaggtggagtcagcacttgtggaacatgaggctgttgcagaggcagctgtggtgggccaccctcatcctgtgaagggtgaatgcctctactgctttgtcaccttgtgtgatggccacaccttcagccccaagctcaccgaggagctcaagaagcagattagagaaaagattggccccattgccacaccagactacatccagaatgcacctggcttgcctaaaacccgctcagggaaaatcatgaggcgagtgcttcggaagattgctcagaatgaccatgacctcggggacatgtctactgtggctgacccatctgtcatcagtcacctcttcagccaccgctgcctgaccatccagtgaacatgatcctgacctttacctaggattcctcctgctccaaactttgcccatcctctttgccccctcaggagtgctgagggccagtgttgacccacactaccctcccttgaccagctgtctgggaccggaaaccagctttgtctccaggtagagacaacatcctgtgactgccaggcagaaaggacagggcccaggtcagcctcagtctgctgtgcctccagactgcagagctctcagaacccagaacagagacgaaaaggctacctctcctacccaagttaagtgttcaaaggggatgtgagggcctccactgaagcagggaggcagctgtgtaatcctatgtcagctctcttaggaagccccagtacttatattgggcatgcacttgcccttaaaaacaatgatttgtgagtccaggaacaatttactatttttaaaatattttgctgcttctgttctgggtctgaattcccttttgtgccagattcagtctccagagggtattcagatcatctgcttctttgaaggagtaaatgtgttttgttcctagggccagaggagcttgtcttccttgtcctctgttcccaccctcccctgaacagaacccagcccataagagacattctcagatgaaactctgttttcttgccccagtcaggctcaagccctgtggttgtaggaataaagcctgtgatctcaa

SEQ ID NO: 440965 - DNA, 2249 bp, Homo sapiens
caggcagatcacctgaggtcgggagttcgagaccaggctgaccaacatggagaccccgtctctactaaaaatacaaaattagccaggcgtggtggtggacgtctgtaatcccagctacacgggaggctgagacaggagaatcacttgaaccggggaggtggaggttgtattgagccgaaattgtgccattgcacttcatcctgggcaacaagagcaaaattccgtctcagaaaaaaataatgcctttgtctcctatggttgcttgcttgattgagttagataatccacatgaaggggttagcagagaaactaacaattagtacttgataaacattagctgttgtgattattgtattcatacttgcaggagcctcacctgtcccttcaaccccaccccatttcactttcccaagagcaagttagtaacagggacagggcttacatccaggccttctgactcagcctagaattccatccattccatcgatctgctgccaaagaatgttactgattgggcaataattatttacttggtgtgtgggcaccactgttttttaaatgagtgttttcatttgtatcaaactggacctgctttcctcaaggattgcccaaaaggagacacaaatttactaaacacttatcaataatagaacaccgtgctaggcaatttccatatactattaatttaatcctcacaataactttggaagacagaaagtattttctctgatttacagatgaggatcctgaagctcagaggggtaaagttacttctctgaggtcacctagctagtaagtggtagagctgggattccaagccaggatcctctgtctccaaagcctgtacttcattcaggacactttcccccacatttagaaaagctgtaattatcttccagtgagacagcatagcaaatgtgatcactgtcccttcctcactccccaggtgttcaagcagccctggccagggatcatgcgcacagtctatgggaaccacgaacgctttgagacaacctactttaagaagtttcctggatactatgttacaggagatggctgccagcgggaccaggatggctattactggatcactggcaggattgatgacatgctcaatgtatctggacacctgctgagtacagcagaggtggagtcagcacttgtggaacatgaggctgttgcagaggcagctgtggtgggccaccctcatcctgtgaagggtgaatgcctctactgctttgtcaccttgtgtgatggccacaccttcagccccaagctcaccgaggagctcaagaagcagattagagaaaagattggccccattgccacaccagactacatccagaatgcacctggcttgcctaaaacccgctcagggaaaatcatgaggcgagtgcttcggaagattgctcagaatgaccatgacctcggggacatgtctactgtggctgacccatctgtcatcagtcacctcttcagccaccgctgcctgaccatccagtgaacatgatcctgacctttacctaggattcctcctgctccaaactttgcccatcctctttgccccctcaggagtgctgagggccagtgttgacccacactaccctcccttgaccagctgtctgggaccggaaaccagctttgtctccaggtagagacaacatcctgtgactgccaggcagaaaggacagggcccaggtcagcctcagtctgctgtgcctccagactgcagagctctcagaacccagaacagagacgaaaaggctacctctcctacccaagttaagtgttcaaaggggatgtgagggcctccactgaagcagggaggcagctgtgtaatcctatgtcagctctcttaggaagccccagtacttatattgggcatgcacttgcccttaaaaacaatgatttgtgagtccaggaacaatttactatttttaaaatattttgctgcttctgttctgggtctgaattcccttttgtgccagatgccagtactgtctgcccattggctccaggggctgtatgggcagattcagtctccagagggtattcagatcatctgcttctttgaaggagtaaatgtgttttgttcctagggccagaggagcttgtcttccttgtcctctgttcccaccctcccctgaacagaacccagcccataagagacattctcagatgaaactctgttttcttgccccagtcaggctcaagccctgtggttgtaggaataaagcctgtgatctcaa

SEQ ID NO: 440966 - DNA, 1642 bp, Homo sapiens
agttcggcctgttttctcagtcccggcacccgccgcgaccgcaaaggcggccgcggttctaggaacttgacgtgatggggcttcctgaggagcgggtccggagcggcagcgggagccggggccaggaggaagctggagccggaggccgggcgcggagttggtctccgccgcccgaggtcagccgctccgcgcacgtcccctcgctgcagcgctaccgcgagctgcaccggcgctccgtggaggagccgcgggaattctggggagacattgccaaggaattttactggaagactccatgccctggcccattccttcggtacaactttgatgtgactaaagggaaaatcttcattgagtggatgaaaggagcaactaccaacatctgctacaatgtactggatcgaaatgtccatgagaaaaagcttggagataaagttgctttttactggctgccagcgggaccaggatggctattactggatcactggcaggattgatgacatgctcaatgtatctggacacctgctgagtacagcagaggtggagtcagcacttgtggaacatgaggctgttgcagaggcagctgtggtgggccaccctcatcctgtgaagggtgaatgcctctactgctttgtcaccttgtgtgatggccacaccttcagccccaagctcaccgaggagctcaagaagcagattagagaaaagattggccccattgccacaccagactacatccagaatgcacctggcttgcctaaaacccgctcagggaaaatcatgaggcgagtgcttcggaagattgctcagaatgaccatgacctcggggacatgtctactgtggctgacccatctgtcatcagtcacctcttcagccaccgctgcctgaccatccagtgaacatgatcctgacctttacctaggattcctcctgctccaaactttgcccatcctctttgccccctcaggagtgctgagggccagtgttgacccacactaccctcccttgaccagctgtctgggaccggaaaccagctttgtctccaggtagagacaacatcctgtgactgccaggcagaaaggacagggcccaggtcagcctcagtctgctgtgcctccagactgcagagctctcagaacccagaacagagacgaaaaggctacctctcctacccaagttaagtgttcaaaggggatgtgagggcctccactgaagcagggaggcagctgtgtaatcctatgtcagctctcttaggaagccccagtacttatattgggcatgcacttgcccttaaaaacaatgatttgtgagtccaggaacaatttactatttttaaaatattttgctgcttctgttctgggtctgaattcccttttgtgccagatgccagtactgtctgcccattggctccaggggctgtatgggcagattcagtctccagagggtattcagatcatctgcttctttgaaggagtaaatgtgttttgttcctagggccagaggagcttgtcttccttgtcctctgttcccaccctcccctgaacagaacccagcccataagagacattctcagatgaaactctgttttcttgccccagtcaggctcaagccctgtggttgtaggaataaagcctgtgatctcaa

SEQ ID NO: 440967 - DNA, 978 bp, Homo sapiens
agttcggcctgttttctcagtcccggcacccgccgcgaccgcaaaggcggccgcggttctaggaacttgacgtgatggggcttcctgaggagcgggtccggagcggcagcgggagccggggccaggaggaagctggagccggaggccgggcgcggagttggtctccgccgcccgaggtcagccgctccgcgcacgtcccctcgctgcagcgctaccgcgagctgcaccggcgctccgtggaggagccgcgggaattctggggagacattgccaaggaattttactggaagactccatgccctggcccattccttcggtacaactttgatgtgactaaagggaaaatcttcattgagtggatgaaaggagcaactaccaacatctgctacaatgtactggatcgaaatgtccatgagaaaaagcttggagataaagttgctttttactgggagggcaatgagccaggggagaccactcagatcacataccatcagcttctggtccaagtgtgtcagttcagcaatgttctccgaaaacagggcattcagaagggggaccgagtggccatctacatgcctatgatcccagagcttgtggtggccatgctggcatgtgcccgcattggggctttgcactccattgtgtttgcaggcttctcttcagagtctctatgtgaacggatcttggattccagctgcagtcttctcatcactacagatgccagtactgtctgcccattggctccaggggctgtatgggcagattcagtctccagagggtattcagatcatctgcttctttgaaggagtaaatgtgttttgttcctagggccagaggagcttgtcttccttgtcctctgttcccaccctcccctgaacagaacccagcccataagagacattctcagatgaaactctgttttcttgccccagtcaggctcaagccctgtggttgtaggaataaagcctgtgatctcaa

SEQ ID NO: 440968 - DNA, 360 bp, Homo sapiens
gacacctgctgagtacagcagaggtggagtcagcacttgtggaacatgaggctgttgcagaggcagctgtggtgggccaccctcatcctgtgaagggtgaatgcctctactgctttgtcaccttgtgtgatggccacaccttcagccccaagctcaccgaggagctcaagaagcagagtaaggagcctccctgggcagggactatagggtctgtcttggaggcccagttatcactgcaagttgttggggaggggctagagcaagctgctccccaaaccacaaacagattccagggggccccatgggctgattgccctcttcctgttcagtctccactagtctcccactaggataataata

SEQ ID NO: 440969 - DNA, 781 bp, Homo sapiens
ctctagtcgactgcgtgtatagggcaagctcaataaactctagaatcccaaagcacggattagtatgttgggattgtccaccatctgcaccgcgttatgaagtgatgctaactatgtcaccgtctgtactgctcgctctgcgtgatattacatgtgatcttgaagattcatctgacactgattagtggggagtagagctagtcctcccgtccttcattgcttgatttggttgtatacattaagaaatagttgtagaaagggtacgactgtggtcgatgaattagctggaaactcgtgggctgcagtaagtggatagacgcatacttatattcctcgtcctatcgatgctcacaataatctacctaatacacgtatttggtttcccgctcctatcagtgatcaatataatggcttgtgatgtctcgtagcaggtactagtagagataccacaacaaatataccaatcttaagtaaagggacatacagttgcaaatactcactgcaagaaggcaagattcccaagggagatgtgatagctgatcaggcttcccagacacctccttcccaaacgaccgtccatttcaaaagaaccgtcctttccaccaaacaccttcctttcccccaaaagccattcacatatacccaaatacatttcttccacaaaaaccctccatttaccaaaaacgccgtccgttcccccatacaattcctttccgagaaacatcatttctcagaaaacatccttcccaaacaacctccttcccaaaaacctcttttccag

SEQ ID NO: 440970 - DNA, 3186 bp, Homo sapiens
catttaatggaacaaagttctccaggatttaggcaaactcacctacaagatttatcagaagccactcaagatgtgaaggaagagaatcattatcttactcctcgaagtgttcttttagagttggataatatcattgcttccagtgattctggtgaatccattgaaactgatggtccagaccaggtctctggaagaattgagtgtcattatgagccaatggaatcctattttttcaaagagacatcccatgagtctgtggatagcagcaaagaggaaccccagacccttccagagacccaggatggggacctccacctgcaagaacaaggctcaggaattgattggtgtctttcccctgccgatgtggaagcacagaccacaaatgaccaaaaggggtcggcctcactaactgttgtgcaattgtctatattaatcaataatatccccgatgaaagccaagtggagaaactgaacgttttcctttctcctcctgatgtcatcaactatcttgctctcacagaagccacaggacggatatgtgtgtctcagtgggaaggccccccacgtttgggatgcatattttgccacggagatcatcttctggcagtgaatgacctgaaaccccagagcctggaggaggtctccctgtttcttacccggtccatccagaaggagaaattaaagcttaccatcggcaggatcccaaattcagagacattccatgccgcatcctgtatgtgtccctcaaaatgccaaagtgctgcaccttctcagctggataagcctagactgaacagagctcccaagaggagtccggccattaaaaagagccagcagaaaggagccagggagtaacgcaccccagacccatggcagcagaaccaggatggagctgggactgtccagctctgccccctgctgctgccatgtgataggagacagtcggcacccccctctgaatttctgtatctgcatcttaacaatggggatgactatcccctctctggttattgtatcagagatgttaagagggtcatgtggcatgattggagaacctgggggaattggaaggccttattatctcagctattgtcccaaacaccacagacacagattgggtcagtccttcatgtaatacatgctgtgttctgtgaggatgtggtccacacaattccttctttgttaagggacatacagttgcaaatactcactgcaagaaggcaagattcccaagggagatgtgatagctgatcaggcttcccagacacctccttcccaaacacctccttcccaacacctccttccccaacatccttccccaacacctccttccccaacacttccttcccaacacctccttcccaaacccctccttccccaacatccttcccaacacctccttcccaaacacctccttcccaaacacctccttcccaaacacctccttcccaacacctccttccccaacacctccttcccaaacacctctttcccaaacacctccttcccagacacctccttcccaacaccgccttcccaacacctccttcccaaacccctttcccaaacatctccttcccaaacacctgcctctcttcaaccccacaggccagagtgctgagacagagtggccttttggattcaataagtatcttgttctcttaaagactcagcaacgattttagaagtcgcagcagttttacatcacatgcagccaagatcagcttgctctacaagcaataacagaactacttagcacttcaaggttgaaagttcttcactaatggatccattgactaattgatcctggaaggccaaaggaataaaattcttttatataaataggaaaacaaaggcagagagctaaagcactaatcaaatcggggggtgttagagcaaaaacaggcttcagaaagagtattttaccatgcttcacatggaaaaaatcgagccccggagcgatgaaaggcatattttctttgtttctccaagtttcataaccgttcagttgcagaaccaagaatctaaaaccagctctgggaaacaaatgtccagatgccagcctcatagttgaacttggatttgaaaataccttcagcacttagaagagacattcaaatacatttcatttcctgttacccagattgttcggaaagtattaaaaatttttcatttacctgctgatacggtttggatctgtgtccctaacaaatcccatgtcgagctgtggtccccggtgttggagatggagcctggtgggaggcagctggatcgtgaggtcatgggggtggagttctcacgaaggagttagcatcatccccttggcgctattctcgtgagagtaagttctcgtgagatctggttgtttaaaagtgtgcagcacctctccgctcactctcttcctcctgctcctgccgtgtaagatgcctgctccatctgccgcaagtgaaagcttcctgaggtctccccggaagcagatgctgccacgcttcctgtacagcctgcagaactgtggaccaatcaaacctcttttcttataaattacctggtcttggggatttctttatttaatgtgagaacgcatgcccttttggatctactgtttctacttttataaatttatcctgcagaaatacacaaatacacaaagatacatgtaaaaaaagtagtttactgcagtactgtttgtaataataaaaaatcaggctggacctggtggttcatgcctataattccaaccctttgggaggccgggacaggtggatcacctgaggtctggagctcgagaacaacctgaccaacatggagaaaccctgtctctactaaaaatacaaaactagctgggcattgtggcacatgcctgcaatcccagctacttgagaggctggggcaggagaatcactagaaccgggaggcggaagttgcagtgagccaagatcatgccattgcactccagcctgggcaacaagaggaaaacccagtctcaaaaaacaaaaaaaaaaatcatgtgggtattgcttaattctgatttcatatcattgaacactgtagatattaaaatgttcagcaggcacagttctgtaaaattgttcgtgatacattaagaatgaaagaatcaagttgtataataaggataacatcatcccacttttgtacaaataaatgtttggtgtttgtgtgtatgta

SEQ ID NO: 440971 - DNA, 989 bp, Homo sapiens
catttaatggaacaaagttctccaggatttaggcaaactcacctacaagatttatcagaagccactcaagatgtgaaggaagagaatcattatcttactcctcgaagtgttcttttagagttggataatatcattgcttccagtgattctggtgaatccattgaaactgatggtccagaccaggtctctggaagaattgagtgtcattatgagccaatggaatcctattttttcaaagagacatcccatgagtctgtggatagcagcaaagaggaaccccagacccttccagagacccaggatggggacctccacctgcaagaacaaggctcaggaattgattggtgtctttcccctgccgatgtggaagcacagaccacaaatgaccaaaaggggtcggcctcactaactgttgtgcaattgtctatattaatcaataatatccccgatgaaagccaagtggagaaactgaacgttttcctttctcctcctgatgtcatcaactatcttgctctcacagaagccacaggacggatatgtgtgtctcagtgggaaggccccccacgtttgggatgcatattttgccacggagatcatcttctggcagtgaatgacctgaaaccccagagcctggaggaggtctccctgtttcttacccggtccatccagaaggaggactctttcaggattctttcatatcaagtagcatttggagaaggcactgagctaagagacagagcacctgggttcaggacctcagatcggcatgatgtagcaaaaagagcttgcatggaatcagactggtgcagggattccaaaacagctccttcaaccaatttgtgcctcagttttcttttctgtaaaattatgactaatgatggtgctggttgttggataattaaatgaggtaatatgtgtaacgtgcttacaaaggtgactggcacatattaggtgctcaataaagctactagttacttttacttctaaaa

SEQ ID NO: 440972 - DNA, 506 bp, Homo sapiens
tctccctgtttcttacccggtccatccagaaggaggtgagtcgtactgaccagccctgaacagggcaaatcagtaccagaaggaaaaagatcagggtcttagatggagtctgagaagtaccctgaatacaaataaggttcctcattcttccaccatcaagtgcaaataacagaatgtgctttcaggactctttcaggattctttcatatcaagtagcatttggagaaggcactgagctaagagacagagcacctgggttcaggacctcagatcggcatgatgtagcaaaaagagcttgcatggaatcagactggtgcagggattccaaaacagctccttcaaccaatttgtgcctcagttttcttttctgtaaaattatgactaatgatggtgctggttgttggataattaaatgaggtaatatgtgtaacgtgcttacaaaggtgactggcacatattaggtgctcaataaagctactagttacttttacttctaaaacaactga

SEQ ID NO: 440973 - DNA, 228 bp, Homo sapiens
ttggataatatcattgcttccagtgattctggtgaatccattgaaactgatggtccagaccaggtctctggaagaattgagtgtcattatgagccaatggaatcctagtaagtcaaaatgccgtttcaaaatttgatgtttgctcatctgctgttaaggaacaatgattgtcagttcatttcaatagttgataaactgatgccaaacattaccagagaccagtttcca

SEQ ID NO: 440974 - DNA, 3144 bp, Homo sapiens
catttaatggaacaaagttctccaggatttaggcaaactcacctacaagatttatcagaagccactcaagatgtgaaggaagagaatcattatcttactcctcgaagtgttcttttagagttggataatatcattgcttccagtgattctggtgaatccattgaaactgatggtccagaccaggtctctggaagaattgagtgtcattatgagccaatggaatcctattttttcaaagagacatcccatgagtctgtggatagcagcaaagaggaaccccagacccttccagagacccaggatggggacctccacctgcaagaacaaggctcaggaattgattggtgtctttcccctgccgatgtggaagcacagaccacaaatgaccaaaagggtaatatccccgatgaaagccaagtggagaaactgaacgttttcctttctcctcctgatgtcatcaactatcttgctctcacagaagccacaggacggatatgtgtgtctcagtgggaaggccccccacgtttgggatgcatattttgccacggagatcatcttctggcagtgaatgacctgaaaccccagagcctggaggaggtctccctgtttcttacccggtccatccagaaggagaaattaaagcttaccatcggcaggatcccaaattcagagacattccatgccgcatcctgtatgtgtccctcaaaatgccaaagtgctgcaccttctcagctggataagcctagactgaacagagctcccaagaggagtccggccattaaaaagagccagcagaaaggagccagggagtaacgcaccccagacccatggcagcagaaccaggatggagctgggactgtccagctctgccccctgctgctgccatgtgataggagacagtcggcacccccctctgaatttctgtatctgcatcttaacaatggggatgactatcccctctctggttattgtatcagagatgttaagagggtcatgtggcatgattggagaacctgggggaattggaaggccttattatctcagctattgtcccaaacaccacagacacagattgggtcagtccttcatgtaatacatgctgtgttctgtgaggatgtggtccacacaattccttctttgttaagggacatacagttgcaaatactcactgcaagaaggcaagattcccaagggagatgtgatagctgatcaggcttcccagacacctccttcccaaacacctccttcccaacacctccttccccaacatccttccccaacacctccttccccaacacttccttcccaacacctccttcccaaacccctccttccccaacatccttcccaacacctccttcccaaacacctccttcccaaacacctccttcccaaacacctccttcccaacacctccttccccaacacctccttcccaaacacctctttcccaaacacctccttcccagacacctccttcccaacaccgccttcccaacacctccttcccaaacccctttcccaaacatctccttcccaaacacctgcctctcttcaaccccacaggccagagtgctgagacagagtggccttttggattcaataagtatcttgttctcttaaagactcagcaacgattttagaagtcgcagcagttttacatcacatgcagccaagatcagcttgctctacaagcaataacagaactacttagcacttcaaggttgaaagttcttcactaatggatccattgactaattgatcctggaaggccaaaggaataaaattcttttatataaataggaaaacaaaggcagagagctaaagcactaatcaaatcggggggtgttagagcaaaaacaggcttcagaaagagtattttaccatgcttcacatggaaaaaatcgagccccggagcgatgaaaggcatattttctttgtttctccaagtttcataaccgttcagttgcagaaccaagaatctaaaaccagctctgggaaacaaatgtccagatgccagcctcatagttgaacttggatttgaaaataccttcagcacttagaagagacattcaaatacatttcatttcctgttacccagattgttcggaaagtattaaaaatttttcatttacctgctgatacggtttggatctgtgtccctaacaaatcccatgtcgagctgtggtccccggtgttggagatggagcctggtgggaggcagctggatcgtgaggtcatgggggtggagttctcacgaaggagttagcatcatccccttggcgctattctcgtgagagtaagttctcgtgagatctggttgtttaaaagtgtgcagcacctctccgctcactctcttcctcctgctcctgccgtgtaagatgcctgctccatctgccgcaagtgaaagcttcctgaggtctccccggaagcagatgctgccacgcttcctgtacagcctgcagaactgtggaccaatcaaacctcttttcttataaattacctggtcttggggatttctttatttaatgtgagaacgcatgcccttttggatctactgtttctacttttataaatttatcctgcagaaatacacaaatacacaaagatacatgtaaaaaaagtagtttactgcagtactgtttgtaataataaaaaatcaggctggacctggtggttcatgcctataattccaaccctttgggaggccgggacaggtggatcacctgaggtctggagctcgagaacaacctgaccaacatggagaaaccctgtctctactaaaaatacaaaactagctgggcattgtggcacatgcctgcaatcccagctacttgagaggctggggcaggagaatcactagaaccgggaggcggaagttgcagtgagccaagatcatgccattgcactccagcctgggcaacaagaggaaaacccagtctcaaaaaacaaaaaaaaaaatcatgtgggtattgcttaattctgatttcatatcattgaacactgtagatattaaaatgttcagcaggcacagttctgtaaaattgttcgtgatacattaagaatgaaagaatcaagttgtataataaggataacatcatcccacttttgtacaaataaatgtttggtgtttgtgtgtatgta

SEQ ID NO: 440975 - DNA, 565 bp, Homo sapiens
atccctttgaatcaggcctctctcttctcatcagtctgtagggaccttcccctactctgcctcttcctccatactaggttggaaaaatctggtttagcccactttttgcaacactcctgccaagtggtcttctacccattgcttgaaaatctctcttgacagggagctcactacctcacaaggcaggtcatttcattgtgggatctatagaaggttaagtaccacattctcctctaaaccttgcctacgacatgtttaatacttcatctacatagcagcccttcagataatcacaaccactttgcccccaagttttcaggttaagtagcatgaatttggtcattccttaaagacagggtttcaatttccacacatgatctctgcaaacaggcactgggttttcagtgtcctttttgaagggtcatataaaaataaggtaacaccacagtgccactacaccttctggggctggacttgtttcagcagctttggttgcactgaatttgggggagctgcatggtaccaggggtttattgggttgcagatatataaatgccctaaactt

SEQ ID NO: 440976 - DNA, 3697 bp, Homo sapiens
atgcagctcttggcttcgttcaaacggaccgcctttgctagcacccaatcagaacgctcgatcttcggctctcgtccaatgaacgcgcgtattggggaggggaaaaaagacggcgtgaagcccaatcgcagcgccattacacttgagggcaaagaggttaggaagccggcatggcgctccggtcaataaaatcgatagctggaagctgcctgtgttccaggcaaaggcggtgcggtagcagcgccgccattttccccgaaggcatcttccggtgcctttcacccaagttcgggcaggagtttcctgaataacagcaaaaggtttccgttagccccgcgggcgaccaattccgattccctccgggcctccccggccacgctcagccctggtccggcaggggctcctcgatcccaggggccgccagcgcccgagggccgaggcctggacacggaaggccgtggcgccggcttctcgggtcccatggcgccaccttcggctccgctccctgcgcagggaccaggaaaggccagacccagtcggaaaaggggcaggaggccgagggctctgaagttcgtggacgtggccgtgtacttctccccggaggagtggggctgcctgcggcccgcgcagagggccctgtaccgggacgtgatgcgggagacctacggtcacctgggcgcgctcgggtgcgcaggtcccaaaccagccctcatctcctggttggaacgaaacaccgatgactgggaaccggctgctctagatccgcaggagtacccgagagggctaacagtccagagaaaaagcagaaccagaaagaagaatggggagaaggaagtattcccgcctaaggaggcaccccgaaaggggaagcgaggccggaggcccagcaaaccccgactgattcctaggcagacgtccgggggccccatctgccctgactgcggctgtaccttccctgatcatcaggccctggagagccacaagtgcgcccagaatctaaaaaagccttacccttgcccagactgtgggcgccgcttttcctatccatccctgctggtcagtcaccggcgggcacactccggcgagtgcccctatgtttgtgaccagtgtggcaaacgtttctcccagcgcaagaacctctcccagcaccaggtcatccatacaggggagaagccctatcactgccctgactgtggtcgctgcttccggaggagccggtccttggccaatcaccggaccacacacacaggtgaaaaaccccaccagtgccctagctgtggacgtcgcttcgcctacccctccctgctagccatccaccagcgtacacacacgggagagaagccctacacttgcctcgagtgcaaccgccgcttccgccagcgcacggccctcgtcatccaccagcgcatccacacgggcgagaagccctacccgtgcccggactgcgagcggcgcttctcctcctcctctcgcctggtcagtcaccggcgtgtgcactctggggagcgtccctatgcctgcgagcactgtgaggcccgcttctcccagcgcagcacgctgctccagcaccagctcttgcacaccggagagaagccctacccctgcccagactgtgggcgtgccttccggcggagcggctccctggccatccatcgcagcacgcacacagaggagaagctgcacgcctgcgacgactgtggtcgccgctttgcctacccctcactgctggccagccaccggcgcgtgcactcgggcgagcggccctatgcctgcgacctttgctccaagcgttttgctcagtggagccacctggcccagcaccagctgctgcacacgggggagaagcctttcccctgcctcgagtgtggccggtgcttccgccagaggtggtctctggctgtccacaagtgtagccccaaggccccaaactgtagccctagatctgctatcgggggctccagtcagaggggcaacgcccattagaaggggaaggactgcctacgttcatttcattttatggagggtcccagaaaagggaaggaggagccccaggtcatacagggcagagtcagaactaaacccgggtctcctgctgcacagagctgaactttgtatcttgcaatgcgctggctgcctccctgtgcgtgtctggaacagtcccattaggagaggtgacgtcatttgcttaaagttttccaagctaccctatcctaaaatagtttgtgtggatatcagggctaaaagttctccccatctattttaggggctgtctgcttttctagtctgtccacacagggattacctgtcatcttgcatgcaatcaggagaatctcataggggcaggaccttcccctactctgcctcttcctccatactaggttggaaaaatctggtttagcccactttttgcaacactcctgccaagtggtcttctacccattgcttgaaaatctctcttgacagggagctcactacctcacaaggcaggtcatttcattgtgggatctatagaaggttaagtaccacattctcctctaaaccttgcctacgacatgtttaatacttcatctacatagcagcccttcagataatcacaaccactttgcccccaagttttcaggttaagtagcatgaatttggtcattccttaaagacagggtttcaatttccacacatgatctctgcaaacaggcactgggttttcagtgtcctttttgaagggtcatataaaaataaggtaacaccacagtgccactacaccttctggggctggacttgtttcagcagctttggttgcactgaatttgggggagctgcatggtaccaggggtttattgggttgcagatatataaatgccctaaacttaaaaaaaaaaaaaaagctataaaactaagtcttcatcttgtatttggaaaattggttcaagctgggtatgagacataagtgtagtcagctctgggagaaggttgctcttaaggagaagcagggacctgtggtttagcagcaggaagtgcaaatgggactggcttgtgctctacctggcagacctggattggcttcaggcagccagtgcctggaaaagcctggagaattgggccgtacttgaccctgattctcatcaggcacagatgaatcacaggcacctaagaatcggcacagaacttccatgaggcctcagtcagcattttttcacaaaatgagctgaggccattcaaggaggctagaaagagggaactgaatccagagaggaagagtctatagtcatcaagttgtatccatgccagcctccctccacagaggtggcagcagcgtggctcaatctgatccacctccatggcacccactgggtaggtgcttcataaagctttaccgagttaaatgtgaacaaggcctaccactttgccttgggcagctgcaccaaattagaatttccagatgtgactcatctcatattccaacagctggagtgggtcatcctttacccctgtggctccttcctacagctctcctgatctcagcacaagcaggggagcagctgggggaacacagctttatgtaattacctctgttcaatatttagcaagttgcattgtaacattgtaactgtttgtttctccttggatgatgagctacccccaagaaggggtcatatcagattgggtctcattaaaatgtctgatgaatgaaaaaaaatcc

SEQ ID NO: 440977 - DNA, 3425 bp, Homo sapiens
gctagaagcaaggagccccctgaccccttccttaaaacagatccttttgtctttgtcttcatttctgcgtttgtcctccttcattcagtcccaaaccaacagccacaagtggtgcctaatcagggacgtgaaggaagaagatctgctggagcagagaaactgaaactgaccagatgagtgagaaaccccaggacaaatctgctggcagaggatataagggcaaacaaagaagataaccattctccaaagtcaaggatgctctgagaacaccagtaaaaggaactcaggataatctcagctctaactcggccagagtggctccatcgctcaaatcgttccctccttcagtgattggctgagcctgccagagtcgaacagcggaaagcagccccggggcctcttgctgcccccagggtgcgcaggtcccaaaccagccctcatctcctggttggaacgaaacaccgatgactgggaaccggctgctctagatccgcaggagtacccgagagggctaacagtccagagaaaaagcagaaccagaaagaagaatggggagaaggaagtattcccgcctaaggaggcaccccgaaaggggaagcgaggccggaggcccagcaaaccccgactgattcctaggcagacgtccgggggccccatctgccctgactgcggctgtaccttccctgatcatcaggccctggagagccacaagtgcgcccagaatctaaaaaagccttacccttgcccagactgtgggcgccgcttttcctatccatccctgctggtcagtcaccggcgggcacactccggcgagtgcccctatgtttgtgaccagtgtggcaaacgtttctcccagcgcaagaacctctcccagcaccaggtcatccatacaggggagaagccctatcactgccctgactgtggtcgctgcttccggaggagccggtccttggccaatcaccggaccacacacacaggtgaaaaaccccaccagtgccctagctgtggacgtcgcttcgcctacccctccctgctagccatccaccagcgtacacacacgggagagaagccctacacttgcctcgagtgcaaccgccgcttccgccagcgcacggccctcgtcatccaccagcgcatccacacgggcgagaagccctacccgtgcccggactgcgagcggcgcttctcctcctcctctcgcctggtcagtcaccggcgtgtgcactctggggagcgtccctatgcctgcgagcactgtgaggcccgcttctcccagcgcagcacgctgctccagcaccagctcttgcacaccggagagaagccctacccctgcccagactgtgggcgtgccttccggcggagcggctccctggccatccatcgcagcacgcacacagaggagaagctgcacgcctgcgacgactgtggtcgccgctttgcctacccctcactgctggccagccaccggcgcgtgcactcgggcgagcggccctatgcctgcgacctttgctccaagcgttttgctcagtggagccacctggcccagcaccagctgctgcacacgggggagaagcctttcccctgcctcgagtgtggccggtgcttccgccagaggtggtctctggctgtccacaagtgtagccccaaggccccaaactgtagccctagatctgctatcgggggctccagtcagaggggcaacgcccattagaaggggaaggactgcctacgttcatttcattttatggagggtcccagaaaagggaaggaggagccccaggtcatacagggcagagtcagaactaaacccgggtctcctgctgcacagagctgaactttgtatcttgcaatgcgctggctgcctccctgtgcgtgtctggaacagtcccattaggagaggtgacgtcatttgcttaaagttttccaagctaccctatcctaaaatagtttgtgtggatatcagggctaaaagttctccccatctattttaggggctgtctgcttttctagtctgtccacacagggattacctgtcatcttgcatgcaatcaggagaatctcataggggcaggaccttcccctactctgcctcttcctccatactaggttggaaaaatctggtttagcccactttttgcaacactcctgccaagtggtcttctacccattgcttgaaaatctctcttgacagggagctcactacctcacaaggcaggtcatttcattgtgggatctatagaaggttaagtaccacattctcctctaaaccttgcctacgacatgtttaatacttcatctacatagcagcccttcagataatcacaaccactttgcccccaagttttcaggttaagtagcatgaatttggtcattccttaaagacagggtttcaatttccacacatgatctctgcaaacaggcactgggttttcagtgtcctttttgaagggtcatataaaaataaggtaacaccacagtgccactacaccttctggggctggacttgtttcagcagctttggttgcactgaatttgggggagctgcatggtaccaggggtttattgggttgcagatatataaatgccctaaacttaaaaaaaaaaaaaaagctataaaactaagtcttcatcttgtatttggaaaattggttcaagctgggtatgagacataagtgtagtcagctctgggagaaggttgctcttaaggagaagcagggacctgtggtttagcagcaggaagtgcaaatgggactggcttgtgctctacctggcagacctggattggcttcaggcagccagtgcctggaaaagcctggagaattgggccgtacttgaccctgattctcatcaggcacagatgaatcacaggcacctaagaatcggcacagaacttccatgaggcctcagtcagcattttttcacaaaatgagctgaggccattcaaggaggctagaaagagggaactgaatccagagaggaagagtctatagtcatcaagttgtatccatgccagcctccctccacagaggtggcagcagcgtggctcaatctgatccacctccatggcacccactgggtaggtgcttcataaagctttaccgagttaaatgtgaacaaggcctaccactttgccttgggcagctgcaccaaattagaatttccagatgtgactcatctcatattccaacagctggagtgggtcatcctttacccctgtggctccttcctacagctctcctgatctcagcacaagcaggggagcagctgggggaacacagctttatgtaattacctctgttcaatatttagcaagttgcattgtaacattgtaactgtttgtttctccttggatgatgagctacccccaagaaggggtcatatcagattgggtctcattaaaatgtctgatgaatgaaaaaaaatcc

SEQ ID NO: 440978 - DNA, 3230 bp, Homo sapiens
gctagaagcaaggagccccctgaccccttccttaaaacagatccttttgtctttgtcttcatttctgcgtttgtcctccttcattcagtcccaaaccaacagccacaagtggtgcctaatcagggacgtgaaggaagaagatctgctggagcagagaaactgaaactgaccagatgagtgagaaaccccaggacaaatctgctggcagaggatataagggtgcgcaggtcccaaaccagccctcatctcctggttggaacgaaacaccgatgactgggaaccggctgctctagatccgcaggagtacccgagagggctaacagtccagagaaaaagcagaaccagaaagaagaatggggagaaggaagtattcccgcctaaggaggcaccccgaaaggggaagcgaggccggaggcccagcaaaccccgactgattcctaggcagacgtccgggggccccatctgccctgactgcggctgtaccttccctgatcatcaggccctggagagccacaagtgcgcccagaatctaaaaaagccttacccttgcccagactgtgggcgccgcttttcctatccatccctgctggtcagtcaccggcgggcacactccggcgagtgcccctatgtttgtgaccagtgtggcaaacgtttctcccagcgcaagaacctctcccagcaccaggtcatccatacaggggagaagccctatcactgccctgactgtggtcgctgcttccggaggagccggtccttggccaatcaccggaccacacacacaggtgaaaaaccccaccagtgccctagctgtggacgtcgcttcgcctacccctccctgctagccatccaccagcgtacacacacgggagagaagccctacacttgcctcgagtgcaaccgccgcttccgccagcgcacggccctcgtcatccaccagcgcatccacacgggcgagaagccctacccgtgcccggactgcgagcggcgcttctcctcctcctctcgcctggtcagtcaccggcgtgtgcactctggggagcgtccctatgcctgcgagcactgtgaggcccgcttctcccagcgcagcacgctgctccagcaccagctcttgcacaccggagagaagccctacccctgcccagactgtgggcgtgccttccggcggagcggctccctggccatccatcgcagcacgcacacagaggagaagctgcacgcctgcgacgactgtggtcgccgctttgcctacccctcactgctggccagccaccggcgcgtgcactcgggcgagcggccctatgcctgcgacctttgctccaagcgttttgctcagtggagccacctggcccagcaccagctgctgcacacgggggagaagcctttcccctgcctcgagtgtggccggtgcttccgccagaggtggtctctggctgtccacaagtgtagccccaaggccccaaactgtagccctagatctgctatcgggggctccagtcagaggggcaacgcccattagaaggggaaggactgcctacgttcatttcattttatggagggtcccagaaaagggaaggaggagccccaggtcatacagggcagagtcagaactaaacccgggtctcctgctgcacagagctgaactttgtatcttgcaatgcgctggctgcctccctgtgcgtgtctggaacagtcccattaggagaggtgacgtcatttgcttaaagttttccaagctaccctatcctaaaatagtttgtgtggatatcagggctaaaagttctccccatctattttaggggctgtctgcttttctagtctgtccacacagggattacctgtcatcttgcatgcaatcaggagaatctcataggggcaggaccttcccctactctgcctcttcctccatactaggttggaaaaatctggtttagcccactttttgcaacactcctgccaagtggtcttctacccattgcttgaaaatctctcttgacagggagctcactacctcacaaggcaggtcatttcattgtgggatctatagaaggttaagtaccacattctcctctaaaccttgcctacgacatgtttaatacttcatctacatagcagcccttcagataatcacaaccactttgcccccaagttttcaggttaagtagcatgaatttggtcattccttaaagacagggtttcaatttccacacatgatctctgcaaacaggcactgggttttcagtgtcctttttgaagggtcatataaaaataaggtaacaccacagtgccactacaccttctggggctggacttgtttcagcagctttggttgcactgaatttgggggagctgcatggtaccaggggtttattgggttgcagatatataaatgccctaaacttaaaaaaaaaaaaaaagctataaaactaagtcttcatcttgtatttggaaaattggttcaagctgggtatgagacataagtgtagtcagctctgggagaaggttgctcttaaggagaagcagggacctgtggtttagcagcaggaagtgcaaatgggactggcttgtgctctacctggcagacctggattggcttcaggcagccagtgcctggaaaagcctggagaattgggccgtacttgaccctgattctcatcaggcacagatgaatcacaggcacctaagaatcggcacagaacttccatgaggcctcagtcagcattttttcacaaaatgagctgaggccattcaaggaggctagaaagagggaactgaatccagagaggaagagtctatagtcatcaagttgtatccatgccagcctccctccacagaggtggcagcagcgtggctcaatctgatccacctccatggcacccactgggtaggtgcttcataaagctttaccgagttaaatgtgaacaaggcctaccactttgccttgggcagctgcaccaaattagaatttccagatgtgactcatctcatattccaacagctggagtgggtcatcctttacccctgtggctccttcctacagctctcctgatctcagcacaagcaggggagcagctgggggaacacagctttatgtaattacctctgttcaatatttagcaagttgcattgtaacattgtaactgtttgtttctccttggatgatgagctacccccaagaaggggtcatatcagattgggtctcattaaaatgtctgatgaatgaaaaaaaatcc

SEQ ID NO: 440979 - DNA, 2953 bp, Homo sapiens
ctcctataacgttctacctctaacggctctgtccagagttttggttgggctagggaaagcagaaccagaaagaagaatggggagaaggaagtattcccgcctaaggaggcaccccgaaaggggaagcgaggccggaggcccagcaaaccccgactgattcctaggcagacgtccgggggccccatctgccctgactgcggctgtaccttccctgatcatcaggccctggagagccacaagtgcgcccagaatctaaaaaagccttacccttgcccagactgtgggcgccgcttttcctatccatccctgctggtcagtcaccggcgggcacactccggcgagtgcccctatgtttgtgaccagtgtggcaaacgtttctcccagcgcaagaacctctcccagcaccaggtcatccatacaggggagaagccctatcactgccctgactgtggtcgctgcttccggaggagccggtccttggccaatcaccggaccacacacacaggtgaaaaaccccaccagtgccctagctgtggacgtcgcttcgcctacccctccctgctagccatccaccagcgtacacacacgggagagaagccctacacttgcctcgagtgcaaccgccgcttccgccagcgcacggccctcgtcatccaccagcgcatccacacgggcgagaagccctacccgtgcccggactgcgagcggcgcttctcctcctcctctcgcctggtcagtcaccggcgtgtgcactctggggagcgtccctatgcctgcgagcactgtgaggcccgcttctcccagcgcagcacgctgctccagcaccagctcttgcacaccggagagaagccctacccctgcccagactgtgggcgtgccttccggcggagcggctccctggccatccatcgcagcacgcacacagaggagaagctgcacgcctgcgacgactgtggtcgccgctttgcctacccctcactgctggccagccaccggcgcgtgcactcgggcgagcggccctatgcctgcgacctttgctccaagcgttttgctcagtggagccacctggcccagcaccagctgctgcacacgggggagaagcctttcccctgcctcgagtgtggccggtgcttccgccagaggtggtctctggctgtccacaagtgtagccccaaggccccaaactgtagccctagatctgctatcgggggctccagtcagaggggcaacgcccattagaaggggaaggactgcctacgttcatttcattttatggagggtcccagaaaagggaaggaggagccccaggtcatacagggcagagtcagaactaaacccgggtctcctgctgcacagagctgaactttgtatcttgcaatgcgctggctgcctccctgtgcgtgtctggaacagtcccattaggagaggtgacgtcatttgcttaaagttttccaagctaccctatcctaaaatagtttgtgtggatatcagggctaaaagttctccccatctattttaggggctgtctgcttttctagtctgtccacacagggattacctgtcatcttgcatgcaatcaggagaatctcataggggcaggaccttcccctactctgcctcttcctccatactaggttggaaaaatctggtttagcccactttttgcaacactcctgccaagtggtcttctacccattgcttgaaaatctctcttgacagggagctcactacctcacaaggcaggtcatttcattgtgggatctatagaaggttaagtaccacattctcctctaaaccttgcctacgacatgtttaatacttcatctacatagcagcccttcagataatcacaaccactttgcccccaagttttcaggttaagtagcatgaatttggtcattccttaaagacagggtttcaatttccacacatgatctctgcaaacaggcactgggttttcagtgtcctttttgaagggtcatataaaaataaggtaacaccacagtgccactacaccttctggggctggacttgtttcagcagctttggttgcactgaatttgggggagctgcatggtaccaggggtttattgggttgcagatatataaatgccctaaacttaaaaaaaaaaaaaaagctataaaactaagtcttcatcttgtatttggaaaattggttcaagctgggtatgagacataagtgtagtcagctctgggagaaggttgctcttaaggagaagcagggacctgtggtttagcagcaggaagtgcaaatgggactggcttgtgctctacctggcagacctggattggcttcaggcagccagtgcctggaaaagcctggagaattgggccgtacttgaccctgattctcatcaggcacagatgaatcacaggcacctaagaatcggcacagaacttccatgaggcctcagtcagcattttttcacaaaatgagctgaggccattcaaggaggctagaaagagggaactgaatccagagaggaagagtctatagtcatcaagttgtatccatgccagcctccctccacagaggtggcagcagcgtggctcaatctgatccacctccatggcacccactgggtaggtgcttcataaagctttaccgagttaaatgtgaacaaggcctaccactttgccttgggcagctgcaccaaattagaatttccagatgtgactcatctcatattccaacagctggagtgggtcatcctttacccctgtggctccttcctacagctctcctgatctcagcacaagcaggggagcagctgggggaacacagctttatgtaattacctctgttcaatatttagcaagttgcattgtaacattgtaactgtttgtttctccttggatgatgagctacccccaagaaggggtcatatcagattgggtctcattaaaatgtctgatgaatgaaaaaaaatcc

SEQ ID NO: 440980 - DNA, 2744 bp, Homo sapiens
atgcagctcttggcttcgttcaaacggaccgcctttgctagcacccaatcagaacgctcgatcttcggctctcgtccaatgaacgcgcgtattggggaggggaaaaaagacggcgtgaagcccaatcgcagcgccattacacttgagggcaaagaggttaggaagccggcatggcgctccggtcaataaaatcgatagctggaagctgcctgtgttccaggcaaaggcggtgcggtagcagcgccgccattttccccgaaggcatcttccggtgcctttcacccaagttcgggcaggagtttcctgaataacagcaaaaggtttccgttagccccgcgggcgaccaattccgattccctccgggcctccccggccacgctcagccctggtccggcaggggctcctcgatcccaggggccgccagcgcccgagggccgaggcctggacacggaaggccgtggcgccggcttctcgggtcccatggcgccaccttcggctccgctccctgcgcagggaccaggaaaggccagacccagtcggaaaaggggcaggaggccgagggctctgaagttcgtggacgtggccgtgtacttctccccggaggagtggggctgcctgcggcccgcgcagagggccctgtaccgggacgtgatgcgggagacctacggtcacctgggcgcgctcgggtgcgcaggtcccaaaccagccctcatctcctggttggaacgaaacaccgatgactgggaaccggctgctctagatccgcaggagtacccgagagggctaacagtccagagaaaaagcagaaccagaaagaagaatggggagaaggaagtattcccgcctaaggaggcaccccgaaaggggaagcgaggccggaggcccagcaaaccccgactgattcctaggcagacgtccgggggccccatctgccctgactgcggctgtaccttccctgatcatcaggccctggagagccacaagtgcgcccagaatctaaaaaagccttacccttgcccagactgtgggcgccgcttttcctatccatccctgctggtcagtcaccggcgggcacactccggcgagtgcccctatgtttgtgaccagtgtggcaaacgtttctcccagcgcaagaacctctcccagcaccaggtcatccatacaggggagaagccctatcactgccctgactgtggtcgctgcttccggaggagccggtccttggccaatcaccggaccacacacacaggtgaaaaaccccaccagtgccctagctgtggacgtcgcttcgcctacccctccctgctagccatccaccagcgtacacacacgggagagaagccctacacttgcctcgagtgcaaccgccgcttccgccagcgcacggccctcgtcatccaccagcgcatccacacgggcgagaagccctacccgtgcccggactgcgagcggcgcttctcctcctcctctcgcctggtcagtcaccggcgtgtgcactctggggagcgtccctatgcctgcgagcactgtgaggcccgcttctcccagcgcagcacgctgctccagcaccagctcttgcacaccggagagaagccctacccctgcccagactgtgggcgtgccttccggcggagcggctccctggccatccatcgcagcacgcacacagaggagaagctgcacgcctgcgacgactgtggtcgccgctttgcctacccctcactgctggccagccaccggcgcgtgcactcgggcgagcggccctatgcctgcgacctttgctccaagcgttttgctcagtggagccacctggcccagcaccagctgctgcacacgggggagaagcctttcccctgcctcgagtgtggccggtgcttccgccagaggtggtctctggctgtccacaagtgtagccccaaggccccaaactgtagccctagatctgctatcgggggctccagtcagaggggcaacgcccattagaaggggaaggactgcctacgttcatttcattttatggagggtcccagaaaagggaaggaggagccccaggtcatacagggcagagtcagaactaaacccgggtctcctgctgcacagagctgaactttgtatcagtgcctggaaaagcctggagaattgggccgtacttgaccctgattctcatcaggcacagatgaatcacaggcacctaagaatcggcacagaacttccatgaggcctcagtcagcattttttcacaaaatgagctgaggccattcaaggaggctagaaagagggaactgaatccagagaggaagagtctatagtcatcaagttgtatccatgccagcctccctccacagaggtggcagcagcgtggctcaatctgatccacctccatggcacccactgggtaggtgcttcataaagctttaccgagttaaatgtgaacaaggcctaccactttgccttgggcagctgcaccaaattagaatttccagatgtgactcatctcatattccaacagctggagtgggtcatcctttacccctgtggctccttcctacagctctcctgatctcagcacaagcaggggagcagctgggggaacacagctttatgtaattacctctgttcaatatttagcaagttgcattgtaacattgtaactgtttgtttctccttggatgatgagctacccccaagaaggggtcatatcagattgggtctcattaaaatgtctgatgaatgaaaaaaaatcc

SEQ ID NO: 440981 - DNA, 2866 bp, Homo sapiens
atgcagctcttggcttcgttcaaacggaccgcctttgctagcacccaatcagaacgctcgatcttcggctctcgtccaatgaacgcgcgtattggggaggggaaaaaagacggcgtgaagcccaatcgcagcgccattacacttgagggcaaagaggttaggaagccggcatggcgctccggtcaataaaatcgatagctggaagctgcctgtgttccaggcaaaggcggtgcggtagcagcgccgccattttccccgaaggcatcttccggtgcctttcacccaagttcgggcaggagtttcctgaataacagcaaaaggtttccgttagccccgcgggcgaccaattccgattccctccgggcctccccggccacgctcagccctggtccggcaggggctcctcgatcccaggggccgccagcgcccgagggccgaggcctggacacggaaggccgtggcgccggcttctcgggtcccatggcgccaccttcggctccgctccctgcgcagggaccaggaaaggccagacccagtcggaaaaggggcaggaggccgagggctctgaagttcgtggacgtggccgtgtacttctccccggaggagtggggctgcctgcggcccgcgcagagggccctgtaccgggacgtgatgcgggagacctacggtcacctgggcgcgctcgggtgcgcaggtcccaaaccagccctcatctcctggttggaacgaaacaccgatgactgggaaccggctgctctagatccgcaggagtacccgagagggctaacagtccagagaaaaagcagaaccagaaagaagaatggggagaaggaagtattcccgcctaaggaggcaccccgaaaggggaagcgaggccggaggcccagcaaaccccgactgattcctaggcagacgtccgggggccccatctgccctgactgcggctgtaccttccctgatcatcaggccctggagagccacaagtgcgcccagaatctaaaaaagccttacccttgcccagactgtgggcgccgcttttcctatccatccctgctggtcagtcaccggcgggcacactccggcgagtgcccctatgtttgtgaccagtgtggcaaacgtttctcccagcgcaagaacctctcccagcaccaggtcatccatacaggggagaagccctatcactgccctgactgtggtcgctgcttccggaggagccggtccttggccaatcaccggaccacacacacaggtgaaaaaccccaccagtgccctagctgtggacgtcgcttcgcctacccctccctgctagccatccaccagcgtacacacacgggagagaagccctacacttgcctcgagtgcaaccgccgcttccgccagcgcacggccctcgtcatccaccagcgcatccacacgggcgagaagccctacccgtgcccggactgcgagcggcgcttctcctcctcctctcgcctggtcagtcaccggcgtgtgcactctggggagcgtccctatgcctgcgagcactgtgaggcccgcttctcccagcgcagcacgctgctccagcaccagctcttgcacaccggagagaagccctacccctgcccagactgtgggcgtgccttccggcggagcggctccctggccatccatcgcagcacgcacacagaggagaagctgcacgcctgcgacgactgtggtcgccgctttgcctacccctcactgctggccagccaccggcgcgtgcactcgggcgagcggccctatgcctgcgacctttgctccaagcgttttgctcagtggagccacctggcccagcaccagctgctgcacacgggggagaagcctttcccctgcctcgagtgtggccggtgcttccgccagaggtggtctctggctgtccacaagtgtagccccaaggccccaaactgtagccctagatctgctatcgggggctccagtcagaggggcaacgcccattagaaggggaaggactgcctacgttcatttcattttatggagggtcccagaaaagggaaggaggagccccaggtcatacagggcagagtcagaactaaacccgggtctcctgctgcacagagctgaactttgtatcttgcaatgcgctggctgcctccctgtgcgtgtctggaacagtcccattaggagaggtgacgtcatttgcttaaagttttccaagctaccctatcctaaaatagtttgtgtggatatcagggctaaaagttctccccatctattttaggggctgtctgcttttctagtctgtccacacagggattacctgtcatcttgcatgcaatcaggagaatctcataggggcaggaccttcccctactctgcctcttcctccatactaggttggaaaaatctggtttagcccactttttgcaacactcctgccaagtggtcttctacccattgcttgaaaatctctcttgacagggagctcactacctcacaaggcaggtcatttcattgtgggatctatagaaggttaagtaccacattctcctctaaaccttgcctacgacatgtttaatacttcatctacatagcagcccttcagataatcacaaccactttgcccccaagttttcaggttaagtagcatgaatttggtcattccttaaagacagggtttcaatttccacacatgatctctgcaaacaggcactgggttttcagtgtcctttttgaagggtcatataaaaataaggtaacaccacagtgccactacaccttctggggctggacttgtttcagcagctttggttgcactgaatttgggggagctgcatggtaccaggggtttattgggttgcagatatataaatgccctaaactt

SEQ ID NO: 440982 - DNA, 3168 bp, Homo sapiens
atgcagctcttggcttcgttcaaacggaccgcctttgctagcacccaatcagaacgctcgatcttcggctctcgtccaatgaacgcgcgtattggggaggggaaaaaagacggcgtgaagcccaatcgcagcgccattacacttgagggcaaagagggtgcgcaggtcccaaaccagccctcatctcctggttggaacgaaacaccgatgactgggaaccggctgctctagatccgcaggagtacccgagagggctaacagtccagagaaaaagcagaaccagaaagaagaatggggagaaggaagtattcccgcctaaggaggcaccccgaaaggggaagcgaggccggaggcccagcaaaccccgactgattcctaggcagacgtccgggggccccatctgccctgactgcggctgtaccttccctgatcatcaggccctggagagccacaagtgcgcccagaatctaaaaaagccttacccttgcccagactgtgggcgccgcttttcctatccatccctgctggtcagtcaccggcgggcacactccggcgagtgcccctatgtttgtgaccagtgtggcaaacgtttctcccagcgcaagaacctctcccagcaccaggtcatccatacaggggagaagccctatcactgccctgactgtggtcgctgcttccggaggagccggtccttggccaatcaccggaccacacacacaggtgaaaaaccccaccagtgccctagctgtggacgtcgcttcgcctacccctccctgctagccatccaccagcgtacacacacgggagagaagccctacacttgcctcgagtgcaaccgccgcttccgccagcgcacggccctcgtcatccaccagcgcatccacacgggcgagaagccctacccgtgcccggactgcgagcggcgcttctcctcctcctctcgcctggtcagtcaccggcgtgtgcactctggggagcgtccctatgcctgcgagcactgtgaggcccgcttctcccagcgcagcacgctgctccagcaccagctcttgcacaccggagagaagccctacccctgcccagactgtgggcgtgccttccggcggagcggctccctggccatccatcgcagcacgcacacagaggagaagctgcacgcctgcgacgactgtggtcgccgctttgcctacccctcactgctggccagccaccggcgcgtgcactcgggcgagcggccctatgcctgcgacctttgctccaagcgttttgctcagtggagccacctggcccagcaccagctgctgcacacgggggagaagcctttcccctgcctcgagtgtggccggtgcttccgccagaggtggtctctggctgtccacaagtgtagccccaaggccccaaactgtagccctagatctgctatcgggggctccagtcagaggggcaacgcccattagaaggggaaggactgcctacgttcatttcattttatggagggtcccagaaaagggaaggaggagccccaggtcatacagggcagagtcagaactaaacccgggtctcctgctgcacagagctgaactttgtatcttgcaatgcgctggctgcctccctgtgcgtgtctggaacagtcccattaggagaggtgacgtcatttgcttaaagttttccaagctaccctatcctaaaatagtttgtgtggatatcagggctaaaagttctccccatctattttaggggctgtctgcttttctagtctgtccacacagggattacctgtcatcttgcatgcaatcaggagaatctcataggggcaggaccttcccctactctgcctcttcctccatactaggttggaaaaatctggtttagcccactttttgcaacactcctgccaagtggtcttctacccattgcttgaaaatctctcttgacagggagctcactacctcacaaggcaggtcatttcattgtgggatctatagaaggttaagtaccacattctcctctaaaccttgcctacgacatgtttaatacttcatctacatagcagcccttcagataatcacaaccactttgcccccaagttttcaggttaagtagcatgaatttggtcattccttaaagacagggtttcaatttccacacatgatctctgcaaacaggcactgggttttcagtgtcctttttgaagggtcatataaaaataaggtaacaccacagtgccactacaccttctggggctggacttgtttcagcagctttggttgcactgaatttgggggagctgcatggtaccaggggtttattgggttgcagatatataaatgccctaaacttaaaaaaaaaaaaaaagctataaaactaagtcttcatcttgtatttggaaaattggttcaagctgggtatgagacataagtgtagtcagctctgggagaaggttgctcttaaggagaagcagggacctgtggtttagcagcaggaagtgcaaatgggactggcttgtgctctacctggcagacctggattggcttcaggcagccagtgcctggaaaagcctggagaattgggccgtacttgaccctgattctcatcaggcacagatgaatcacaggcacctaagaatcggcacagaacttccatgaggcctcagtcagcattttttcacaaaatgagctgaggccattcaaggaggctagaaagagggaactgaatccagagaggaagagtctatagtcatcaagttgtatccatgccagcctccctccacagaggtggcagcagcgtggctcaatctgatccacctccatggcacccactgggtaggtgcttcataaagctttaccgagttaaatgtgaacaaggcctaccactttgccttgggcagctgcaccaaattagaatttccagatgtgactcatctcatattccaacagctggagtgggtcatcctttacccctgtggctccttcctacagctctcctgatctcagcacaagcaggggagcagctgggggaacacagctttatgtaattacctctgttcaatatttagcaagttgcattgtaacattgtaactgtttgtttctccttggatgatgagctacccccaagaaggggtcatatcagattgggtctcattaaaatgtctgatgaatgaaaaaaaatcc

SEQ ID NO: 440983 - DNA, 2220 bp, Homo sapiens
taggctagtagagctgggtgttaatcggccgtccctatgcctgcgagcactgtgaggcccgcttctcccagcgcagcacgctgctccagcaccagctcttgcacaccggagagaagccctacccctgcccagactgtgggcgtgccttccggcggagcggctccctggccatccatcgcagcacgcacacagaggagaagctgcacgcctgcgacgactgtggtcgccgctttgcctacccctcactgctggccagccaccggcgcgtgcactcgggcgagcggccctatgcctgcgacctttgctccaagcgttttgctcagtggagccacctggcccagcaccagctgctgcacacgggggagaagcctttcccctgcctcgagtgtggccggtgcttccgccagaggtggtctctggctgtccacaagtgtagccccaaggccccaaactgtagccctagatctgctatcgggggctccagtcagaggggcaacgcccattagaaggggaaggactgcctacgttcatttcattttatggagggtcccagaaaagggaaggaggagccccaggtcatacagggcagagtcagaactaaacccgggtctcctgctgcacagagctgaactttgtatcttgcaatgcgctggctgcctccctgtgcgtgtctggaacagtcccattaggagaggtgacgtcatttgcttaaagttttccaagctaccctatcctaaaatagtttgtgtggatatcagggctaaaagttctccccatctattttaggggctgtctgcttttctagtctgtccacacagggattacctgtcatcttgcatgcaatcaggagaatctcataggggcaggaccttcccctactctgcctcttcctccatactaggttggaaaaatctggtttagcccactttttgcaacactcctgccaagtggtcttctacccattgcttgaaaatctctcttgacagggagctcactacctcacaaggcaggtcatttcattgtgggatctatagaaggttaagtaccacattctcctctaaaccttgcctacgacatgtttaatacttcatctacatagcagcccttcagataatcacaaccactttgcccccaagttttcaggttaagtagcatgaatttggtcattccttaaagacagggtttcaatttccacacatgatctctgcaaacaggcactgggttttcagtgtcctttttgaagggtcatataaaaataaggtaacaccacagtgccactacaccttctggggctggacttgtttcagcagctttggttgcactgaatttgggggagctgcatggtaccaggggtttattgggttgcagatatataaatgccctaaacttaaaaaaaaaaaaaaagctataaaactaagtcttcatcttgtatttggaaaattggttcaagctgggtatgagacataagtgtagtcagctctgggagaaggttgctcttaaggagaagcagggacctgtggtttagcagcaggaagtgcaaatgggactggcttgtgctctacctggcagacctggattggcttcaggcagccagtgcctggaaaagcctggagaattgggccgtacttgaccctgattctcatcaggcacagatgaatcacaggcacctaagaatcggcacagaacttccatgaggcctcagtcagcattttttcacaaaatgagctgaggccattcaaggaggctagaaagagggaactgaatccagagaggaagagtctatagtcatcaagttgtatccatgccagcctccctccacagaggtggcagcagcgtggctcaatctgatccacctccatggcacccactgggtaggtgcttcataaagctttaccgagttaaatgtgaacaaggcctaccactttgccttgggcagctgcaccaaattagaatttccagatgtgactcatctcatattccaacagctggagtgggtcatcctttacccctgtggctccttcctacagctctcctgatctcagcacaagcaggggagcagctgggggaacacagctttatgtaattacctctgttcaatatttagcaagttgcattgtaacattgtaactgtttgtttctccttggatgatgagctacccccaagaaggggtcatatcagattgggtctcattaaaatgtctgatgaatgaaaaaaaatcc

SEQ ID NO: 440984 - DNA, 562 bp, Homo sapiens
cggaggagtggggctgcctgcggcccgcgcagagggccctgtaccgggacgtgatgcgggagacctacggtcacctgggcgcgctcggtgaggccggccccatccgctgccgcggggcgcgaagggatgcaggagccggagagggtgtaggcagggaggccacggtcctggcaggcgaccaggttgtcaggggaggtgggcaggggcttagcaggaggtgccgtcggggagatactactcggcgtgatctaggagctggccttctgatttgttctctttccccagggtgcgcaggtcccaaaccagccctcatctcctggttggaacgaaacaccgatgactgggaaccggctgctctagatccgcaggagtacccgagagggctaacagtccagagaagtgagtgctaaataaccacgcagagcctgcagccctcctataacgttctacctctaacggctctgtccagagttttggttgggctaggggtgggtgccgcgtatttagtatattcatcttcccagcctcttgtgtctggtggtgtggggccggtccaccacac

SEQ ID NO: 440985 - DNA, 350 bp, Homo sapiens
tttaagaattagtttcattgaagtacggggacttatacaacccagtattagttttgagcgtacagacatatgtggaactattcttggaaagtctacaaagtgaaatctatcgagttatttctcatttgcaaagtgatcctttgagtcatttctcataatctataatctgaatgttaatactgatatttttaaaagccctacatcccaacagaccaggccatctagatatttcagcgtggtgtctcaggatgagtaaacaaacagctaaaaatatatgacttatgtaaactagagttacaggagttactagcttttctgaaagggatatattctaagtattttttcttaaa

SEQ ID NO: 440986 - DNA, 2995 bp, Homo sapiens
ccctcgtctgggccgagcccgcccagctggctgagacgcgtggagcctggcggcgagtgggggcgtgcgacggttactctggttactggggccgcgccgcgctggcgagagccgccgcccgcgagggatgctggtgaggaagccgtcgggagccgccgccgccatctgagggaggtaccctggaaaccaccttttatcggtggggaagtgcagtcgcggtgggcggctctgggggccagcgaaacgggaggcctctaaatctttaggttggggctgcattgccctggagccgcactcttgagtccgaggccatcttttgttggagaaggcgtcggcgttggcgttttcccgaggttgggctgtacagtgtctccgtccgcggaaaaagaagcctctgaacccgcgccggcccgcagcccccgtgccttccggccgctgctcgccgtcgccagaggctaggccacgtttcccccagtgccgaggtgtttctgtgaccctccctccactcccattcccttctgaaagggcacctgctcttggtgagaaaagaaattatagcacgaagagccagtatcagaagagtatccatcacccgcagcaaccgctcagggaacaccatcaaaaaagaaaaaaagggaatatctggatttcctgggcgaggaggagcgagtctgctcgggagctgttccagcaggcgatttttaaatactgctttctacgccctatacaacttggcttcacatacttttacactaactttatatgatttttaaaaactggtctgatcggacttctcgtcctgggacactgtttactggagtctggccggctctccgtgctcctcttggtacctcattttggggagaaccttaaacccactcgagcagataatctccgccttgaccgggtgccaccaaagaagccttggaaccatgtggacttttctgggcattgccactttcacctatttttataagaagttcggggacttcatcactttggccaacagggaggtcctgttgtgcgtgctggtgttcctctcgctgggcctggtgctctcctaccgctgtcgccaccgaaacgggggtctcctcgggcgccagcagagcggctcccagttcgccctcttctcggatattctctcaggcctgcctttcattggcttcttctgggccaaatccccccctgaatcagaaaataaggagcagctcgaggccaggaggcgcagaaaaggaaccaatatttcagaaacaagcttaataggaacagctgcctgtacatcaacatcttctcagaatgacccagaagttatcatcgtgggagctggcgtgcttggctctgctttggcagctgtgctttccagagatggaagaaaggtgacagtcattgagagagacttaaaagagcctgacagaatagttggagaattcctgcagccgggtggttatcatgttctcaaagaccttggtcttggagatacagtggaaggtcttgatgcccaggttgtaaatggttacatgattcatgatcaggaaagcaaatcagaggttcagattccttaccctctgtcagaaaacaatcaagtgcagagtggaagagctttccatcacggaagattcatcatgagtctccggaaagcagctatggcagagcccaatgcaaagtttattgaaggtgttgtgttacagttattagaggaagatgatgttgtgatgggagttcagtacaaggataaagagactggagatatcaaggaactccatgctccactgactgttgttgcagatgggcttttctccaagttcaggaaaagcctggtctccaataaagtttctgtatcatctcattttgttggctttcttatgaagaatgcaccacagtttaaagcaaatcatgctgaacttattttagctaacccgagtccagttctcatctaccagatttcatccagtgaaactcgagtacttgttgacattagaggagaaatgccaaggaatttaagagaatacatggttgaaaaaatttacccacaaatacctgatcacctgaaagaaccattcttagaagccactgacaattctcatctgaggtccatgccagcaagcttccttcctccttcatcagtgaagaaacgaggtgttcttcttttgggagacgcatataatatgaggcatccacttactggtggaggaatgactgttgcttttaaagatataaaactatggagaaaactgctaaagggtatccctgacctttatgatgatgcagctattttcgaggccaaaaaatcattttactgggcaagaaaaacatctcattcctttgtcgtgaatatccttgctcaggctctttatgaattattttctgccacagatgattccctgcatcaactaagaaaagcctgttttctttatttcaaacttggtggcgaatgtgttgcgggtcctgttgggctgctttctgtattgtctcctaaccctctagttttaattggacacttctttgctgttgcaatctatgccgtgtatttttgctttaagtcagaaccttggattacaaaacctcgagcccttctcagtagtggtgctgtattgtacaaagcgtgttctgtaatatttcctctaatttactcagaaatgaagtatatggttcattaagcttaaaggggaaccatttgtgaatgaatatttggaacttaccaagtcctaagagacttttggaagaggatatatatagcatagtaccataccacttataaagtggaaactcttggaccaagatttggattaatttgtttttgaagttttttgtatataaatatgtaaatacatgctttaatttgcaatttaaaatgaaggggttaaataagttagacatttaaaagaaatgattgttaccataaattagtgctaatgctgaggagaactacagtttttcttttgaatttagtatttgagatgagttgttgggacatgcaaataaaatgaagaatgaa

SEQ ID NO: 440987 - DNA, 3164 bp, Homo sapiens
ccctcgtctgggccgagcccgcccagctggctgagacgcgtggagcctggcggcgagtgggggcgtgcgacggttactctggttactggggccgcgccgcgctggcgagagccgccgcccgcgagggatgctggtgaggaagccgtcgggagccgccgccgccatctgagggaggtaccctggaaaccaccttttatcggtggggaagtgcagtcgcggtgggcggctctgggggccagcgaaacgggaggcctctaaatctttaggttggggctgcattgccctggagccgcactcttgagtccgaggccatcttttgttggagaaggcgtcggcgttggcgttttcccgaggttgggctgtacagtgtctccgtccgcggaaaaagaagcctctgaacccgcgccggcccgcagcccccgtgccttccggccgctgctcgccgtcgccagaggctaggccacgtttcccccagtgccgaggtgtttctgtgaccctccctccactcccattcccttctgaaagggcacctgctcttggtgagaaaagaaattatagcacgaagagccagtatcagaagagtatccatcacccgcagcaaccgctcagggaacaccatcaaaaaagaaaaaaagggaatatctggatttcctgggcgaggaggagcgagtctgctcgggagctgttccagcaggcgatttttaaatactgctttctacgccctatacaacttggcttcacatacttttacactaactttatatgatttttaaaaactggtctgatcggacttctcgtcctgggacactgtttactggagtctggccggctctccgtgctcctcttggtacctcattttggggagaaccttaaacccactcgagcagataatctccgccttgaccgggtgccaccaaagaagccttggaaccatgtggacttttctgggcattgccactttcacctatttttataagaagttcggggacttcatcactttggccaacagggaggtcctgttgtgcgtgctggtgttcctctcgctgggcctggtgctctcctaccgctgtcgccaccgaaacgggggtctcctcgggcgccagcagagcggctcccagttcgccctcttctcggatattctctcaggcctgcctttcattggcttcttctgggccaaatccccccctgaatcagaaaataaggagcagctcgaggccaggaggcgcagaaaaggaaccaatatttcagaaacaagcttaataggaacagctgcctgtacatcaacatcttctcagaatgacccagaagttatcatcgtgggagctggcgtgcttggctctgctttggcagctgtgctttccagagatggaagaaaggtgacagtcattgagagagacttaaaagagcctgacagaatagttggagaattcctgcagccgggtggttatcatgttctcaaagaccttggtcttggagatacagtggaaggtcttgatgcccaggttgtaaatggttacatgattcatgatcaggaaagcaaatcagaggttcagattccttaccctctgtcagaaaacaatcaagtgcagagtggaagagctttccatcacggaagattcatcatgagtctccggaaagcagctatggcagagcccaatgcaaagtttattgaaggtgttgtgttacagttattagaggaagatgatgttgtgatgggagttcagtacaaggataaagagactggagatatcaaggaactccatgctccactgactgttgttgcagatgggcttttctccaagttcaggaaaagcctggtctccaataaagtttctgtatcatctcattttgttggctttcttatgaagaatgcaccacagtttaaagcaaatcatgctgaacttattttagctaacccgagtccagttctcatctaccagatttcatccagtgaaactcgagtacttgttgacattagaggagaaatgccaaggaatttaagagaatacatggttgaaaaaatttacccacaaatacctgatcacctgaaagaaccattcttagaagccactgacaattctcatctgaggtccatgccagcaagcttccttcctccttcatcagtgaagaaacgaggtgttcttcttttgggagacgcatataatatgaggcatccacttactggtggaggaatgactgttgcttttaaagatataaaactatggagaaaactgctaaagggtatccctgacctttatgatgatgcagctattttcgaggccaaaaaatcattttactgggcaagaaaaacatctcattcctttgtcgtgaatatccttgctcaggctctttatgaattattttctgccacagatgattccctgcatcaactaagaaaagcctgttttctttatttcaaacttggtggcgaatgtgttgcgggtcctgttgggctgctttctgtattgtctcctaaccctctagttttaattggacacttctttgctgttgcaatctatgccgtgtatttttgctttaagtcagaaccttggattacaaaacctcgagcccttctcagtagtggtgctgtattgtacaaagcgtgttctgtaatatttcctctaatttactcagaaatgaagtatatggttcattaagcttaaaggggaaccatttgtgaatgaatatttggaacttaccaagtcctaagagacttttggaagaggatatatatagcatagtaccataccacttataaagtggaaactcttggaccaagatttggattaatttgtttttgaagttttttgtatataaatatgtaaatacatgctttaatttgcaatttaaaatgaaggggttaaataagttagacatttaaaagaaatgattgttaccataaattagtgctaatgctgaggagaactacagtttttcttttgaatttagtatttgagatgagttgttgggacatgcaaataaaatgaagaatgaaaaaaaaaaaaagggggggggtaagtattctgaggggcagttaggtacagtttgtcaaggctatgggggtaaaagcagacgggccgtaaagtgtgtggaatgtcggtttggaggacttttggtgcttgactcgatagcggaaatagttggtaccgttcggatgtgtaaat

SEQ ID NO: 440988 - DNA, 3424 bp, Homo sapiens
ccctcgtctgggccgagcccgcccagctggctgagacgcgtggagcctggcggcgagtgggggcgtgcgacggttactctggttactggggccgcgccgcgctggcgagagccgccgcccgcgagggatgctggtgaggaagccgtcgggagccgccgccgccatctgagggaggtaccctggaaaccaccttttatcggtggggaagtgcagtcgcggtgggcggctctgggggccagcgaaacgggaggcctctaaatctttaggttggggctgcattgccctggagccgcactcttgagtccgaggccatcttttgttggagaaggcgtcggcgttggcgttttcccgaggttgggctgtacagtgtctccgtccgcggaaaaagaagcctctgaacccgcgccggcccgcagcccccgtgccttccggccgctgctcgccgtcgccagaggctaggccacgtttcccccagtgccgaggtgtttctgtgaccctccctccactcccattcccttctgaaagggcacctgctcttggtgagaaaagaaattatagcacgaagagccagtatcagaagagtatccatcacccgcagcaaccgctcagggaacaccatcaaaaaagaaaaaaagggaatatctggatttcctgggcgaggaggagcgagtctgctcgggagctgttccagcaggcgatttttaaatactgctttctacgccctatacaacttggcttcacatacttttacactaactttatatgatttttaaaaactggtctgatcggacttctcgtcctgggacactgtttactggagtctggccggctctccgtgctcctcttggtacctcattttggggagaaccttaaacccactcgagcagataatctccgccttgaccgggtgccaccaaagaagccttggaaccatgtggacttttctgggcattgccactttcacctatttttataagaagttcggggacttcatcactttggccaacagggaggtcctgttgtgcgtgctggtgttcctctcgctgggcctggtgctctcctaccgctgtcgccaccgaaacgggggtctcctcgggcgccagcagagcggctcccagttcgccctcttctcggatattctctcaggcctgcctttcattggcttcttctgggccaaatccccccctgaatcagaaaataaggagcagctcgaggccaggaggcgcagaaaaggaaccaatatttcagaaacaagcttaataggaacagctgcctgtacatcaacatcttctcagaatgacccagaagttatcatcgtgggagctggcgtgcttggctctgctttggcagctgtgctttccagagatggaagaaaggtgacagtcattgagagagacttaaaagagcctgacagaatagttggagaattcctgcagccgggtggttatcatgttctcaaagaccttggtcttggagatacagtggaaggtcttgatgcccaggttgtaaatggttacatgattcatgatcaggaaagcaaatcagaggttcagattccttaccctctgtcagaaaacaatcaagtgcagagtggaagagctttccatcacggaagattcatcatgagtctccggaaagcagctatggcagagcccaatgcaaagtttattgaaggtgttgtgttacagttattagaggaagatgatgttgtgatgggagttcagtacaaggataaagagactggagatatcaaggaactccatgctccactgactgttgttgcagatgggcttttctccaagttcaggaaaagcctggtctccaataaagtttctgtatcatctcattttgttggctttcttatgaagaatgcaccacagtttaaagcaaatcatgctgaacttattttagctaacccgagtccagttctcatctaccagatttcatccagtgaaactcgagtacttgttgacattagaggagaaatgccaaggaatttaagagaatacatggttgaaaaaatttacccacaaatacctgatcacctgaaagaaccattcttagaagccactgacaattctcatctgaggtccatgccagcaagcttccttcctccttcatcagtgaagaaacgaggtgttcttcttttgggagacgcatataatatgaggcatccacttactggtggaggaatgactgttgcttttaaagatataaaactatggagaaaactgctaaagggtatccctgacctttatgatgatgcagctattttcgaggtaagatcaattattttgacaaaaatgtctcaaaatggatttatttctgggggttaagagcagtggggctctgatggggagatctgtactaaggaacctgatgctttataatagctcttaggcatcttgcttaggcttaaagaacctgacttgcaacctgtgaatcttagagaatttctaaatttgaatattatgtaacacttgattgctatgggccacttagctcatagtggttgtaaatttagcttcagtgtcatataacccattgctctgaaggtgattttttattttttttgtaaatgataaacataaggcaatattacttgcagatagtccttagaaggataagtatcagtttgaggggattataaacatcagtttgtgcttttttatccttaccatataataaatgagctatttcttttttaggccaaaaaatcattttactgggcaagaaaaacatctcattcctttgtcgtgaatatccttgctcaggctctttatgaattattttctgccacagatgattccctgcatcaactaagaaaagcctgttttctttatttcaaacttggtggcgaatgtgttgcgggtcctgttgggctgctttctgtattgtctcctaaccctctagttttaattggacacttctttgctgttgcaatctatgccgtgtatttttgctttaagtcagaaccttggattacaaaacctcgagcccttctcagtagtggtgctgtattgtacaaagcgtgttctgtaatatttcctctaatttactcagaaatgaagtatatggttcattaagcttaaaggggaaccatttgtgaatgaatatttggaacttaccaagtcctaagagacttttggaagaggatatatatagcatagtaccataccacttataaagtggaaactcttggaccaagatttggattaatttgtttttgaagttttttgtatataaatatgtaaatacatgctttaatttgcaatttaaaatgaaggggttaaataagttagacatttaaaagaaatgattgttaccataaattagtgctaatgctgaggagaactacagtttttcttttgaatttagtatttgagatgagttgttgggacatgcaaataaaatgaagaatgaa

SEQ ID NO: 440989 - DNA, 2941 bp, Homo sapiens
ccctcgtctgggccgagcccgcccagctggctgagacgcgtggagcctggcggcgagtgggggcgtgcgacggttactctggttactggggccgcgccgcgctggcgagagccgccgcccgcgagggatgctggtgaggaagccgtcgggagccgccgccgccatctgagggaggtaccctggaaaccaccttttatcggtggggaagtgcagtcgcggtgggcggctctgggggccagcgaaacgggaggcctctaaatctttaggttggggctgcattgccctggagccgcactcttgagtccgaggccatcttttgttggagaaggcgtcggcgttggcgttttcccgaggttgggctgtacagtgtctccgtccgcggaaaaagaagcctctgaacccgcgccggcccgcagcccccgtgccttccggccgctgctcgccgtcgccagaggctaggccacgtttcccccagtgccgaggtgtttctgtgaccctccctccactcccattcccttctgaaagggcacctgctcttggtgagaaaagaaattatagcacgaagagccagtatcagaagagtatccatcacccgcagcaaccgctcagggaacaccatcaaaaaagaaaaaaagggaatatctggatttcctgggcgaggaggagcgagtctgctcgggagctgttccagcaggcgatttttaaatactgctttctacgccctatacaacttggcttcacatacttttacactaactttatatgatttttaaaaactggtctgatcggacttctcgtcctgggacactgtttactggagtctggccggctctccgtgctcctcttggtacctcattttggggagaaccttaaacccactcgagcagataatctccgccttgaccgggtgccaccaaagaagccttggaaccatgtggacttttctgggcattgccactttcacctatttttataagaagttcggggacttcatcactttggccaacagggaggtcctgttgtgcgtgctggtgttcctctcgctgggcctggtgctctcctaccgctgtcgccaccgaaacgggggtctcctcgggcgccagcagagcggctcccagttcgccctcttctcggatattctctcaggcctgcctttcattggcttcttctgggccaaatccccccctgaatcagaaaataaggagcagctcgaggccaggaggcgcagaaaaggaaccaatatttcagaaacaagcttaataggaacagctgcctgtacatcaacatcttctcagaatgacccagaagttatcatcgtgggagctggcgtgcttggctctgctttggcagctgtgctttccagagatggaagaaaggtgacagtcattgagagagacttaaaagagcctgacagaatagttggagaattcctgcagccgggtggttatcatgttctcaaagaccttggtcttggagatacagtggaaggtcttgatgcccaggttgtaaatggttacatgattcatgatcaggaaagcaaatcagaggttcagattccttaccctctgtcagaaaacaatcaagtgcagagtggaagagctttccatcacggaagattcatcatgagtctccggaaagcagctatggcagagcccaatgcaaagtttattgaaggtgttgtgttacagttattagaggaagatgatgttgtgatgggagttcagtacaaggataaagagactggagatatcaaggaactccatgctccactgactgttgttgcagatgggcttttctccaagttcaggaaaagcctggtctccaataaagtttctgtatcatctcattttgttggctttcttatgaagaatgcaccacagtttaaagcaaatcatgctgaacttattttagctaacccgagtccagttctcatctaccagatttcatccagtgaaactcgagtacttgttgacattagaggagaaatgccaaggaatttaagagaatacatggttgaaaaaatttacccacaaatacctgatcacctgaaagaaccattcttagaagccactgacaattctcatctgaggtccatgccagcaagcttccttcctccttcatcagtgaagaaacgaggtgttcttcttttgggagacgcatataatatgaggcatccacttactggtggaggaatgactgttgcttttaaagatataaaactatggagaaaactgctaaagggtatccctgacctttatgatgatgcagctattttcgaggccaaaaaatcattttactgggcaagaaaaacatctcattcctttgtcgtgaatatccttgctcaggctctttatgaattattttctgccacagatgattccctgcatcaactaagtgggctgctttctgtattgtctcctaaccctctagttttaattggacacttctttgctgttgcaatctatgccgtgtatttttgctttaagtcagaaccttggattacaaaacctcgagcccttctcagtagtggtgctgtattgtacaaagcgtgttctgtaatatttcctctaatttactcagaaatgaagtatatggttcattaagcttaaaggggaaccatttgtgaatgaatatttggaacttaccaagtcctaagagacttttggaagaggatatatatagcatagtaccataccacttataaagtggaaactcttggaccaagatttggattaatttgtttttgaagttttttgtatataaatatgtaaatacatgctttaatttgcaatttaaaatgaaggggttaaataagttagacatttaaaagaaatgattgttaccataaattagtgctaatgctgaggagaactacagtttttcttttgaatttagtatttgagatgagttgttgggacatgcaaataaaatgaagaatgaa

SEQ ID NO: 440990 - DNA, 2118 bp, Homo sapiens
ccctcgtctgggccgagcccgcccagctggctgagacgcgtggagcctggcggcgagtgggggcgtgcgacggttactctggttactggggccgcgccgcgctggcgagagccgccgcccgcgagggatgctggtgaggaagccgtcgggagccgccgccgccatctgagggagcattggttgagcctcagatggaggttggatatttgattatgaaagatggaacgaaatgttagaatttcattttgaaggagaagaacaaccactttccatgatgaaaaagtttttaaaaagttcttgggtaaggattggatttgtgcctgaggaagaaagaaacgtgctgcggcgcagaaaaggaaccaatatttcagaaacaagcttaataggaacagctgcctgtacatcaacatcttctcagaatgacccagaagttatcatcgtgggagctggcgtgcttggctctgctttggcagctgtgctttccagagatggaagaaaggtgacagtcattgagagagacttaaaagagcctgacagaatagttggagaattcctgcagccgggtggttatcatgttctcaaagaccttggtcttggagatacagtggaaggtcttgatgcccaggttgtaaatggttacatgattcatgatcaggaaagcaaatcagaggttcagattccttaccctctgtcagaaaacaatcaagtgcagagtggaagagctttccatcacggaagattcatcatgagtctccggaaagcagctatggcagagcccaatgcaaagtttattgaaggtgttgtgttacagttattagaggaagatgatgttgtgatgggagttcagtacaaggataaagagactggagatatcaaggaactccatgctccactgactgttgttgcagatgggcttttctccaagttcaggaaaagcctggtctccaataaagtttctgtatcatctcattttgttggctttcttatgaagaatgcaccacagtttaaagcaaatcatgctgaacttattttagctaacccgagtccagttctcatctaccagatttcatccagtgaaactcgagtacttgttgacattagaggagaaatgccaaggaatttaagagaatacatggttgaaaaaatttacccacaaatacctgatcacctgaaagaaccattcttagaagccactgacaattctcatctgaggtccatgccagcaagcttccttcctccttcatcagtgaagaaacgaggtgttcttcttttgggagacgcatataatatgaggcatccacttactggtggaggaatgactgttgcttttaaagatataaaactatggagaaaactgctaaagggtatccctgacctttatgatgatgcagctattttcgaggccaaaaaatcattttactgggcaagaaaaacatctcattcctttgtcgtgaatatccttgctcaggctctttatgaattattttctgccacagatgattccctgcatcaactaagaaaagcctgttttctttatttcaaacttggtggcgaatgtgttgcgggtcctgttgggctgctttctgtattgtctcctaaccctctagttttaattggacacttctttgctgttgcaatctatgccgtgtatttttgctttaagtcagaaccttggattacaaaacctcgagcccttctcagtagtggtgctgtattgtacaaagcgtgttctgtaatatttcctctaatttactcagaaatgaagtatatggttcattaagcttaaaggggaaccatttgtgaatgaatatttggaacttaccaagtcctaagagacttttggaagaggatatatatagcatagtaccataccacttataaagtggaaactcttggaccaagatttggattaatttgtttttgaagttttttgtatataaatatgtaaatacatgctttaatttgcaatttaaaatgaaggggttaaataagttagacatttaaaagaaatgattgttaccataaattagtgctaatgctgaggagaactacagtttttcttttgaatttagtatttgagatgagttgttgggacatgcaaataaaatgaagaatgaa

SEQ ID NO: 440991 - DNA, 2523 bp, Homo sapiens
ccctcgtctgggccgagcccgcccagctggctgagacgcgtggagcctggcggcgagtgggggcgtgcgacggttactctggttactggggccgcgccgcgctggcgagagccgccgcccgcgagggatgctggtgaggaagccgtcgggagccgccgccgccatctgagggaggtaccctggaaaccaccttttatcggtggggaagtgcagtcgcggtgggcggctctgggggccagcgaaacgggaggcctctaaatctttaggttggggctgcattgccctggagccgcactcttgagtccgaggccatcttttgttggagaaggcgtcggcgttggcgttttcccgaggttgggctgtacagtgtctccgtccgcggaaaaagaagcctctgaacccgcgccggcccgcagcccccgtgccttccggccgctgctcgccgtcgccagaggctaggccacgtttcccccagtgccgaggtgtttctgtgaccctccctccactcccattcccttctgaaagggcacctgctcttggtgagaaaagaaattatagcacgaagagccagtatcagaagagtatccatcacccgcagcaaccgctcagggaacaccatcaaaaaagaaaaaaagggaatatctggatttcctgggcgaggaggagcgagtctgctcgggagctgttccagcaggcgatttttaaatactgctttctacgccctatacaacttggcttcacatacttttacactaactttatatgatttttaaaaactggtctgatcggacttctcgtcctgggacactgtttactggagtctggccggctctccgtgctcctcttggtacctcattttggggagaaccttaaacccactcgagcagataatctccgccttgaccgggtgccaccaaagaagccttggaaccatgtggacttttctgggcattgccactttcacctatttttataagaagttcggggacttcatcactttggccaacagggaggtcctgttgtgcgtgctggtgttcctctcgctgggcctggtgctctcctaccgctgtcgccaccgaaacgggggtctcctcgggcgccagcagagcggctcccagttcgccctcttctcggatattctctcaggcctgcctttcattggcttcttctgggccaaatccccccctgaatcagaaaataaggagcagctcgaggccaggaggcgcagaaaaggaaccaatatttcagaaacaagcttaataggaacagctgcctgtacatcaacatcttctcagaatgacccagaagttatcatcgtgggagctggcgtgcttggctctgctttggcagctgtgctttccagagatggaagaaaggtgacagtcattgagagagacttaaaagagcctgacagaatagttggagaattcctgcagccgggtggttatcatgttctcaaagaccttggtcttggagatacagtggaaggtcttgatgcccaggttgtaaatggttacatgattcatgatcaggaaagcaaatcagaggttcagattccttaccctctgtcagaaaacaatcaagtgcagagtggaagagctttccatcacggaagattcatcatgagtctccggaaagcagctatggcagagcccaatgcaaagtttattgaaggtgttgtgttacagttattagaggaagatgatgttgtgatgggagttcagtacaaggataaagagactggagatatcaaggaactccatgctccactgactgttgttgcagatgggcttttctccaagttcaggaaaagcctggtctccaataaagtttctgtatcatctcattttgttggctttcttatgaagaatgcaccacagtttaaagcaaatcatgctgaacttattttagctaacccgagtccagttctcatctaccagatttcatccagtgaaactcgagtacttgttgacattagaggagaaatgccaaggaatttaagagaatacatggttgaaaaaatttacccacaaatacctgatcacctgaaagaaccattcttagaagccactgacaattctcatctgaggtccatgccagcaagcttccttcctccttcatcagtgaagaaacgaggtgttcttcttttgggagacgcatataatatgaggcatccacttactggtggaggaatgactgttgcttttaaagatataaaactatggagaaaactgctaaagggtatccctgacctttatgatgatgcagctattttcgaggccaaaaaatcattttactgggcaagaaaaacatctcattcctttgtcgtgaatatccttgctcaggctctttatgaattattttctgccacagatgattccctgcatcaactaagaaaagcctgttttctttatttcaaacttggtggcgaatgtgttgcgggtcctgttgggctgctttctgtattgtctcctaaccctctagttttaattggatcttacttacgggggatgctctagagtc

SEQ ID NO: 440992 - DNA, 1250 bp, Homo sapiens
  misc_feature (96)..(96): n is a, c, g, or t
  misc_feature (120)..(120): n is a, c, g, or t
aagggtactcactgagcgtcctggatctgtgaagggtactcactgagcgacctggaatctgtgaagggtactcactgagcgactcaggtgagtctnccgacatgtcctggccccgatgtnctccatgcaccacagtttaaagcaaatcacgctgaacttattttagctaacccgagtccagttctcatctaccagatttcatccagtgaaactcgagtacttgttgacattagaggagaaatgccaaggaatttaagagaatacatggttgaaaaaatttacccacaaatacctgatcacctgaaagaaccattcttagaagccactgacaattctcatctgaggtccatgccagcaagcttccttcctccttcatcagtgaagaaacgaggtgttcttcttttgggagacgcatataatatgaggcatccacttactggtggaggaatgactgttgcttttaaagatataaaactatggagaaaactgctaaagggtatccctgacctttatgatgatgcagctattttcgaggccaaaaaatcattttactgggcaagaaaaacatctcattcctttgtcgtgaatatccttgctcaggctctttatgaattattttctgccacagatgattccctgcatcaactaagaaaagcctgttttctttatttcaaacttggtggcgaatgtgttgcgggtcctgttgggctgctttctgtattgtctcctaaccctctagttttaattggacacttctttgctgttgcaatctatgccgtgtatttttgctttaagtcagaaccttggattacaaaacctcgagcccttctcagtagtggtgctgtattgtacaaagcgtgttctgtaatatttcctctaatttactcagaaatgaagtatatggttcattaagcttaaaggggaaccatttgtgaatgaatatttggaacttaccaagtcctaagagacttttggaagaggatatatatagcatagtaccataccacttataaagtggaaactcttggaccaagatttggattaatttgtttttgaagttttttgtatataaatatgtaaatacatgctttaatttgcaatttaaaatgaaggggttaaataagttagacatttaaaagaaatgattgttaccataaattagtgctaatgctgaggagaactacagtttttcttttgaatttagtatttgagatgagttgttgggacatgcaaataaaatgaagaatgaa

SEQ ID NO: 440993 - DNA, 734 bp, Homo sapiens
tgattatggaattcagaagaaatcctggttgttgaaattctaggactagatatttaaaaattatctgcaagatgtagcgtttgttatttctcattttttctgatatatcattagcatcctacataagtgtgtacacatatttgattattttacaattttattttagattccctgcatcaactaagaaaagcctgttttctttatttcaaacttggtggcgaatgtgttgcgggtcctgttgggctgctttctgtgtaagttgtgatggcacagaggatacaaacctgccagattttcttaggactgttcagttgatgaattactgcaaatctttcttccttacacattttgatattttattatctgttagtatcccaatgagaaggtggcccaaagaaatgaagaaacgcaatatttagtactgttttctttctagggaacagcagttaaaggtggtggtagaggaagctataacccttgattaaaatagaagcttgttttttgcctatggatttatccatatgttctggtctgtgggagccaggaataattgagaaattttaatttaagaattagtttcattgaagtacggggacttatacaacccagtattagttttgagcgtacagacatatgtggaactattcttggaaagtctacaaagtgaaatctatcgagttatttctcatttgcaaagtgatcctttgagtcatttctcataatctataatctga

SEQ ID NO: 440994 - DNA, 2298 bp, Homo sapiens
gagcggccgcccgggcaggtacgccctatacaacttggcttcacatacttttacactaactttatatgatttttaaaaactggtctgatcggacttctcgtcctgggacactgtttactggagtctggccggctctccgtgctcctcttggtacctcattttggggagaaccttaaacccactcgagcagataatctccgccttgaccgggtgccaccaaagaagccttggaaccatgtggacttttctgggcattgccactttcacctatttttataagaagttcggggacttcatcactttggccaacagggaggtcctgttgtgcgtgctggtgttcctctcgctgggcctggtgctctcctaccgctgtcgccaccgaaacgggggtctcctcgggcgccagcagagcggctcccagttcgccctcttctcggatattctctcaggcctgcctttcattggcttcttctgggccaaatccccccctgaatcagaaaataaggagcagctcgaggccaggaggcgcagaaaaggaaccaatatttcagaaacaagcttaataggaacagctgcctgtacatcaacatcttctcagaatgacccagaagttatcatcgtgggagctggcgtgcttggctctgctttggcagctgtgctttccagagatggaagaaaggtgacagtcattgagagagacttaaaagagcctgacagaatagttggagaattcctgcagccgggtggttatcatgttctcaaagaccttggtcttggagatacagtggaaggtcttgatgcccaggttgtaaatggttacatgattcatgatcaggaaagcaaatcagaggttcagattccttaccctctgtcagaaaacaatcaagtgcagagtggaagagctttccatcacggaagattcatcatgagtctccggaaagcagctatggcagagcccaatgcaaagtttattgaaggtgttgtgttacagttattagaggaagatgatgttgtgatgggagttcagtacaaggataaagagactggagatatcaaggaactccatgctccactgactgttgttgcagatgggcttttctccaagttcaggaaaagcctggtctccaataaagtttctgtatcatctcattttgttggctttcttatgaagaatgcaccacagtttaaagcaaatcatgctgaacttattttagctaacccgagtccagttctcatctaccagatttcatccagtgaaactcgagtacttgttgacattagaggagaaatgccaaggaatttaagagaatacatggttgaaaaaatttacccacaaatacctgatcacctgaaagaaccattcttagaagccactgacaattctcatctgaggtccatgccagcaagcttccttcctccttcatcagtgaagaaacgaggtgttcttcttttgggagacgcatataatatgaggcatccacttactggtggaggaatgactgttgcttttaaagatataaaactatggagaaaactgctaaagggtatccctgacctttatgatgatgcagctattttcgaggccaaaaaatcattttactgggcaagaaaaacatctcattcctttgtcgtgaatatccttgctcaggctctttatgaattattttctgccacagatgattccctgcatcaactaagaaaagcctgttttctttatttcaaacttggtggcgaatgtgttgcgggtcctgttgggctgctttctgtattgtctcctaaccctctagttttaattggacacttctttgctgttgcaatctatgccgtgtatttttgctttaagtcagaaccttggattacaaaacctcgagcccttctcagtagtggtgctgtattgtacaaagcgtgttctgtaatatttcctctaatttactcagaaatgaagtatatggttcattaagcttaaaggggaaccatttgtgaatgaatatttggaacttaccaagtcctaagagacttttggaagaggatatatatagcatagtaccataccacttataaagtggaaactcttggaccaagatttggattaatttgtttttgaagttttttgtatataaatatgtaaatacatgctttaatttgcaatttaaaatgaaggggttaaataagttagacatttaaaagaaatgattgttaccataaattagtgctaatgctgaggagaactacagtttttcttttgaatttagtatttgagatgagttgttgggacatgcaaataaaatgaagaatgaa

SEQ ID NO: 440995 - DNA, 2937 bp, Homo sapiens
ccctcgtctgggccgagcccgcccagctggctgagacgcgtggagcctggcggcgagtgggggcgtgcgacggttactctggttactggggccgcgccgcgctggcgagagccgccgcccgcgagggatgctggtgaggaagccgtcgggagccgccgccgccatctgagggaggtaccctggaaaccaccttttatcggtggggaagtgcagtcgcggtgggcggctctgggggccagcgaaacgggaggcctctaaatctttaggttggggctgcattgccctggagccgcactcttgagtccgaggccatcttttgttggagaaggcgtcggcgttggcgttttcccgaggttgggctgtacagtgtctccgtccgcggaaaaagaagcctctgaacccgcgccggcccgcagcccccgtgccttccggccgctgctcgccgtcgccagaggctaggccacgtttcccccagtgccgaggtgtttctgtgaccctccctccactcccattcccttctgaaagggcacctgctcttggtgagaaaagaaattatagcacgaagagccagtatcagaagagtatccatcacccgcagcaaccgctcagggaacaccatcaaaaaagttccagcaggcgatttttaaatactgctttctacgccctatacaacttggcttcacatacttttacactaactttatatgatttttaaaaactggtctgatcggacttctcgtcctgggacactgtttactggagtctggccggctctccgtgctcctcttggtacctcattttggggagaaccttaaacccactcgagcagataatctccgccttgaccgggtgccaccaaagaagccttggaaccatgtggacttttctgggcattgccactttcacctatttttataagaagttcggggacttcatcactttggccaacagggaggtcctgttgtgcgtgctggtgttcctctcgctgggcctggtgctctcctaccgctgtcgccaccgaaacgggggtctcctcgggcgccagcagagcggctcccagttcgccctcttctcggatattctctcaggcctgcctttcattggcttcttctgggccaaatccccccctgaatcagaaaataaggagcagctcgaggccaggaggcgcagaaaaggaaccaatatttcagaaacaagcttaataggaacagctgcctgtacatcaacatcttctcagaatgacccagaagttatcatcgtgggagctggcgtgcttggctctgctttggcagctgtgctttccagagatggaagaaaggtgacagtcattgagagagacttaaaagagcctgacagaatagttggagaattcctgcagccgggtggttatcatgttctcaaagaccttggtcttggagatacagtggaaggtcttgatgcccaggttgtaaatggttacatgattcatgatcaggaaagcaaatcagaggttcagattccttaccctctgtcagaaaacaatcaagtgcagagtggaagagctttccatcacggaagattcatcatgagtctccggaaagcagctatggcagagcccaatgcaaagtttattgaaggtgttgtgttacagttattagaggaagatgatgttgtgatgggagttcagtacaaggataaagagactggagatatcaaggaactccatgctccactgactgttgttgcagatgggcttttctccaagttcaggaaaagcctggtctccaataaagtttctgtatcatctcattttgttggctttcttatgaagaatgcaccacagtttaaagcaaatcatgctgaacttattttagctaacccgagtccagttctcatctaccagatttcatccagtgaaactcgagtacttgttgacattagaggagaaatgccaaggaatttaagagaatacatggttgaaaaaatttacccacaaatacctgatcacctgaaagaaccattcttagaagccactgacaattctcatctgaggtccatgccagcaagcttccttcctccttcatcagtgaagaaacgaggtgttcttcttttgggagacgcatataatatgaggcatccacttactggtggaggaatgactgttgcttttaaagatataaaactatggagaaaactgctaaagggtatccctgacctttatgatgatgcagctattttcgaggccaaaaaatcattttactgggcaagaaaaacatctcattcctttgtcgtgaatatccttgctcaggctctttatgaattattttctgccacagatgattccctgcatcaactaagaaaagcctgttttctttatttcaaacttggtggcgaatgtgttgcgggtcctgttgggctgctttctgtattgtctcctaaccctctagttttaattggacacttctttgctgttgcaatctatgccgtgtatttttgctttaagtcagaaccttggattacaaaacctcgagcccttctcagtagtggtgctgtattgtacaaagcgtgttctgtaatatttcctctaatttactcagaaatgaagtatatggttcattaagcttaaaggggaaccatttgtgaatgaatatttggaacttaccaagtcctaagagacttttggaagaggatatatatagcatagtaccataccacttataaagtggaaactcttggaccaagatttggattaatttgtttttgaagttttttgtatataaatatgtaaatacatgctttaatttgcaatttaaaatgaaggggttaaataagttagacatttaaaagaaatgattgttaccataaattagtgctaatgctgaggagaactacagtttttcttttgaatttagtatttgagatgagttgttgggacatgcaaataaaatgaagaatgaa

SEQ ID NO: 440996 - DNA, 2955 bp, Homo sapiens
ccctcgtctgggccgagcccgcccagctggctgagacgcgtggagcctggcggcgagtgggggcgtgcgacggttactctggttactggggccgcgccgcgctggcgagagccgccgcccgcgagggatgctggtgaggaagccgtcgggagccgccgccgccatctgagggaggtaccctggaaaccaccttttatcggtggggaagtgcagtcgcggtgggcggctctgggggccagcgaaacgggaggcctctaaatctttaggttggggctgcattgccctggagccgcactcttgagtccgaggccatcttttgttggagaaggcgtcggcgttggcgttttcccgaggttgggctgtacagtgtctccgtccgcggaaaaagaagcctctgaacccgcgccggcccgcagcccccgtgccttccggccgctgctcgccgtcgccagaggctaggccacgtttcccccagtgccgaggtgtttctgtgaccctccctccactcccattcccttctgaaagggcacctgctcttggtgagaaaagaaattatagcacgaagagccagtatcagaagagtatccatcacccgcagcaaccgctcagggaacaccatcaaaaaagaaaaaaagggaatatctggatttcctgggcgaggaggagcgagtctgctcgggagctgttccagcaggcgatttttaaatactgctttctacgccctatacaacttggcttcacatacttttacactaactttatatgatttttaaaaactggtctgatcggacttctcgtcctgggacactgtttactggagtctggccggctctccgtgctcctcttggtacctcattttggggagaaccttaaacccactcgagcagataatctccgccttgaccgggtgccaccaaagaagccttggaaccatgtggacttttctgggcattgccactttcacctatttttataagaagttcggggacttcatcactttggccaacagggaggtcctgttgtgcgtgctggtgttcctctcgctgggcctggtgctctcctaccgctgtcgccaccgaaacgggggtctcctcgggcgccagcagagcggctcccagttcgccctcttctcggatattctctcaggcctgcctttcattggcttcttctgggccaaatccccccctgaatcagaaaataaggagcagctcgaggccaggaggcgcagaaaaggaaccaatatttcagaaacaagcttaataggaacagctgcctgtacatcaacatcttctcagaatgacccagaagttatcatcgtgggagctggcgtgcttggctctgctttggcagctgtgctttccagagatggaagaaaggtgacagtcattgagagagacttaaaagagcctgacagaatagttggagaattcctgcagccgggtggttatcatgttctcaaagaccttggtcttggagatacagtggaaggtcttgatgcccaggttgtaaatggttacatgattcatgatcaggaaagcaaatcagaggttcagattccttaccctctgtcagaaaacaatcaagtgcagagtggaagagctttccatcacggaagattcatcatgagtctccggaaagcagctatggcagagcccaatgcaaagtttattgaaggtgttgtgttacagttattagaggaagatgatgttgtgatgggagttcagtacaaggataaagagactggagatatcaagtctccaagttcaggaaaagcctggtctccaataaagtttctgtatcatctcattttgttggctttcttatgaagaatgcaccacagtttaaagcaaatcatgctgaacttattttagctaacccgagtccagttctcatctaccagatttcatccagtgaaactcgagtacttgttgacattagaggagaaatgccaaggaatttaagagaatacatggttgaaaaaatttacccacaaatacctgatcacctgaaagaaccattcttagaagccactgacaattctcatctgaggtccatgccagcaagcttccttcctccttcatcagtgaagaaacgaggtgttcttcttttgggagacgcatataatatgaggcatccacttactggtggaggaatgactgttgcttttaaagatataaaactatggagaaaactgctaaagggtatccctgacctttatgatgatgcagctattttcgaggccaaaaaatcattttactgggcaagaaaaacatctcattcctttgtcgtgaatatccttgctcaggctctttatgaattattttctgccacagatgattccctgcatcaactaagaaaagcctgttttctttatttcaaacttggtggcgaatgtgttgcgggtcctgttgggctgctttctgtattgtctcctaaccctctagttttaattggacacttctttgctgttgcaatctatgccgtgtatttttgctttaagtcagaaccttggattacaaaacctcgagcccttctcagtagtggtgctgtattgtacaaagcgtgttctgtaatatttcctctaatttactcagaaatgaagtatatggttcattaagcttaaaggggaaccatttgtgaatgaatatttggaacttaccaagtcctaagagacttttggaagaggatatatatagcatagtaccataccacttataaagtggaaactcttggaccaagatttggattaatttgtttttgaagttttttgtatataaatatgtaaatacatgctttaatttgcaatttaaaatgaaggggttaaataagttagacatttaaaagaaatgattgttaccataaattagtgctaatgctgaggagaactacagtttttcttttgaatttagtatttgagatgagttgttgggacatgcaaataaaatgaagaatgaa

SEQ ID NO: 440997 - DNA, 2844 bp, Homo sapiens
ccctcgtctgggccgagcccgcccagctggctgagacgcgtggagcctggcggcgagtgggggcgtgcgacggttactctggttactggggccgcgccgcgctggcgagagccgccgcccgcgagggatgctggtgaggaagccgtcgggagccgccgccgccatctgagggaggtaccctggaaaccaccttttatcggtggggaagtgcagtcgcggtgggcggctctgggggccagcgaaacgggaggcctctaaatctttaggttggggctgcattgccctggagccgcactcttgagtccgaggccatcttttgttggagaaggcgtcggcgttggcgttttcccgaggttgggctgtacagtgtctccgtccgcggaaaaagaagcctctgaacccgcgccggcccgcagcccccgtgccttccggccgctgctcgccgtcgccagaggctaggccacgtttcccccagtgccgaggtgtttctgtgaccctccctccactcccattcccttctgaaagggcacctgctcttggtgagaaaagaaattatagcacgaagagccagtatcagaagagtatccatcacccgcagcaaccgctcagggaacaccatcaaaaaagaaaaaaagggaatatctggatttcctgggcgaggaggagcgagtctgctcgggagctgttccagcaggcgatttttaaatactgctttctacgccctatacaacttggcttcacatacttttacactaactttatatgatttttaaaaactggtctgatcggacttctcgtcctgggacactgtttactggagtctggccggctctccgtgctcctcttggtacctcattttggggagaaccttaaacccactcgagcagataatctccgccttgaccgggtgccaccaaagaagccttggaaccatgtggacttttctgggcattgccactttcacctatttttataagaagttcggggacttcatcactttggccaacagggaggtcctgttgtgcgtgctggtgttcctctcgctgggcctggtgctctcctaccgctgtcgccaccgaaacgggggtctcctcgggcgccagcagagcggctcccagttcgccctcttctcggatattctctcaggcctgcctttcattggcttcttctgggccaaatccccccctgaatcagaaaataaggagcagctcgaggccaggaggcgcagaaaaggaaccaatatttcagaaacaagcttaataggaacagctgcctgtacatcaacatcttctcagaatgacccagaagttatcatcgtgggagctggcgtgcttggctctgctttggcagctgtgctttccagagatggaagaaaggtgacagtcattgagagagacttaaaagagcctgacagaatagttggagaattcctgcagccgggtggttatcatgttctcaaagaccttggtcttggagatacagtggaaggtcttgatgcccaggttgtaaatggttacatgattcatgatcaggaaagcaaatcagaggttcagattccttaccctctgtcagaaaacaatcaagtgcagagtggaagagctttccatcacggaagattcatcatgagtctccggaaagcagctatggcagagcccaatgcaaagtttattgaaggtgttgtgttacagttattagaggaagatgatgttgtgatgggagttcagtacaaggataaagagactggagatatcaaggaactccatgctccactgactgttgttgcagatgggcttttctccaagttcaggaaaagcctggtctccaataaagtttctgtatcatctcattttgttggctttcttatgaagaatgcaccacagtttaaagcaaatcatgctgaacttattttagctaacccgagtccagttctcatctaccagatttcatccagtgaaactcgagtacttgttgacattagaggagaaatgccaaggaatttaagagaatacatggttgaaaaaatttacccacaaatacctgatcacctgaaagaaccattcttagaagccactgacaattctcatctgaggtccatgccagcaagcttccttcctccttcatcagtgaagaaacgaggtgttcttcttttgggagacgcatataatatgaggcatccacttactggtggaggaatgactgttgcttttaaagatataaaactatggagaaaactgctaaagggtatccctgacctttatgatgatgcagctattttcgagattccctgcatcaactaagtgggctgctttctgtattgtctcctaaccctctagttttaattggacacttctttgctgttgcaatctatgccgtgtatttttgctttaagtcagaaccttggattacaaaacctcgagcccttctcagtagtggtgctgtattgtacaaagcgtgttctgtaatatttcctctaatttactcagaaatgaagtatatggttcattaagcttaaaggggaaccatttgtgaatgaatatttggaacttaccaagtcctaagagacttttggaagaggatatatatagcatagtaccataccacttataaagtggaaactcttggaccaagatttggattaatttgtttttgaagttttttgtatataaatatgtaaatacatgctttaatttgcaatttaaaatgaaggggttaaataagttagacatttaaaagaaatgattgttaccataaattagtgctaatgctgaggagaactacagtttttcttttgaatttagtatttgagatgagttgttgggacatgcaaataaaatgaagaatgaa

SEQ ID NO: 440998 - DNA, 1969 bp, Homo sapiens
aagtgatttatagcaatccaggccagaaatggtgggacagtgagacattttgtcatgctactcagaacagcaggcagtttaaaacttagaaattatttctggagttttctatttacatcacaatgcctacatcatttatttcatttcatatcatcatgaagccattgtactatttcatcattacctcaagaagaaagcgcagaaaaggaaccaatatttcagaaacaagcttaataggaacagctgcctgtacatcaacatcttctcagaatgacccagaagttatcatcgtgggagctggcgtgcttggctctgctttggcagctgtgctttccagagatggaagaaaggtgacagtcattgagagagacttaaaagagcctgacagaatagttggagaattcctgcagccgggtggttatcatgttctcaaagaccttggtcttggagatacagtggaaggtcttgatgcccaggttgtaaatggttacatgattcatgatcaggaaagcaaatcagaggttcagattccttaccctctgtcagaaaacaatcaagtgcagagtggaagagctttccatcacggaagattcatcatgagtctccggaaagcagctatggcagagcccaatgcaaagtttattgaaggtgttgtgttacagttattagaggaagatgatgttgtgatgggagttcagtacaaggataaagagactggagatatcaaggaactccatgctccactgactgttgttgcagatgggcttttctccaagttcaggaaaagcctggtctccaataaagtttctgtatcatctcattttgttggctttcttatgaagaatgcaccacagtttaaagcaaatcatgctgaacttattttagctaacccgagtccagttctcatctaccagatttcatccagtgaaactcgagtacttgttgacattagaggagaaatgccaaggaatttaagagaatacatggttgaaaaaatttacccacaaatacctgatcacctgaaagaaccattcttagaagccactgacaattctcatctgaggtccatgccagcaagcttccttcctccttcatcagtgaagaaacgaggtgttcttcttttgggagacgcatataatatgaggcatccacttactggtggaggaatgactgttgcttttaaagatataaaactatggagaaaactgctaaagggtatccctgacctttatgatgatgcagctattttcgaggccaaaaaatcattttactgggcaagaaaaacatctcattcctttgtcgtgaatatccttgctcaggctctttatgaattattttctgccacagatgattccctgcatcaactaagaaaagcctgttttctttatttcaaacttggtggcgaatgtgttgcgggtcctgttgggctgctttctgtattgtctcctaaccctctagttttaattggacacttctttgctgttgcaatctatgccgtgtatttttgctttaagtcagaaccttggattacaaaacctcgagcccttctcagtagtggtgctgtattgtacaaagcgtgttctgtaatatttcctctaatttactcagaaatgaagtatatggttcattaagcttaaaggggaaccatttgtgaatgaatatttggaacttaccaagtcctaagagacttttggaagaggatatatatagcatagtaccataccacttataaagtggaaactcttggaccaagatttggattaatttgtttttgaagttttttgtatataaatatgtaaatacatgctttaatttgcaatttaaaatgaaggggttaaataagttagacatttaaaagaaatgattgttaccataaattagtgctaatgctgaggagaactacagtttttcttttgaatttagtatttgagatgagttgttgggacatgcaaataaaatgaagaatgaa

SEQ ID NO: 440999 - DNA, 2991 bp, Homo sapiens
ccctcgtctgggccgagcccgcccagctggctgagacgcgtggagcctggcggcgagtgggggcgtgcgacggttactctggttactggggccgcgccgcgctggcgagagccgccgcccgcgagggatgctggtgaggaagccgtcgggagccgccgccgccatctgagggaggtaccctggaaaccaccttttatcggtggggaagtgcagtcgcggtgggcggctctgggggccagcgaaacgggaggcctctaaatctttaggttggggctgcattgccctggagccgcactcttgagtccgaggccatcttttgttggagaaggcgtcggcgttggcgttttcccgaggttgggctgtacagtgtctccgtccgcggaaaaagaagcctctgaacccgcgccggcccgcagcccccgtgccttccggccgctgctcgccgtcgccagaggctaggccacgtttcccccagtgccgaggtgtttctgtgaccctccctccactcccattcccttctgaaagggcacctgctcttggtgagaaaagaaattatagcacgaagagccagtatcagaagagtatccatcacccgcagcaaccgctcagggaacaccatcaaaaaagaaaaaaagggaatatctggatttcctgggcgaggaggagcgagtctgctcgggagctgttccagcaggcgatttttaaatactgctttctacgccctatacaacttggcttcacatacttttacactaactttatatgatttttaaaaactggtctgatcggacttctcgtcctgggacactgtttactggagtctggccggctctccgtgctcctcttggtacctcattttggggagaaccttaaacccactcgagcagataatctccgccttgaccgggtgccaccaaagaagccttggaaccatgtggacttttctgggcattgccactttcacctatttttataagaagttcggggacttcatcactttggccaacagggaggtcctgttgtgcgtgctggtgttcctctcgctgggcctggtgctctcctaccgctgtcgccaccgaaacgggggtctcctcgggcgccagcagagcggctcccagttcgccctcttctcggatattctctcaggcctgcctttcattggcttcttctgggccaaatccccccctgaatcagaaaataaggagcagctcgaggccaggaggcgcagaaaaggaaccaatatttcagaaacaagcttaataggaacagctgcctgtacatcaacatcttctcagaatgacccagaagttatcatcgtgggagctggcgtgcttggctctgctttggcagctgtgctttccagagatggaagaaaggtgacagtcattgagagagacttaaaagagcctgacagaatagttggagaattcctgcagccgggtggttatcatgttctcaaagaccttggtcttggagatacagtggaaggtcttgatgcccaggttgtaaatggttacatgattcatgatcaggaaagcaaatcagaggttcagattccttaccctctgtcagaaaacaatcaagtgcagagtggaagagctttccatcacggaagattcatcatgagtctccggaaagcagctatggcagagcccaatgcaaagtttattgaaggtgttgtgttacagttattagaggaagatgatgttgtgatgggagttcagtacaaggataaagagactggagatatcaaggaactccatgctccactgactgttgttgcagatgggcttttctccaagttcaggaaaagcctggtctccaataaagtttctgtatcatctcattttgttggctttcttatgaagaatgcaccacagtttaaagcaaatcatgctgaacttattttagctaacccgagtccagttctcatctaccagatttcatccagtgaaactcgagtacttgttgacattagaggagaaatgccaaggaatttaagagaatacatggttgaaaaaatttacccacaaatacctgatcacctgaaagaaccattcttagaagccactgacaattctcatctgaggtccatgccagcaagcttccttcctccttcatcagtgaagaaacgaggtgttcttcttttgggagacgcatataatatgaggcatccacttactggtggaggaatgactgttgcttttaaagatataaaactatggagaaaactgctaaagggtatccctgacctttatgatgatgcagctattttcgaggtaagatcaattattttgacaaaaatgtctcaaaatggatttatttctgggggttaagagcagtggggctctgatggggagatctgtactaaggaacctgatgctttataatagctcttaggcatcttgcttaggcttaaagaacctgacttgcaacctgtgaatcttagagaatttctaaatttgaatattatgtaacacttgattgctatgggccacttagctcatagtggttgtaaatttagcttcagtgtcatataacccattgctctgaaggtgattttttattttttttgtaaatgataaacataaggcaatattacttgcagatagtccttagaaggataagtatcagtttgaggggattataaacatcagtttgtgcttttttatccttaccatataataaatgagctatttcttttttaggccaaaaaatcattttactgggcaagaaaaacatctcattcctttgtcgtgaatatccttgctcaggctctttatgaattattttctgccacagatggtaagtgtagacactttttagtgaatattactcaattgcagatttttagcgtaggaaaggaataaacaagttagtgatttgtccagaaataaaaatgttacctgagtttgctaactcccaagttggtagttttttaaaattccattttgagcaatagttgtagttttagttttagtttggaaggta

SEQ ID NO: 441000 - DNA, 1679 bp, Homo sapiens
  misc_feature (96)..(96): n is a, c, g, or t
  misc_feature (120)..(120): n is a, c, g, or t
aagggtactcactgagcgtcctggatctgtgaagggtactcactgagcgacctggaatctgtgaagggtactcactgagcgactcaggtgagtctnccgacatgtcctggccccgatgtnctccatgcaccacagtttaaagcaaatcacgctgaacttattttagctaacccgagtccagttctcatctaccagatttcatccagtgaaactcgagtacttgttgacattagaggagaaatgccaaggaatttaagagaatacatggttgaaaaaatttacccacaaatacctgatcacctgaaagaaccattcttagaagccactgacaattctcatctgaggtccatgccagcaagcttccttcctccttcatcagtgaagaaacgaggtgttcttcttttgggagacgcatataatatgaggcatccacttactggtggaggaatgactgttgcttttaaagatataaaactatggagaaaactgctaaagggtatccctgacctttatgatgatgcagctattttcgaggtaagatcaattattttgacaaaaatgtctcaaaatggatttatttctgggggttaagagcagtggggctctgatggggagatctgtactaaggaacctgatgctttataatagctcttaggcatcttgcttaggcttaaagaacctgacttgcaacctgtgaatcttagagaatttctaaatttgaatattatgtaacacttgattgctatgggccacttagctcatagtggttgtaaatttagcttcagtgtcatataacccattgctctgaaggtgattttttattttttttgtaaatgataaacataaggcaatattacttgcagatagtccttagaaggataagtatcagtttgaggggattataaacatcagtttgtgcttttttatccttaccatataataaatgagctatttcttttttaggccaaaaaatcattttactgggcaagaaaaacatctcattcctttgtcgtgaatatccttgctcaggctctttatgaattattttctgccacagatgattccctgcatcaactaagaaaagcctgttttctttatttcaaacttggtggcgaatgtgttgcgggtcctgttgggctgctttctgtattgtctcctaaccctctagttttaattggacacttctttgctgttgcaatctatgccgtgtatttttgctttaagtcagaaccttggattacaaaacctcgagcccttctcagtagtggtgctgtattgtacaaagcgtgttctgtaatatttcctctaatttactcagaaatgaagtatatggttcattaagcttaaaggggaaccatttgtgaatgaatatttggaacttaccaagtcctaagagacttttggaagaggatatatatagcatagtaccataccacttataaagtggaaactcttggaccaagatttggattaatttgtttttgaagttttttgtatataaatatgtaaatacatgctttaatttgcaatttaaaatgaaggggttaaataagttagacatttaaaagaaatgattgttaccataaattagtgctaatgctgaggagaactacagtttttcttttgaatttagtatttgagatgagttgttgggacatgcaaataaaatgaagaatgaa

SEQ ID NO: 441001 - DNA, 914 bp, Homo sapiens
gtgtatcccccgggctgcaggattcggcacgagcttcttggcgcgatgaggttccggttctgtggtgatctggactgtcccgactgggtcctggcagaaatcagcacgctggccaagatgtcctctgtgaagttgcggctgctctgcagccagggtactaaaggagctgctgggacaggggattgattatgagaagatcctgaagctcacggctgacgccaagtttgagtcaggcgatgtgaaggccacagtggcagtgctgagtttcatcctctccagtgcggccaagcacagtgtcgatggcgaatccttgtccagtgaactgcagcagctggggctgcccaaagagcacgcggccagcctgtgccgctgttatgaggagaagcaaagccccttgcagaagcacttgcgggtctgcagcctacgcatgaataggttggcaggtgtgggctggcgggtggactacaccctgagctccagcctgctgcaatccgtggaagagcccatggtgcacctgcggctggaggtggcagctgccccagggaccccagcccagcctgttgccatgtccctctcagcagacaagttccaggtcctcctggcagaactgaagcaggcccagaccctgatgagctccctgggctgaggagaagggtgttccaggcctgtgtggagccgccctgcccgtatggagtcacgccctctgaactgctcttcgggaggcagccctggttctaggatgctgaggccctggcccggactctggcctcccagatccccagctgcctcacttctctcttgagaacttggctcagggctcctgaggacctttcccagcattaccttcccttcccttgaaaggcaattgttggctgttttcataagcaggaaaaataaacagaagtataaaggaa

SEQ ID NO: 441002 - DNA, 845 bp, Homo sapiens
aagtggtacggctgcgattggtcggggagaaatcagcacgctggcaagatgtcctctgtgaagttgcggctgctctgcagccagggtactaaaggagctgctgggacaggggattgattatgagaagatcctgaagctcacggctgacgccaagtttgagtcaggcgatgtgaaggccacagtggcagtgctgagtttcatcctctccagtgcggccaagcacagtgtcgatggcgaatccttgtccagtgaactgcagcagctggggctgcccaaagagcacgcggccagcctgtgccgctgttatgaggagaagcaaagccccttgcagaagcacttgcgggtctgcagcctacgcatgaataggttggcaggtgtgggctggcgggtggactacaccctgagctccagcctgctgcaatccgtggaagagcccatggtgcacctgcggctggaggtggcagctgccccagggaccccagcccagcctgttgccatgtccctctcagcagacaagttccaggtcctcctggcagaactgaagcaggcccagaccctgatgagctccctgggctgaggagaagggtgttccaggcctgtgtggagccgccctgcccgtatggagtcacgccctctgaactgctcttcgggaggcagccctggttctaggatgctgaggccctggcccggactctggcctcccagatccccagctgcctcacttctctcttgagaacttggctcagggctcctgaggacctttcccagcattaccttcccttcccttgaaaggcaattgttggctgttttcataagcaggaaaaataaacagaagtataaaggaa

SEQ ID NO: 441003 - DNA, 951 bp, Homo sapiens
gtgtatcccccgggctgcaggattcggcacgagcttcttggcgcgatgaggttccggttctgtggtgatctggactgtcccgactgggtcctggcagaaatcagcacgctggccaagatgtcctctgtgaagttgcggctgctctgcagccagggtactaaaggagctgctgggacaggggattgattatgagaagatcctgaagctcacggctgacgccaagtttgagtcaggcgatgtgaaggccacagtggcagtgctgagtttcatcctctccagtgcggccaagcacagtgtcgatggcgaatccttgtccagtgaactgcagcagctggggctgcccaaagagcacgcggccagcctgtgccgctgttatgaggagaagcaaagccccttgcagaagcacttgcgggtctgcagcctacgcatgaataggttggcaggtgtgggctggcgggtggactacaccctgagctccagcctgctgcaatccgtggaagagcccatggtgcacctgcggctggaggtggcagctgccccagggaccccagcccagcctgttgccatgtccctctcagcagacaagttccaggtcctcctggcagaactgaagcaggcccagaccctgatgagctccctgggctgaggagaagggtgttccaggcctgtgtggagccgccctgcccgtatggagtcacgccctctgaactgctcttcgggaggcagccctggttctaggatgctgaggccctggcccggactctggcctcccagatccccagctgcctcacttctctcttgagaacttggctcagggctcctgaggacctttcccagcattaccttcccttcccttgaaaggcaattgttggctgttttcataagcaggaaaaataaacagaagtataaaggaaaaaaacaacaccaccacagcaaacacaacaacacctt

SEQ ID NO: 441004 - DNA, 1976 bp, Homo sapiens
cggacgcgtgggtcgacccacgcgtccgaagaaattcccgggccctggcttcttggcgcgatgaggttccggttctgtggtgatctggactgtcccgactgggtcctggcagaaatcagcacgctggccaagatgtcctctgtgaagttgcggctgctctgcagccagggtactaaaggagctgctgggacaggggattgattatgagaagatcctgaagctcacggctgacgccaagtttgagtcaggcgatgtgaaggccacagtggcagtgctgagtttcatcctctccagtgcggccaagcacagtgtcgatggcgaatccttgtccagtgaactgcagcagctggggctgcccaaagagcacgcggccagcctgtgccgctgttatgaggagaagcaaagccccttgcagaagcacttgcgggtctgcagcctacgcatgaataggttggcaggtgtgggctggcgggtggactacaccctgagctccagcctgctgcaatccgtggaagagcccatggtgcacctgcggctggaggtggcagctgccccagggaccccagcccagcctgttgccatgtccctctcagcagacaagttccaggtcctcctggcagaactgaagcaggcccagaccctgatgagctccctgggctgaggagaagggtgttccaggcctgtgtggagccgccctgcccgtatggagtcacgccctctgaactgctcttcgggaggcagccctggttctaggatgctgaggccctggcccggactctggcctcccagatccccagctgcctcacttctctcttgagaacttggctcagggctcctgaggacctttcccagcattaccttcccttcccttgaaaggtagagatgaggtttctccatgttggtcaggctggtctcgaactcctgacctcaggtgatccacccaccttgccctcccaaagtgctgggattacaggcgtaagccactgcgcccagccactgccatcatctttaggaagagagaagtgaccatgcctgaaccagtcattggcaagaggaacggtgttatggactgaatgttcatgttcctccagaattcatatgctgaagcctctgtccacacatgcacaccagatgagggccatgtgcgcacacgaggtggctgtctacaaggccagaaagagggctgtcaacaggaactgcgtctgctggcaccttgatcttgaacttcccagcctccagaactgtgagaaagaaatctctatggtgtaagccactagtctgtggcattgttatagcagctcgagaagactaaggcagatgggcttccaggactggcccagaccagccagggctccttgtagaaaaggctgatgccagggttggcacatggagggtacaaggaggactcgcctggagtatcttaaggaacctatcgaagaataatggcttgttccactggccaaagatgggacaatttgaacatcaaaagagatacttactgactccactcctgacttctgcttctgaaaaaatgaagtaggtgttttccctattcctcccactaagtacagttaacaaccctggatgttacatataaaacaaacaaaaagactccgagcgatggagagaaggcaccctagcctggctgggatcctcaggacctgaggctccacagagagaaattcctggaatctggaccccatggcccagtcaggttacacaaaactgatcatcacagatctgtagaactatacaaaagtgctaacattcatgattagggtctcagaaggtaaggaggaagagagtggaatggaaaaagtattcaaaaaaataatcactaaaggccaggtgcagtggcccatgcctgtaatcccagcactttgggaggtgggacaattgctttagaccttgcaactggcctgagcaacacagggagactcagtttctccaaaaaaataaaaaattagccgatcatg

SEQ ID NO: 441005 - DNA, 786 bp, Homo sapiens
cccagaggcagttagtccaagtcacgtgatcgtcgactcagctgaccctgcgggaccggaaaaagaaattcccgggccctggcttcttggcgcgatgaggttccggttctgtggtgatctggactgtcccgactgggtcctggcagaaatcagcacgctggccaagatgtcctctgtgaagttgcggctgctctgcagccagggtactaaaggagctgctgggacaggggattgattatgagaagatcctgaagctcacggctgacgccaagtttgagtcaggcgatgtgaaggccacagtggcagtgctgagtttcatcctctccagtgcggccaagcacagtgtcgatggcgaatccttgtccagtgaactgcagcagctggggctgcccaaagagcacgcggccagcctgtgccgctgttatgaggagaagcaaagccccttgcagaagcacttgcgggtctgcagcctacgcaaactgaagcaggcccagaccctgatgagctccctgggctgaggagaagggtgttccaggcctgtgtggagccgccctgcccgtatggagtcacgccctctgaactgctcttcgggaggcagccctggttctaggatgctgaggccctggcccggactctggcctcccagatccccagctgcctcacttctctcttgagaacttggctcagggctcctgaggacctttcccagcattaccttcccttcccttgaaaggcaattgttggctgttttcataagcaggaaaaataaacagaagtataaaggaa

SEQ ID NO: 441006 - DNA, 731 bp, Homo sapiens
cccagaggcagttagtccaagtcacgtgatcgtcgactcagctgaccctgcgggaccggaaaaagaaattcccgggccctggcttcttggcgcgatgaggttccggttctgtggtgatctggactgtcccgactgggtcctggcagaaatcagcacgctggccaagatgtcctctgtgaagttgcggctgctctgcagccagggtactaaaggagctgctgggacaggggattgattatgagaagatcctgaagctcacggctgacgccaagtttgggccaagcacagtgtcgatggcgaatccttgtccagtgaactgcagcagctggggctgcccaaagagcacgcggccagcctgtgccgctgttatgaggagaagcaaagccccttgcagaagcacttgcgggtctgcagcctacgcaaactgaagcaggcccagaccctgatgagctccctgggctgaggagaagggtgttccaggcctgtgtggagccgccctgcccgtatggagtcacgccctctgaactgctcttcgggaggcagccctggttctaggatgctgaggccctggcccggactctggcctcccagatccccagctgcctcacttctctcttgagaacttggctcagggctcctgaggacctttcccagcattaccttcccttcccttgaaaggcaattgttggctgttttcataagcaggaaaaataaacagaagtataaaggaa

SEQ ID NO: 441007 - DNA, 401 bp, Homo sapiens
gcggccgcctactactactgctcgaattcaagcttctaacgatgtacggggacatgtccctctcagcagacacaaaacggtcctcctggcagaactgaagcaggcccagaccctgatgagctccctgggctgaggagaagggtgttccaggcctgtgtggagccgccctgcccgtatggagtcacgccctctgaactgctcttcgggaggcagccctggttctaggatgctgaggccctggcccggactctggcctcccagatccccagctgcctcacttctctcttgagaacttggctcagggctcctgaggacctttcccagcattaccttcccttcccttgaaaggcaattgttggctgttttcataagcaggaaaaataaacagaagtataaaggaa

SEQ ID NO: 441008 - DNA, 963 bp, Homo sapiens
cccagaggcagttagtccaagtcacgtgatcgtcgactcagctgaccctgcgggaccggaaaaagaaattcccgggccctggcttcttggcgcgatgaggttccggttctgtggtgatctggactgtcccgactgggtcctggcagaaatcagcacgctggccaagatgtcctctgtgaagttgcggctgctctgcagccagggtactaaaggagctgctgggacaggggattgattatgagaagatcctgaagctcacggctgacgccaagtttgagtcaggcgatgtgaaggccacagtggcagtgctgagtttcatcctctccagtgcggccaagcacagtgtcgatggcgaatccttgtccagtgaactgcagcagctggggctgcccaaagagcacgcggccagcctgtgccgctgttatgaggagaagcaaagccccttgcagaagcacttgcgggtctgcagcctacgcatgaataggttggcaggtgtgggctggcgggtggactacaccctgagctccagcctgctgcaatccgtggaagagcccatggtgcacctgcggctggaggtggcagctgccccagggaccccagcccagcctgttgccatgtccctctcagcagacaagttccaggtcctcctggcagaactgaagcaggcccagaccctgatgagctccctgggctgaggagaagggtgttccaggcctgtgtggagccgccctgcccgtatggagtcacgccctctgaactgctcttcgggaggcagccctggttctaggatgctgaggccctggcccggactctggcctcccagatccccagctgcctcacttctctcttgagaacttggctcagggctcctgaggacctttcccagcattaccttcccttcccttgaaaggcaattgttggctgttttcataagcaggaaaaataaacagaagtataaaggaa

SEQ ID NO: 441009 - DNA, 991 bp, Homo sapiens
ggcactaggggcgaagcgaggcttgggctgctggagcgggaatgagggggcgccaagtggctccggaaactgggggaggttgtactggcctctccgcaaacacagtgtgtgcgggcgtgagggctaggttccggttctgtggtgatctggactgtcccgactgggtcctggcagaaatcagcacgctggccaagatgtcctctgtgaagttgcggctgctctgcagccagggtactaaaggagctgctgggacaggggattgattatgagaagatcctgaagctcacggctgacgccaagtttgagtcaggcgatgtgaaggccacagtggcagtgctgagtttcatcctctccagtgcggccaagcacagtgtcgatggcgaatccttgtccagtgaactgcagcagctggggctgcccaaagagcacgcggccagcctgtgccgctgttatgaggagaagcaaagccccttgcagaagcacttgcgggtctgcagcctacgcatgaataggttggcaggtgtgggctggcgggtggactacaccctgagctccagcctgctgcaatccgtggaagagcccatggtgcacctgcggctggaggtggcagctgccccagggaccccagcccagcctgttgccatgtccctctcagcagacaagttccaggtcctcctggcagaactgaagcaggcccagaccctgatgagctccctgggctgaggagaagggtgttccaggcctgtgtggagccgccctgcccgtatggagtcacgccctctgaactgctcttcgggaggcagccctggttctaggatgctgaggccctggcccggactctggcctcccagatccccagctgcctcacttctctcttgagaacttggctcagggctcctgaggacctttcccagcattaccttcccttcccttgaaaggcaattgttggctgttttcataagcaggaaaaataaacagaagtataaaggaa

SEQ ID NO: 441010 - DNA, 987 bp, Homo sapiens
  misc_feature (864)..(864): n is a, c, g, or t
  misc_feature (871)..(871): n is a, c, g, or t
  misc_feature (873)..(875): n is a, c, g, or t
gtgtatcccccgggctgcaggattcggcacgagcttcttggcgcgatgaggttccggttctgtggtgatctggactgtcccgactgggtcctggcagaaatcagcacgctggccaagatgtcctctgtgaagttgcggctgctctgcagccagggtactaaaggagctgctgggacaggggattgattatgagaagatcctgaagctcacggctgacgccaagtttgagtcaggcgatgtgaaggccacagtggcagtgctgagtttcatcctctccagtgcggccaagcacagtgtcgatggcgaatccttgtccagtgaactgcagcagctggggctgcccaaagagcacgcggccagcctgtgccgctgttatgaggagaagcaaagccccttgcagaagcacttgcgggtctgcagcctacgcatgaataggttggcaggtgtgggctggcgggtggactacaccctgagctccagcctgctgcaatccgtggaagagcccatggtgcacctgcggctggaggtggcagctgccccagggaccccagcccagcctgttgccatgtccctctcagcagacaagttccaggtcctcctggcagaactgaagcaggcccagaccctgatgagctccctgggctgaggagaagggtgttccaggcctgtgtggagccgccctgcccgtatggagtcacgccctctgaactgctcttcgggaggcagccctggttctaggatgctgaggccctggcccggactctggcctcccagatccccagctgcctcacttctctcttgagaacttggctcagggctcctgaggacctttcccagcattaccttcccttcccttgaaagggnggtgttncnnncagacaataccggagttaaaaaaacacaaacggggcctgtcggggaaaagttgatgcggcttgtccggcctttgaaagggaaggggccaagggatatcgacgcgtaaaaaag

SEQ ID NO: 441011 - DNA, 1387 bp, Homo sapiens
  misc_feature (936)..(936): n is a, c, g, or t
  misc_feature (946)..(946): n is a, c, g, or t
  misc_feature (952)..(952): n is a, c, g, or t
  misc_feature (954)..(954): n is a, c, g, or t
  misc_feature (957)..(957): n is a, c, g, or t
  misc_feature (962)..(962): n is a, c, g, or t
  misc_feature (979)..(979): n is a, c, g, or t
gtgtatcccccgggctgcaggattcggcacgagcttcttggcgcgatgaggttccggttctgtggtgatctggactgtcccgactgggtcctggcagaaatcagcacgctggccaagatgtcctctgtgaagttgcggctgctctgcagccagggtactaaaggagctgctgggacaggggattgattatgagaagatcctgaagctcacggctgacgccaagtttgagtcaggcgatgtgaaggccacagtggcagtgctgagtttcatcctctccagtgcggccaagcacagtgtcgatggcgaatccttgtccagtgaactgcagcagctggggctgcccaaagagcacgcggccagcctgtgccgctgttatgaggagaagcaaagccccttgcagaagcacttgcgggtctgcagcctacgcatgaataggttggcaggtgtgggctggcgggtggactacaccctgagctccagcctgctgcaatccgtggaagagcccatggtgcacctgcggctggaggtggcagctgccccagggaccccagcccagcctgttgccatgtccctctcagcagacaagttccaggtcctcctggcagaactgaagcaggcccagaccctgatgagctccctgggctgaggagaagggtgttccaggcctgtgtggagccgccctgcccgtatggagtcacgccctctgaactgctcttcgggaggcagccctggttctaggatgctgaggccctggcccggactctggcctcccagatccccagctgcctcacttctctcttgagaacttggctcagggctcctgaggacctttcccagcattaccttcccttcccttgaaaggcaattgttggctgttttcataagcaggaaaaataaacagaagtataaaggaaaaaaaaaaaaaaaaaaaaaaanaaaaaaaaanaaaaananaanaaaanaaaaaaaaaaaaaaaanaaaaaaaaagcgggcgcggcgcgcgcgccccccgccccccccccgggcgcgcgccccccccccggcacacccacgatttatttttgaaaaagagggcggcctcctactatgagggaggcagttaattatataatgacgaggagcgcggcgccgcgctcgcgttgctactcaacaccacacacgccggttgtgcggtgtgacatacagaaagtgctctcgacgtgcccgtcggactatctttctcttgtggacagagacacccaccatatcttgtgggtgggtgggcgtgcgaaacaactctaagtgtatggagcgaccacaacctccccacacgcgagcaaatagttatcggtcgtctttgggggaggggaaataaaaacaaacatcttgtatgatgatgcatctagc

SEQ ID NO: 441012 - DNA, 896 bp, Homo sapiens
cccagaggcagttagtccaagtcacgtgatcgtcgactcagctgaccctgcgggaccggaaaaagaaattcccgggccctggcttcttggcgcgatgaggttccggttctgtggtgatctggactgtcccgactgggtcctggcagaaatcagcacgctggccaagatgtatgagaagatcctgaagctcacggctgacgccaagtttgagtcaggcgatgtgaaggccacagtggcagtgctgagtttcatcctctccagtgcggccaagcacagtgtcgatggcgaatccttgtccagtgaactgcagcagctggggctgcccaaagagcacgcggccagcctgtgccgctgttatgaggagaagcaaagccccttgcagaagcacttgcgggtctgcagcctacgcatgaataggttggcaggtgtgggctggcgggtggactacaccctgagctccagcctgctgcaatccgtggaagagcccatggtgcacctgcggctggaggtggcagctgccccagggaccccagcccagcctgttgccatgtccctctcagcagacaagttccaggtcctcctggcagaactgaagcaggcccagaccctgatgagctccctgggctgaggagaagggtgttccaggcctgtgtggagccgccctgcccgtatggagtcacgccctctgaactgctcttcgggaggcagccctggttctaggatgctgaggccctggcccggactctggcctcccagatccccagctgcctcacttctctcttgagaacttggctcagggctcctgaggacctttcccagcattaccttcccttcccttgaaaggcaattgttggctgttttcataagcaggaaaaataaacagaagtataaaggaa

SEQ ID NO: 441013 - DNA, 1708 bp, Homo sapiens
cccagaggcagttagtccaagtcacgtgatcgtcgactcagctgaccctgcgggaccggaaaaagaaattcccgggccctggcttcttggcgcgatgaggttccggttctgtggtgatctggactgtcccgactgggtcctggcagaaatcagcacgctggccaagatggttgagtgcacagggtctagtctgggtggaggaggggtgttgggggtggggattgtgggtgtagaggatggtgaggtttctctggggctagggcctcagtgctctcagcctgtgctaccatgctttgtgaccttgatcagtggctggcctgctctgagccagtccccaggaaggaggggtgaggtttgccagcctggctgatgtaaggacttcccttccagtcctctgtgaagttgcggctgctctgcagccagggtactaaaggagctgctgggacaggggattgatgtgagtacaagatccagcaccccattgtcccatgaccttatgaccaccactgccctgaaactctgcactaggcccagggagacgggtgagccagcctctcaacctctctgggcacctcccttccttctttccagcctgtctgttccttatcgcaggatccaggctgggggtgaggggctggtgagcaggggcctggcaccccctgaaggtctcctttccccatagtatgagaagatcctgaagctcacggctgacgccaagtttggtgagtatcccgctgagtctataggccccaggcaaccctgggaacttggcctggtgcctggtacagaggggccccccacccctcccagcagcatccttaacttaccttccctagtggaggagcatgagggaaagaaagaccgacagtcccaccttcctgtcctctgccagctcctggtggagcagtagcagtgcctgtggctccaggaggcctgggggctttgagctaaagttaatagggcaacagggaggtggctggacccacagtgacaccccctgccccacccacgggtccctcagagtcaggcgatgtgaaggccacagtggcagtgctgagtttcatcctctccagtgcggccaagcacagtgtcgatggcgaatccttgtccagtgaactgcagcagctggggctgcccaaagagcacgcggccagcctgtgccgctgttatgaggagaagcaaagccccttgcagaagcacttgcgggtctgcagcctacgcatgaataggttggcaggtgtgggctggcgggtggactacaccctgagctccagcctgctgcaatccgtggaagagcccatggtgcacctgcggctggaggtggcagctgccccagggaccccagcccagcctgttgccatgtccctctcagcagacaagttccaggtcctcctggcagaactgaagcaggcccagaccctgatgagctccctgggctgaggagaagggtgttccaggcctgtgtggagccgccctgcccgtatggagtcacgccctctgaactgctcttcgggaggcagccctggttctaggatgctgaggccctggcccggactctggcctcccagatccccagctgcctcacttctctcttgagaacttggctcagggctcctgaggacctttcccagcattaccttcccttcccttgaaaggcaattgttggctgttttcataagcaggaaaaataaacagaagtataaaggaa

SEQ ID NO: 441014 - DNA, 1434 bp, Homo sapiens
gtgtatcccccgggctgcaggattcggcacgagcttcttggcgcgatgaggttccggttctgtggtgatctggactgtcccgactgggtcctggcagaaatcagcacgctggccaagatggttgagtgcacagggtctagtctgggtggaggaggggtgttgggggtggggattgtgggtgtagaggatggtgaggtttctctggggctagggcctcagtgctctcagcctgtgctaccatgctttgtgaccttgatcagtggctggcctgctctgagccagtccccaggaaggaggggtgaggtttgccagcctggctgatgtaaggacttcccttccagtcctctgtgaagttgcggctgctctgcagccagggtactaaaggagctgctgggacaggggattgattatgagaagatcctgaagctcacggctgacgccaagtttggtgagtatcccgctgagtctataggccccaggcaaccctgggaacttggcctggtgcctggtacagaggggccccccacccctcccagcagcatccttaacttaccttccctagtggaggagcatgagggaaagaaagaccgacagtcccaccttcctgtcctctgccagctcctggtggagcagtagcagtgcctgtggctccaggaggcctgggggctttgagctaaagttaatagggcaacagggaggtggctggacccacagtgacaccccctgccccacccacgggtccctcagagtcaggcgatgtgaaggccacagtggcagtgctgagtttcatcctctccagtgcggccaagcacagtgtcgatggcgaatccttgtccagtgaactgcagcagctggggctgcccaaagagcacgcggccagcctgtgccgctgttatgaggagaagcaaagccccttgcagaagcacttgcgggtctgcagcctacgcatgaataggttggcaggtgtgggctggcgggtggactacaccctgagctccagcctgctgcaatccgtggaagagcccatggtgcacctgcggctggaggtggcagctgccccagggaccccagcccagcctgttgccatgtccctctcagcagacaagttccaggtcctcctggcagaactgaagcaggcccagaccctgatgagctccctgggctgaggagaagggtgttccaggcctgtgtggagccgccctgcccgtatggagtcacgccctctgaactgctcttcgggaggcagccctggttctaggatgctgaggccctggcccggactctggcctcccagatccccagctgcctcacttctctcttgagaacttggctcagggctcctgaggacctttcccagcattaccttcccttcccttgaaaggcaattgttggctgttttcataagcaggaaaaataaacagaagtataaaggaa

SEQ ID NO: 441015 - DNA, 873 bp, Homo sapiens
cagggagactatagaatatcccgaattcactacgcggcttgtttcagctagaaatcagcacgctgcccacgatggcctctgcgaagtcgcagctgatctgccgccagacactaaaggagctgctgtgacagccaaatgattatgagaagatcctgcagctcacggctgacgccaagcttgagacatagtcaggcgatgtgaaggccacagtggcagtgctgagtttcatcctctccagtgcggccaagcacagtgtcgatggcgaatccttgtccagtgaactgcagcagctggggctgcccaaagagcacgcggccagcctgtgccgctgttatgaggagaagcaaagccccttgcagaagcacttgcgggtctgcagcctacgcatgaataggttggcaggtgtgggctggcgggtggactacaccctgagctccagcctgctgcaatccgtggaagagcccatggtgcacctgcggctggaggtggcagctgccccagggaccccagcccagcctgttgccatgtccctctcagcagacaagttccaggtcctcctggcagaactgaagcaggcccagaccctgatgagctccctgggctgaggagaagggtgttccaggcctgtgtggagccgccctgcccgtatggagtcacgccctctgaactgctcttcgggaggcagccctggttctaggatgctgaggccctggcccggactctggcctcccagatccccagctgcctcacttctctcttgagaacttggctcagggctcctgaggacctttcccagcattaccttcccttcccttgaaaggcaattgttggctgttttcataagcaggaaaaataaacagaagtataaaggaa

SEQ ID NO: 441016 - DNA, 1073 bp, Homo sapiens
gtgtatcccccgggctgcaggattcggcacgagcttcttggcgcgatgaggttccggttctgtggtgatctggactgtcccgactgggtcctggcagaaatcagcacgctggccaagatgtcctctgtgaagttgcggctgctctgcagccagggtactaaaggagctgctgggacaggggattgattatgagaagatcctgaagctcacggctgacgccaagtttgagtcaggcgatgtgaaggccacagtggcagtgctgagtttcatcctctccagtgcggccaagcacagtgtcgatggcgaatccttgtccagtgaactgcagcagctggggctgcccaaaggtacgggttgtgggtgggcagctgggcagcctgtgggccaagggctgctagagaaggggacaggccctgtgaccctgaggtgtacctgccctgtctgggccaggagcccaagccaggccccgacatgctacctccagagctactccattctacccccagagcacgcggccagcctgtgccgctgttatgaggagaagcaaagccccttgcagaagcacttgcgggtctgcagcctacgcatgaataggttggcaggtgtgggctggcgggtggactacaccctgagctccagcctgctgcaatccgtggaagagcccatggtgcacctgcggctggaggtggcagctgccccagggaccccagcccagcctgttgccatgtccctctcagcagacaagttccaggtcctcctggcagaactgaagcaggcccagaccctgatgagctccctgggctgaggagaagggtgttccaggcctgtgtggagccgccctgcccgtatggagtcacgccctctgaactgctcttcgggaggcagccctggttctaggatgctgaggccctggcccggactctggcctcccagatccccagctgcctcacttctctcttgagaacttggctcagggctcctgaggacctttcccagcattaccttcccttcccttgaaaggcaattgttggctgttttcataagcaggaaaaataaacagaagtataaaggaa

SEQ ID NO: 441017 - DNA, 1294 bp, Homo sapiens
gtgtatcccccgggctgcaggattcggcacgagcttcttggcgcgatgaggttccggttctgtggtgatctggactgtcccgactgggtcctggcagaaatcagcacgctggccaagatggttgagtgcacagggtctagtctgggtggaggaggggtgttgggggtggggattgtgggtgtagaggatggtgaggtttctctggggctagggcctcagtgctctcagcctgtgctaccatgctttgtgaccttgatcagtggctggcctgctctgagccagtccccaggaaggaggggtgaggtttgccagcctggctgatgtaaggacttcccttccagtcctctgtgaagttgcggctgctctgcagccagggtactaaaggagctgctgggacaggggattgattatgagaagatcctgaagctcacggctgacgccaagtttgagtcaggcgatgtgaaggccacagtggcagtgctgagtttcatcctctccagtgcggccaagcacagtgtcgatggcgaatccttgtccagtgaactgcagcagctggggctgcccaaaggtacgggttgtgggtgggcagctgggcagcctgtgggccaagggctgctagagaaggggacaggccctgtgaccctgaggtgtacctgccctgtctgggccaggagcccaagccaggccccgacatgctacctccagagctactccattctacccccagagcacgcggccagcctgtgccgctgttatgaggagaagcaaagccccttgcagaagcacttgcgggtctgcagcctacgcatgaataggttggcaggtgtgggctggcgggtggactacaccctgagctccagcctgctgcaatccgtggaagagcccatggtgcacctgcggctggaggtggcagctgccccagggaccccagcccagcctgttgccatgtccctctcagcagacaagttccaggtcctcctggcagaactgaagcaggcccagaccctgatgagctccctgggctgaggagaagggtgttccaggcctgtgtggagccgccctgcccgtatggagtcacgccctctgaactgctcttcgggaggcagccctggttctaggatgctgaggccctggcccggactctggcctcccagatccccagctgcctcacttctctcttgagaacttggctcagggctcctgaggacctttcccagcattaccttcccttcccttgaaaggcaattgttggctgttttcataagcaggaaaaataaacagaagtataaaggaa

SEQ ID NO: 441018 - DNA, 1651 bp, Homo sapiens
gtgtatcccccgggctgcaggattcggcacgagcttcttggcgcgatgaggttccggttctgtggtgatctggactgtcccgactgggtcctggcagaaatcagcacgctggccaagatggttgagtgcacagggtctagtctgggtggaggaggggtgttgggggtggggattgtgggtgtagaggatggtgaggtttctctggggctagggcctcagtgctctcagcctgtgctaccatgctttgtgaccttgatcagtggctggcctgctctgagccagtccccaggaaggaggggtgaggtttgccagcctggctgatgtaaggacttcccttccagtcctctgtgaagttgcggctgctctgcagccagggtactaaaggagctgctgggacaggggattgattatgagaagatcctgaagctcacggctgacgccaagtttgagtcaggcgatgtgaaggccacagtggcagtgctgagtttcatcctctccagtgcggccaagcacagtgtcgatggcgaatccttgtccagtgaactgcagcagctggggctgcccaaaggtacgggttgtgggtgggcagctgggcagcctgtgggccaagggctgctagagaaggggacaggccctgtgaccctgaggtgtacctgccctgtctgggccaggagcccaagccaggccccgacatgctacctccagagctactccattctacccccagagcacgcggccagcctgtgccgctgttatgaggagaagcaaagccccttgcagaagcacttgcgggtctgcagcctacgcagtaagtatgaggccagccagggtccgggctcattctagaaggtgcacgcagcacacaaagtgcatggagagtccagggagacgacttaaccacggtcacatggttactagcagccgtagagctgggacctggccctgggtctcctgactccccccaaggtttcttgtcactgaggtctgctgtgggtgatcagaactgattatcgggcacctgccctgttctgagcctgggtcagcaggatgggagcttcttagaggccacatagccttgaatggttgagagctgagccagggtgtcggctgaggtctacttggcttgcctgctttgatcctgagagccacccaccccatctcacagtgaataggttggcaggtgtgggctggcgggtggactacaccctgagctccagcctgctgcaatccgtggaagagcccatggtgcacctgcggctggaggtggcagctgccccagggaccccagcccagcctgttgccatgtccctctcagcagacaagttccaggtcctcctggcagaactgaagcaggcccagaccctgatgagctccctgggctgaggagaagggtgttccaggcctgtgtggagccgccctgcccgtatggagtcacgccctctgaactgctcttcgggaggcagccctggttctaggatgctgaggccctggcccggactctggcctcccagatccccagctgcctcacttctctcttgagaacttggctcagggctcctgaggacctttcccagcattaccttcccttcccttgaaaggcaattgttggctgttttcataagcaggaaaaataaacagaagtataaaggaa

SEQ ID NO: 441019 - DNA, 1237 bp, Homo sapiens
gtgtatcccccgggctgcaggattcggcacgagcttcttggcgcgatgaggttccggttctgtggtgatctggactgtcccgactgggtcctggcagaaatcagcacgctggccaagatgtcctctgtgaagttgcggctgctctgcagccagggtactaaaggagctgctgggacaggggattgattatgagaagatcctgaagctcacggctgacgccaagtttgagtcaggcgatgtgaaggccacagtggcagtgctgagtttcatcctctccagtgcggccaagcacagtgtcgatggcgaatccttgtccagtgaactgcagcagctggggctgcccaaagagcacgcggccagcctgtgccgctgttatgaggagaagcaaagccccttgcagaagcacttgcgggtctgcagcctacgcatgaataggttggcaggtgtgggctggcgggtggactacaccctgagctccagcctgctgcaatccgtggaagagcccatggtgcacctgcggctggaggtggcagctgccccagggaccccagcccagcctgttgccatgtccctctcagcagacaagttccaggtcctcctggcaggtgaggctcagctattcctcgacgggtgagaggctctcccagatccgcctgactgcctcccacctgcccacctcttccctctgcagaactgaagcaggcccagaccctgatgagctccctgggctgaggagaagggtgttccaggcctgtgtggagccgccctgcccgtatggagtcacgccctctgaactgctcttcgggaggcagccctggttctaggatgctgaggccctggcccggactctggcctcccagatccccagctgcctcacttctctcttgagaacttggctcagggctcctgaggacctttcccagcattaccttcccttcccttgaaaggcaattgttggctgttttcataagcaggaaaaataaacagaagtataaaggaagaatgtgtgcagggggttctgtttgggttcagatcaagggtttttgtgagagaaacacaagtgacatacaggccttcttggtccatcactcattttcttttctcaattgctgattgagggaggtcataggtaaggccaactgaggaccaaaatgcatctgcttgtctggtgagaagaaaatcagggttctagctcccagatctgggatgctcttggctctgctgtctttgccccctg

SEQ ID NO: 441020 - DNA, 2310 bp, Homo sapiens
cccagaggcagttagtccaagtcacgtgatcgtcgactcagctgaccctgcgggaccggaaaaagaaattcccgggccctggcttcttggcgcgatgaggttccggttctgtggtgatctggactgtcccgactgggtcctggcagaaatcagcacgctggccaagatggttgagtgcacagggtctagtctgggtggaggaggggtgttgggggtggggattgtgggtgtagaggatggtgaggtttctctggggctagggcctcagtgctctcagcctgtgctaccatgctttgtgaccttgatcagtggctggcctgctctgagccagtccccaggaaggaggggtgaggtttgccagcctggctgatgtaaggacttcccttccagtcctctgtgaagttgcggctgctctgcagccagggtactaaaggagctgctgggacaggggattgatgtgagtacaagatccagcaccccattgtcccatgaccttatgaccaccactgccctgaaactctgcactaggcccagggagacgggtgagccagcctctcaacctctctgggcacctcccttccttctttccagcctgtctgttccttatcgcaggatccaggctgggggtgaggggctggtgagcaggggcctggcaccccctgaaggtctcctttccccatagtatgagaagatcctgaagctcacggctgacgccaagtttggtgagtatcccgctgagtctataggccccaggcaaccctgggaacttggcctggtgcctggtacagaggggccccccacccctcccagcagcatccttaacttaccttccctagtggaggagcatgagggaaagaaagaccgacagtcccaccttcctgtcctctgccagctcctggtggagcagtagcagtgcctgtggctccaggaggcctgggggctttgagctaaagttaatagggcaacagggaggtggctggacccacagtgacaccccctgccccacccacgggtccctcagagtcaggcgatgtgaaggccacagtggcagtgctgagtttcatcctctccagtgcggccaagcacagtgtcgatggcgaatccttgtccagtgaactgcagcagctggggctgcccaaaggtacgggttgtgggtgggcagctgggcagcctgtgggccaagggctgctagagaaggggacaggccctgtgaccctgaggtgtacctgccctgtctgggccaggagcccaagccaggccccgacatgctacctccagagctactccattctacccccagagcacgcggccagcctgtgccgctgttatgaggagaagcaaagccccttgcagaagcacttgcgggtctgcagcctacgcagtaagtatgaggccagccagggtccgggctcattctagaaggtgcacgcagcacacaaagtgcatggagagtccagggagacgacttaaccacggtcacatggttactagcagccgtagagctgggacctggccctgggtctcctgactccccccaaggtttcttgtcactgaggtctgctgtgggtgatcagaactgattatcgggcacctgccctgttctgagcctgggtcagcaggatgggagcttcttagaggccacatagccttgaatggttgagagctgagccagggtgtcggctgaggtctacttggcttgcctgctttgatcctgagagccacccaccccatctcacagtgaataggttggcaggtgtgggctggcgggtggactacaccctgagctccagcctgctgcaatccgtggaagagcccatggtgcacctgcggctggaggtggcagctgccccagggaccccagcccagcctgttgccatgtccctctcagcagacaagttccaggtcctcctggcaggtgaggctcagctattcctcgacgggtgagaggctctcccagatccgcctgactgcctcccacctgcccacctcttccctctgcagaactgaagcaggcccagaccctgatgagctccctgggctgaggagaagggtgttccaggcctgtgtggagccgccctgcccgtatggagtcacgccctctgaactgctcttcgggaggcagccctggttctaggatgctgaggccctggcccggactctggcctcccagatccccagctgcctcacttctctcttgagaacttggctcagggctcctgaggacctttcccagcattaccttcccttcccttgaaaggcaattgttggctgttttcataagcaggaaaaataaacagaagtataaaggaa

SEQ ID NO: 441021 - DNA, 1690 bp, Homo sapiens
cccagaggcagttagtccaagtcacgtgatcgtcgactcagctgaccctgcgggaccggaaaaagaaattcccgggccctggcttcttggcgcgatgaggttccggttctgtggtgatctggactgtcccgactgggtcctggcagaaatcagcacgctggccaagatggttgagtgcacagggtctagtctgggtggaggaggggtgttgggggtggggattgtgggtgtagaggatggtgaggtttctctggggctagggcctcagtgctctcagcctgtgctaccatgctttgtgaccttgatcagtggctggcctgctctgagccagtccccaggaaggaggggtgaggtttgccagcctggctgatgtaaggacttcccttccagtcctctgtgaagttgcggctgctctgcagccagggtactaaaggagctgctgggacaggggattgatgtgagtacaagatccagcaccccattgtcccatgaccttatgaccaccactgccctgaaactctgcactaggcccagggagacgggtgagccagcctctcaacctctctgggcacctcccttccttctttccagcctgtctgttccttatcgcaggatccaggctgggggtgaggggctggtgagcaggggcctggcaccccctgaaggtctcctttccccatagtatgagaagatcctgaagctcacggctgacgccaagtttggtgagtatcccgctgagtctataggccccaggcaaccctgggaacttggcctggtgcctggtacagaggggccccccacccctcccagcagcatccttaacttaccttccctagtggaggagcatgagggaaagaaagaccgacagtcccaccttcctgtcctctgccagctcctggtggagcagtagcagtgcctgtggctccaggaggcctgggggctttgagctaaagttaatagggcaacagggaggtggctggacccacagtgacaccccctgccccacccacgggtccctcagagtcaggcgatgtgaaggccacagtggcagtgctgagtttcatcctctccagtgcggccaagcacagtgtcgatggcgaatccttgtccagtgaactgcagcagctggggctgcccaaaggtacgggttgtgggtgggcagctgggcagcctgtgggccaagggctgctagagaaggggacaggccctgtgaccctgaggtgtacctgccctgtctgggccaggagcccaagccaggccccgacatgctacctccagagctactccattctacccccagagcacgcggccagcctgtgccgctgttatgaggagaagcaaagccccttgcagaagcacttgcgggtctgcagcctacgcaaactgaagcaggcccagaccctgatgagctccctgggctgaggagaagggtgttccaggcctgtgtggagccgccctgcccgtatggagtcacgccctctgaactgctcttcgggaggcagccctggttctaggatgctgaggccctggcccggactctggcctcccagatccccagctgcctcacttctctcttgagaacttggctcagggctcctgaggacctttcccagcattaccttcccttcccttgaaaggcaattgttggctgttttcataagcaggaaaaataaacagaagtataaaggaa

SEQ ID NO: 441022 - DNA, 1054 bp, Homo sapiens
cccagaggcagttagtccaagtcacgtgatcgtcgactcagctgaccctgcgggaccggaaaaagaaattcccgggccctggcttcttggcgcgatgaggttccggttctgtggtgatctggactgtcccgactgggtcctggcagaaatcagcacgctggccaagatgtcctctgtgaagttgcggctgctctgcagccagggtactaaaggagctgctgggacaggggattgattatgagaagatcctgaagctcacggctgacgccaagtttgggccaagcacagtgtcgatggcgaatccttgtccagtgaactgcagcagctggggctgcccaaagagcacgcggccagcctgtgccgctgttatgaggagaagcaaagccccttgcagaagcacttgcgggtctgcagcctacgcatgaataggttggcaggtgtgggctggcgggtggactacaccctgagctccagcctgctgcaatccgtggaagagcccatggtgcacctgcggctggaggtggcagctgccccagggaccccagcccagcctgttgccatgtccctctcagcagacaagttccaggtcctcctggcagaactgaagcaggcccagaccctgatgagctccctgggctgaggagaagggtgttccaggcctgtgtggagccgccctgcccgtatggagtcacgccctctgaactgctcttcgggaggcagccctggttctaggatgctgaggccctggcccggactctggcctcccagatccccagctgcctcacttctctcttgagaacttggctcagggctcctgaggacctttcccagcattaccttcccttcccttgaaaggggatgtggtgtctcatagcggaaataccagagtttacgaaaaaaaaaagggggggtaaaattcctggggccagttacggtccagtttttgtcaagggctaaggaggattaagaagggggggttaaagtggcgggaagtctgattgggggaccttgggggaatggacagtagccggaaatagttgtgacctggggcagg

SEQ ID NO: 441023 - DNA, 363 bp, Homo sapiens
ggacatggccaccggctgggctggggtccctggggcagctgccacctccagccgcaggtgcaccatgggctcttccacggattgcagccggctggagctcagggtgttccaggcctgtgtggagccgccctgcccgtatggagtcacgccctctgaactgctcttcgggaggcagccctggttctaggatgctgaggccctggcccggactctggcctcccagatccccagctgcctcacttctctcttgagaacttggctcagggctcctgaggacctttcccagcattaccttcccttcccttgaaaggcaattgttggctgttttcataagcaggaaaaataaacagaagtataaaggaa

SEQ ID NO: 441024 - DNA, 1772 bp, Homo sapiens
gtgtatcccccgggctgcaggattcggcacgagcttcttggcgcgatgaggttccggttctgtggtgatctggactgtcccgactgggtcctggcagaaatcagcacgctggccaagatggttgagtgcacagggtctagtctgggtggaggaggggtgttgggggtggggattgtgggtgtagaggatggtgaggtttctctggggctagggcctcagtgctctcagcctgtgctaccatgctttgtgaccttgatcagtggctggcctgctctgagccagtccccaggaaggaggggtgaggtttgccagcctggctgatgtaaggacttcccttccagtcctctgtgaagttgcggctgctctgcagccagggtactaaaggagctgctgggacaggggattgatgtgagtacaagatccagcaccccattgtcccatgaccttatgaccaccactgccctgaaactctgcactaggcccagggagacgggtgagccagcctctcaacctctctgggcacctcccttccttctttccagcctgtctgttccttatcgcaggatccaggctgggggtgaggggctggtgagcaggggcctggcaccccctgaaggtctcctttccccatagtatgagaagatcctgaagctcacggctgacgccaagtttgtagagatgaggtttctccatgttggtcaggctggtctcgaactcctgacctcaggtgatccacccaccttgccctcccaaagtgctgggattacaggcgtaagccactgcgcccagccactgccatcatctttaggaagagagaagtgaccatgcctgaaccagtcattggcaagaggaacggtgttatggactgaatgttcatgttcctccagaattcatatgctgaagcctctgtccacacatgcacaccagatgagggccatgtgcgcacacgaggtggctgtctacaaggccagaaagagggctgtcaacaggaactgcgtctgctggcaccttgatcttgaacttcccagcctccagaactgtgagaaagaaatctctatggtgtaagccactagtctgtggcattgttatagcagctcgagaagactaaggcagatgggcttccaggactggcccagaccagccagggctccttgtagaaaaggctgatgccagggttggcacatggagggtacaaggaggactcgcctggagtatcttaaggaacctatcgaagaataatggcttgttccactggccaaagatgggacaatttgaacatcaaaagagatacttactgactccactcctgacttctgcttctgaaaaaatgaagtaggtgttttccctattcctcccactaagtacagttaacaaccctggatgttacatataaaacaaacaaaaagactccgagcgatggagagaaggcaccctagcctggctgggatcctcaggacctgaggctccacagagagaaattcctggaatctggaccccatggcccagtcaggttacacaaaactgatcatcacagatctgtagaactatacaaaagtgctaacattcatgattagggtctcagaaggtaaggaggaagagagtggaatggaaaaagtattcaaaaaaataatcactaaaggccaggtgcagtggcccatgcctgtaatcccagcactttgggaggtgggacaattgctttagaccttgcaactggcctgagcaacacagggagactcagtttctccaaaaaaataaaaaattagccgatcatg

SEQ ID NO: 441025 - DNA, 914 bp, Homo sapiens
  misc_feature (803)..(803): n is a, c, g, or t
cccagaggcagttagtccaagtcacgtgatcgtcgactcagctgaccctgcgggaccggaaaaagaaattcccgggccctggcttcttggcgcgatgaggttccggttctgtggtgatctggactgtcccgactgggtcctggcagaaatcagcacgctggccaagatgtcctctgtgaagttgcggctgctctgcagccagggtactaaaggagctgctgggacaggggattgattatgagaagatcctgaagctcacggctgacgccaagtttgagtcaggcgatgtgaaggccacagtggcagtgctgagtttcatcctctccagtgcggccaagcacagtgtcgatggcgaatccttgtccagtgaactgcagcagctggggctgcccaaagagcacgcggccagcctgtgccgctgttatgaggagaagcaaagccccttgcagaagcacttgcgggtctgcagcctacgcaaactgaagcaggcccagaccctgatgagctccctgggctgaggagaagggtgttccaggcctgtgtggagccgccctgcccgtatggagtcacgccctctgaactgctcttcgggaggcagccctggttctaggatgctgaggccctggcccggactctggcctcccagatccccagctgcctcacttctctcttgagaacttggctcagggctcctgaggacctttcccagcattaccttcccttcccttgaaaggcaattgttggctgttttcataagcaggaaaaataaacagaagtataaaggaacaaccaaacaaaaaaanccggggctttttctcggggggcaaaagggaggaagggcagggcaacggtcccacccctttctgccaaggggaagccgcggcccaaggggggaaattaaacggacgaaaacg

SEQ ID NO: 441026 - DNA, 705 bp, Homo sapiens
cccagaggcagttagtccaagtcacgtgatcgtcgactcagctgaccctgcgggaccggaaaaagaaattcccgggccctggcttcttggcgcgatgaggttccggttctgtggtgatctggactgtcccgactgggtcctggcagaaatcagcacgctggccaagatgtcctctgtgaagttgcggctgctctgcagccagggtactaaaggagctgctgggacaggggattgattatgagaagatcctgaagctcacggctgacgccaagtttgagtcaggcgatgtgaaggccacagtggcagtgctgagtttcatcctctccagtgcggccaagcacagtgtcgatggcgaatccttgtccagtgaactgcagcagctggggctgcccaaagaactgaagcaggcccagaccctgatgagctccctgggctgaggagaagggtgttccaggcctgtgtggagccgccctgcccgtatggagtcacgccctctgaactgctcttcgggaggcagccctggttctaggatgctgaggccctggcccggactctggcctcccagatccccagctgcctcacttctctcttgagaacttggctcagggctcctgaggacctttcccagcattaccttcccttcccttgaaaggcaattgttggctgttttcataagcaggaaaaataaacagaagtataaaggaa

SEQ ID NO: 441027 - DNA, 929 bp, Homo sapiens
cggacgcgtgggtcgacccacgcgtccgaagaaattcccgggccctggcttcttggcgcgatgaggttccggttctgtggtgatctggactgtcccgactgggtcctggcagaaatcagcacgctggccaagatgtcctctgtgaagttgcggctgctctgcagccagggtactaaaggagctgctgggacaggggattgattatgagaagatcctgaagctcacggctgacgccaagtttgagtcaggcgatgtgaaggccacagtggcagtgctgagtttcatcctctccagtgcggccaagcacagtgtcgatggcgaatccttgtccagtgaactgcagcagctggggctgcccaaagagcacgcggccagcctgtgccgctgttatgaggagaagcaaagccccttgcagaagcacttgcgggtctgcagcctacgcatgaataggttggcaggtgtgggctggcgggtggactacaccctgagctccagcctgctgcaatccgtggaagagcccatggtgcacctgcggctggaggtggcagctgccccagggaccccagcccagcctgttgccatgtccctctcagcagacaagttccaggtcctcctggcagaactgaagcaggcccagaccctgatgagctccctgggctgaggagaagggtgttccaggcctgtgtggagccgccctgcccgtatggagtcacgccctctgaactgctcttcgggaggcagccctggttctaggatgctgaggccctggcccggactctggcctcccagatccccagctgcctcacttctctcttgagaacttggctcagggctcctgaggacctttcccagcattaccttcccttcccttgaaaggcaattgttggctgttttcataagcaggaaaaataaacagaagtataaaggaa

SEQ ID NO: 441028 - DNA, 1408 bp, Homo sapiens
  misc_feature (957)..(957): n is a, c, g, or t
  misc_feature (967)..(967): n is a, c, g, or t
  misc_feature (973)..(973): n is a, c, g, or t
  misc_feature (975)..(975): n is a, c, g, or t
  misc_feature (978)..(978): n is a, c, g, or t
  misc_feature (983)..(983): n is a, c, g, or t
  misc_feature (1000)..(1000): n is a, c, g, or t
gtgtatcccccgggctgcaggattcggcacgagcttcttggcgcgatgaggttccggttctgtggtgatctggactgtcccgactgggtcctggcagaaatcagcacgctggccaagatgtcctctgtgaagttgcggctgctctgcagccagggtactaaaggagctgctgggacaggggattgattatgagaagatcctgaagctcacggctgacgccaagtttgagtcaggcgatgtgaaggccacagtggcagtgctgagtttcatcctctccagtgcggccaagcacagtgtcgatggcgaatccttgtccagtgaactgcagcagctggggctgcccaaagagcacgcggccagcctgtgccgctgttatgaggagaagcaaagccccttgcagaagcacttgcgggtctgcagcctacgcatgaataggttggcaggtgtgggctggcgggtggactacaccctgagctccagcctgctgcaatccgtggaagagcccatggtgcacctgcggctggaggtggcagctgccccagggaccccagcccagcctgttgccatgtccctctcagcagacaagttccaggtcctcctggcagaactgaagcaggcccagaccctgatgagctccctgggctgaggagaagggtgttccaggcctgtgtggagccgccctgcccgtatggagtcacgccctctgaactgctcttcgggaggcagccctggttctaggatgctgaggccctggcccggactctggcctcccagatccccagctgcctcacttctctcttgagaacttggctcagggctcctgaggacctttcccagcattaccttcccttcccttgaaaggcaattgttggctgttttcataagcaggaaaaataaacagaagtataaaggaaaaaaaaaaaaccacaaaaaacaaaaaaaaaaaaaaaaaaaaanaaaaaaaaanaaaaananaanaaaanaaaaaaaaaaaaaaaanaaaaaaaaagcgggcgcggcgcgcgcgccccccgccccccccccgggcgcgcgccccccccccggcacacccacgatttatttttgaaaaagagggcggcctcctactatgagggaggcagttaattatataatgacgaggagcgcggcgccgcgctcgcgttgctactcaacaccacacacgccggttgtgcggtgtgacatacagaaagtgctctcgacgtgcccgtcggactatctttctcttgtggacagagacacccaccatatcttgtgggtgggtgggcgtgcgaaacaactctaagtgtatggagcgaccacaacctccccacacgcgagcaaatagttatcggtcgtctttgggggaggggaaataaaaacaaacatcttgtatgatgatgcatctagc

SEQ ID NO: 441029 - DNA, 1135 bp, Homo sapiens
gtgtatcccccgggctgcaggattcggcacgagcttcttggcgcgatgaggttccggttctgtggtgatctggactgtcccgactgggtcctggcagaaatcagcacgctggccaagatggttgagtgcacagggtctagtctgggtggaggaggggtgttgggggtggggattgtgggtgtagaggatggtgaggtttctctggggctagggcctcagtgctctcagcctgtgctaccatgctttgtgaccttgatcagtggctggcctgctctgagccagtccccaggaaggaggggtgaggtttgccagcctggctgatgtaaggacttcccttccagtcctctgtgaagttgcggctgctctgcagccagggtactaaaggagctgctgggacaggggattgattatgagaagatcctgaagctcacggctgacgccaagtttgagtcaggcgatgtgaaggccacagtggcagtgctgagtttcatcctctccagtgcggccaagcacagtgtcgatggcgaatccttgtccagtgaactgcagcagctggggctgcccaaagagcacgcggccagcctgtgccgctgttatgaggagaagcaaagccccttgcagaagcacttgcgggtctgcagcctacgcatgaataggttggcaggtgtgggctggcgggtggactacaccctgagctccagcctgctgcaatccgtggaagagcccatggtgcacctgcggctggaggtggcagctgccccagggaccccagcccagcctgttgccatgtccctctcagcagacaagttccaggtcctcctggcagaactgaagcaggcccagaccctgatgagctccctgggctgaggagaagggtgttccaggcctgtgtggagccgccctgcccgtatggagtcacgccctctgaactgctcttcgggaggcagccctggttctaggatgctgaggccctggcccggactctggcctcccagatccccagctgcctcacttctctcttgagaacttggctcagggctcctgaggacctttcccagcattaccttcccttcccttgaaaggcaattgttggctgttttcataagcaggaaaaataaacagaagtataaaggaa

SEQ ID NO: 441030 - DNA, 929 bp, Homo sapiens
cccagaggcagttagtccaagtcacgtgatcgtcgactcagctgaccctgcgggaccggaaaaagaaattcccgggccctggcttcttggcgcgatgaggttccggttctgtggtgatctggactgtcccgactgggtcctggcagaaatcagcacgctggccaagatgtcctctgtgaagttgcggctgctctgcagccagtatgagaagatcctgaagctcacggctgacgccaagtttgagtcaggcgatgtgaaggccacagtggcagtgctgagtttcatcctctccagtgcggccaagcacagtgtcgatggcgaatccttgtccagtgaactgcagcagctggggctgcccaaagagcacgcggccagcctgtgccgctgttatgaggagaagcaaagccccttgcagaagcacttgcgggtctgcagcctacgcatgaataggttggcaggtgtgggctggcgggtggactacaccctgagctccagcctgctgcaatccgtggaagagcccatggtgcacctgcggctggaggtggcagctgccccagggaccccagcccagcctgttgccatgtccctctcagcagacaagttccaggtcctcctggcagaactgaagcaggcccagaccctgatgagctccctgggctgaggagaagggtgttccaggcctgtgtggagccgccctgcccgtatggagtcacgccctctgaactgctcttcgggaggcagccctggttctaggatgctgaggccctggcccggactctggcctcccagatccccagctgcctcacttctctcttgagaacttggctcagggctcctgaggacctttcccagcattaccttcccttcccttgaaaggcaattgttggctgttttcataagcaggaaaaataaacagaagtataaaggaa

SEQ ID NO: 441031 - DNA, 1867 bp, Homo sapiens
cccagaggcagttagtccaagtcacgtgatcgtcgactcagctgaccctgcgggaccggaaaaagaaattcccgggccctggcttcttggcgcgatgaggttccggttctgtggtgatctggactgtcccgactgggtcctggcagaaatcagcacgctggccaagatggttgagtgcacagggtctagtctgggtggaggaggggtgttgggggtggggattgtgggtgtagaggatggtgaggtttctctggggctagggcctcagtgctctcagcctgtgctaccatgctttgtgaccttgatcagtggctggcctgctctgagccagtccccaggaaggaggggtgaggtttgccagcctggctgatgtaaggacttcccttccagtcctctgtgaagttgcggctgctctgcagccagggtactaaaggagctgctgggacaggggattgatgtgagtacaagatccagcaccccattgtcccatgaccttatgaccaccactgccctgaaactctgcactaggcccagggagacgggtgagccagcctctcaacctctctgggcacctcccttccttctttccagcctgtctgttccttatcgcaggatccaggctgggggtgaggggctggtgagcaggggcctggcaccccctgaaggtctcctttccccatagtatgagaagatcctgaagctcacggctgacgccaagtttggtgagtatcccgctgagtctataggccccaggcaaccctgggaacttggcctggtgcctggtacagaggggccccccacccctcccagcagcatccttaacttaccttccctagtggaggagcatgagggaaagaaagaccgacagtcccaccttcctgtcctctgccagctcctggtggagcagtagcagtgcctgtggctccaggaggcctgggggctttgagctaaagttaatagggcaacagggaggtggctggacccacagtgacaccccctgccccacccacgggtccctcagagtcaggcgatgtgaaggccacagtggcagtgctgagtttcatcctctccagtgcggccaagcacagtgtcgatggcgaatccttgtccagtgaactgcagcagctggggctgcccaaaggtacgggttgtgggtgggcagctgggcagcctgtgggccaagggctgctagagaaggggacaggccctgtgaccctgaggtgtacctgccctgtctgggccaggagcccaagccaggccccgacatgctacctccagagctactccattctacccccagagcacgcggccagcctgtgccgctgttatgaggagaagcaaagccccttgcagaagcacttgcgggtctgcagcctacgcatgaataggttggcaggtgtgggctggcgggtggactacaccctgagctccagcctgctgcaatccgtggaagagcccatggtgcacctgcggctggaggtggcagctgccccagggaccccagcccagcctgttgccatgtccctctcagcagacaagttccaggtcctcctggcagaactgaagcaggcccagaccctgatgagctccctgggctgaggagaagggtgttccaggcctgtgtggagccgccctgcccgtatggagtcacgccctctgaactgctcttcgggaggcagccctggttctaggatgctgaggccctggcccggactctggcctcccagatccccagctgcctcacttctctcttgagaacttggctcagggctcctgaggacctttcccagcattaccttcccttcccttgaaaggcaattgttggctgttttcataagcaggaaaaataaacagaagtataaaggaa

SEQ ID NO: 441032 - DNA, 1519 bp, Homo sapiens
gtgtatcccccgggctgcaggattcggcacgagcttcttggcgcgatgaggttccggttctgtggtgatctggactgtcccgactgggtcctggcagaaatcagcacgctggccaagatggttgagtgcacagggtctagtctgggtggaggaggggtgttgggggtggggattgtgggtgtagaggatggtgaggtttctctggggctagggcctcagtgctctcagcctgtgctaccatgctttgtgaccttgatcagtggctggcctgctctgagccagtccccaggaaggaggggtgaggtttgccagcctggctgatgtaaggacttcccttccagtcctctgtgaagttgcggctgctctgcagccagggtactaaaggagctgctgggacaggggattgatgtgagtacaagatccagcaccccattgtcccatgaccttatgaccaccactgccctgaaactctgcactaggcccagggagacgggtgagccagcctctcaacctctctgggcacctcccttccttctttccagcctgtctgttccttatcgcaggatccaggctgggggtgaggggctggtgagcaggggcctggcaccccctgaaggtctcctttccccatagtatgagaagatcctgaagctcacggctgacgccaagtttgagtcaggcgatgtgaaggccacagtggcagtgctgagtttcatcctctccagtgcggccaagcacagtgtcgatggcgaatccttgtccagtgaactgcagcagctggggctgcccaaaggtacgggttgtgggtgggcagctgggcagcctgtgggccaagggctgctagagaaggggacaggccctgtgaccctgaggtgtacctgccctgtctgggccaggagcccaagccaggccccgacatgctacctccagagctactccattctacccccagagcacgcggccagcctgtgccgctgttatgaggagaagcaaagccccttgcagaagcacttgcgggtctgcagcctacgcatgaataggttggcaggtgtgggctggcgggtggactacaccctgagctccagcctgctgcaatccgtggaagagcccatggtgcacctgcggctggaggtggcagctgccccagggaccccagcccagcctgttgccatgtccctctcagcagacaagttccaggtcctcctggcagaactgaagcaggcccagaccctgatgagctccctgggctgaggagaagggtgttccaggcctgtgtggagccgccctgcccgtatggagtcacgccctctgaactgctcttcgggaggcagccctggttctaggatgctgaggccctggcccggactctggcctcccagatccccagctgcctcacttctctcttgagaacttggctcagggctcctgaggacctttcccagcattaccttcccttcccttgaaaggcaattgttggctgttttcataagcaggaaaaataaacagaagtataaaggaa

SEQ ID NO: 441033 - DNA, 2224 bp, Homo sapiens
cccagaggcagttagtccaagtcacgtgatcgtcgactcagctgaccctgcgggaccggaaaaagaaattcccgggccctggcttcttggcgcgatgaggttccggttctgtggtgatctggactgtcccgactgggtcctggcagaaatcagcacgctggccaagatggttgagtgcacagggtctagtctgggtggaggaggggtgttgggggtggggattgtgggtgtagaggatggtgaggtttctctggggctagggcctcagtgctctcagcctgtgctaccatgctttgtgaccttgatcagtggctggcctgctctgagccagtccccaggaaggaggggtgaggtttgccagcctggctgatgtaaggacttcccttccagtcctctgtgaagttgcggctgctctgcagccagggtactaaaggagctgctgggacaggggattgatgtgagtacaagatccagcaccccattgtcccatgaccttatgaccaccactgccctgaaactctgcactaggcccagggagacgggtgagccagcctctcaacctctctgggcacctcccttccttctttccagcctgtctgttccttatcgcaggatccaggctgggggtgaggggctggtgagcaggggcctggcaccccctgaaggtctcctttccccatagtatgagaagatcctgaagctcacggctgacgccaagtttggtgagtatcccgctgagtctataggccccaggcaaccctgggaacttggcctggtgcctggtacagaggggccccccacccctcccagcagcatccttaacttaccttccctagtggaggagcatgagggaaagaaagaccgacagtcccaccttcctgtcctctgccagctcctggtggagcagtagcagtgcctgtggctccaggaggcctgggggctttgagctaaagttaatagggcaacagggaggtggctggacccacagtgacaccccctgccccacccacgggtccctcagagtcaggcgatgtgaaggccacagtggcagtgctgagtttcatcctctccagtgcggccaagcacagtgtcgatggcgaatccttgtccagtgaactgcagcagctggggctgcccaaaggtacgggttgtgggtgggcagctgggcagcctgtgggccaagggctgctagagaaggggacaggccctgtgaccctgaggtgtacctgccctgtctgggccaggagcccaagccaggccccgacatgctacctccagagctactccattctacccccagagcacgcggccagcctgtgccgctgttatgaggagaagcaaagccccttgcagaagcacttgcgggtctgcagcctacgcagtaagtatgaggccagccagggtccgggctcattctagaaggtgcacgcagcacacaaagtgcatggagagtccagggagacgacttaaccacggtcacatggttactagcagccgtagagctgggacctggccctgggtctcctgactccccccaaggtttcttgtcactgaggtctgctgtgggtgatcagaactgattatcgggcacctgccctgttctgagcctgggtcagcaggatgggagcttcttagaggccacatagccttgaatggttgagagctgagccagggtgtcggctgaggtctacttggcttgcctgctttgatcctgagagccacccaccccatctcacagtgaataggttggcaggtgtgggctggcgggtggactacaccctgagctccagcctgctgcaatccgtggaagagcccatggtgcacctgcggctggaggtggcagctgccccagggaccccagcccagcctgttgccatgtccctctcagcagacaagttccaggtcctcctggcagaactgaagcaggcccagaccctgatgagctccctgggctgaggagaagggtgttccaggcctgtgtggagccgccctgcccgtatggagtcacgccctctgaactgctcttcgggaggcagccctggttctaggatgctgaggccctggcccggactctggcctcccagatccccagctgcctcacttctctcttgagaacttggctcagggctcctgaggacctttcccagcattaccttcccttcccttgaaaggcaattgttggctgttttcataagcaggaaaaataaacagaagtataaaggaa

SEQ ID NO: 441034 - DNA, 2547 bp, Homo sapiens
cccagaggcagttagtccaagtcacgtgatcgtcgactcagctgaccctgcgggaccggaaaaagaaattcccgggccctggcttcttggcgcgatgaggttccggttctgtggtgatctggactgtcccgactgggtcctggcagaaatcagcacgctggccaagatggttgagtgcacagggtctagtctgggtggaggaggggtgttgggggtggggattgtgggtgtagaggatggtgaggtttctctggggctagggcctcagtgctctcagcctgtgctaccatgctttgtgaccttgatcagtggctggcctgctctgagccagtccccaggaaggaggggtgaggtttgccagcctggctgatgtaaggacttcccttccagtcctctgtgaagttgcggctgctctgcagccagggtactaaaggagctgctgggacaggggattgatgtgagtacaagatccagcaccccattgtcccatgaccttatgaccaccactgccctgaaactctgcactaggcccagggagacgggtgagccagcctctcaacctctctgggcacctcccttccttctttccagcctgtctgttccttatcgcaggatccaggctgggggtgaggggctggtgagcaggggcctggcaccccctgaaggtctcctttccccatagtatgagaagatcctgaagctcacggctgacgccaagtttggtgagtatcccgctgagtctataggccccaggcaaccctgggaacttggcctggtgcctggtacagaggggccccccacccctcccagcagcatccttaacttaccttccctagtggaggagcatgagggaaagaaagaccgacagtcccaccttcctgtcctctgccagctcctggtggagcagtagcagtgcctgtggctccaggaggcctgggggctttgagctaaagttaatagggcaacagggaggtggctggacccacagtgacaccccctgccccacccacgggtccctcagagtcaggcgatgtgaaggccacagtggcagtgctgagtttcatcctctccagtgcggccaagcacagtgtcgatggcgaatccttgtccagtgaactgcagcagctggggctgcccaaaggtacgggttgtgggtgggcagctgggcagcctgtgggccaagggctgctagagaaggggacaggccctgtgaccctgaggtgtacctgccctgtctgggccaggagcccaagccaggccccgacatgctacctccagagctactccattctacccccagagcacgcggccagcctgtgccgctgttatgaggagaagcaaagccccttgcagaagcacttgcgggtctgcagcctacgcagtaagtatgaggccagccagggtccgggctcattctagaaggtgcacgcagcacacaaagtgcatggagagtccagggagacgacttaaccacggtcacatggttactagcagccgtagagctgggacctggccctgggtctcctgactccccccaaggtttcttgtcactgaggtctgctgtgggtgatcagaactgattatcgggcacctgccctgttctgagcctgggtcagcaggatgggagcttcttagaggccacatagccttgaatggttgagagctgagccagggtgtcggctgaggtctacttggcttgcctgctttgatcctgagagccacccaccccatctcacagtgaataggttggcaggtgtgggctggcgggtggactacaccctgagctccagcctgctgcaatccgtggaagagcccatggtgcacctgcggctggaggtggcagctgccccagggaccccagcccagcctgttgccatgtccctctcagcagacaagttccaggtcctcctggcaggtgaggctcagctattcctcgacgggtgagaggctctcccagatccgcctgactgcctcccacctgcccacctcttccctctgcagaactgaagcaggcccagaccctgatgagctccctgggctgaggagaagggtgttccaggcctgtgtggagccgccctgcccgtatggagtcacgccctctgaactgctcttcgggaggcagccctggttctaggatgctgaggccctggcccggactctggcctcccagatccccagctgcctcacttctctcttgagaacttggctcagggctcctgaggacctttcccagcattaccttcccttcccttgaaaggcaattgttggctgttttcataagcaggaaaaataaacagaagtataaaggaagaatgtgtgcagggggttctgtttgggttcagatcaagggtttttgtgagagaaacacaagtgacatacaggccttcttggtccatcactcattttcttttctcaattgctgattgagggaggtcataggtaaggccaactgaggaccaaaatgcatctgcttgtctggtgagaagaaaatcagggttctagctcccagatctgggatgctcttggctctgctgtctttgccccctg

SEQ ID NO: 441035 - DNA, 1280 bp, Homo sapiens
  misc_feature (829)..(829): n is a, c, g, or t
  misc_feature (839)..(839): n is a, c, g, or t
  misc_feature (845)..(845): n is a, c, g, or t
  misc_feature (847)..(847): n is a, c, g, or t
  misc_feature (850)..(850): n is a, c, g, or t
  misc_feature (855)..(855): n is a, c, g, or t
  misc_feature (872)..(872): n is a, c, g, or t
cccagaggcagttagtccaagtcacgtgatcgtcgactcagctgaccctgcgggaccggaaaaagaaattcccgggccctggcttcttggcgcgatgaggttccggttctgtggtgatctggactgtcccgactgggtcctggcagaaatcagcacgctggccaagatgtcctctgtgaagttgcggctgctctgcagccagggtactaaaggagctgctgggacaggggattgattatgagaagatcctgaagctcacggctgacgccaagtttgagtcaggcgatgtgaaggccacagtggcagtgctgagtttcatcctctccagtgcggccaagcacagtgtcgatggcgaatccttgtccagtgaactgcagcagctggggctgcccaaagagcacgcggccagcctgtgccgctgttatgaggagaagcaaagccccttgcagaagcacttgcgggtctgcagcctacgcaaactgaagcaggcccagaccctgatgagctccctgggctgaggagaagggtgttccaggcctgtgtggagccgccctgcccgtatggagtcacgccctctgaactgctcttcgggaggcagccctggttctaggatgctgaggccctggcccggactctggcctcccagatccccagctgcctcacttctctcttgagaacttggctcagggctcctgaggacctttcccagcattaccttcccttcccttgaaaggcaattgttggctgttttcataagcaggaaaaataaacagaagtataaaggaaaaaaaaaaaaccacaaaaaacaaaaaaaaaaaaaaaaaaaaanaaaaaaaaanaaaaananaanaaaanaaaaaaaaaaaaaaaanaaaaaaaaagcgggcgcggcgcgcgcgccccccgccccccccccgggcgcgcgccccccccccggcacacccacgatttatttttgaaaaagagggcggcctcctactatgagggaggcagttaattatataatgacgaggagcgcggcgccgcgctcgcgttgctactcaacaccacacacgccggttgtgcggtgtgacatacagaaagtgctctcgacgtgcccgtcggactatctttctcttgtggacagagacacccaccatatcttgtgggtgggtgggcgtgcgaaacaactctaagtgtatggagcgaccacaacctccccacacgcgagcaaatagttatcggtcgtctttgggggaggggaaataaaaacaaacatcttgtatgatgatgcatctagc

SEQ ID NO: 441036 - DNA, 1229 bp, Homo sapiens
cccagaggcagttagtccaagtcacgtgatcgtcgactcagctgaccctgcgggaccggaaaaagaaattcccgggccctggcttcttggcgcgatgaggttccggttctgtggtgatctggactgtcccgactgggtcctggcagaaatcagcacgctggccaagatggttgagtgcacagggtctagtctgggtggaggaggggtgttgggggtggggattgtgggtgtagaggatggtgaggtttctctggggctagggcctcagtgctctcagcctgtgctaccatgctttgtgaccttgatcagtggctggcctgctctgagccagtccccaggaaggaggggtgaggtttgccagcctggctgatgtaaggacttcccttccagtcctctgtgaagttgcggctgctctgcagccagggtactaaaggagctgctgggacaggggattgatgtgagtacaagatccagcaccccattgtcccatgaccttatgaccaccactgccctgaaactctgcactaggcccagggagacgggtgagccagcctctcaacctctctgggcacctcccttccttctttccagcctgtctgttccttatcgcaggatccaggctgggggtgaggggctggtgagcaggggcctggcaccccctgaaggtctcctttccccatagtatgagaagatcctgaagctcacggctgacgccaagtttggtgagtatcccgctgagtctataggccccaggcaaccctgggaacttggcctggtgcctggtacagaggggccccccacccctcccagcagcatccttaacttaccttccctagtggaggagcatgagggaaagaaagaccgacagtcccaccttcctgtcctctgccagctcctggtggagcagtagcagtgcctgtggctccaggaggcctgggggctttgagctaaagttaatagggcaacagggaggtggctggacccacagtgacaccccctgccccacccacgggtccctcagagtcaggcgatgtgaaggccacagtggcagtgctgagtttcatcctctccagtgctctggcctcccagatccccagctgcctcacttctctcttgagaacttggctcagggctcctgaggacctttcccagcattaccttcccttcccttgaaaggcaattgttggctgttttcataagcaggaaaaataaacagaagtataaaggaa

SEQ ID NO: 441037 - DNA, 437 bp, Homo sapiens
gggaatgagggggcgccaagtggctccggaaactgggggaggttgtactggcctctccgcaaacacagtgtgtgcgggcgtgagggctgtgagtctggtagggaaaagtccaccactctcccgctcccgagacgggggcgggggtacggggcgggtaagacagagcaggccggccggcttagagtcccggtgcttccctggcggaaggaagggcccctgcctcccggggcaggaactagggcttgtctggagctgggagtcctttcaggtcttccccatccccaagaggacctcccaaggatacccccttccccagccctgccgtggggcttgtacaagaaggtgcttagaatcaggctcactcttccacactgttaggaagcccctccgctctttccagagccagaaagtagtagttttggggttgagacttatcc

SEQ ID NO: 441038 - DNA, 259 bp, Homo sapiens
cgctagagaaaaaagcttaaaggcagctagaggaaatggcacatcaggtacaaagggaatctcgtcatcaggctaatagcagactcctcaggagaaaccctacaagccagaaaagactgggggcctattttcatcattcttgaagaggaaactcaaaccaagaatttcaaacctgaccaaactaagcttcataagagtagaataaacatttctagagacaagcaatcactaagggatttcattaccagtagaccagcct

SEQ ID NO: 441039 - DNA, 3988 bp, Homo sapiens
  misc_feature (2260)..(2260): n is a, c, g, or t
gaattccggccagaagaaatctggcctcggaacacgccattctccgcgccgcttccaataaccactaacatccctaacgagcatccgagccgagggctctgctcggaaatcgtcctggcccaactcggcccttcgagctctcgaagattaccgcatctattttttttttcttttttttcttttcctagcgcagataaagtgagcccggaaagggaaggagggggcggggacaccattgccctgaaagaataaataagtaaataaacaaactggctcctcgccgcagctggacgcggtcggttgagtccaggttgggtcggacctgaacccctaaaagcggaaccgcctcccgccctcgccatcccggagctgagtcgccggcggcggtggctgctgccagacccggagtttcctctttcactggatggagctgaactttgggcggccagagcagcacagctgtccggggatcgctgcatgctgagctccctcggcaagacccagcggcggctcgggatttttttgggggggcggggaccagccccgcgccggcaccatgttcctggcgaccctgtacttcgcgctgccgctcttggacttgctcctgtcggccgaagtgagcggcggagaccgcctggattgcgtgaaagccagtgatcagtgcctgaaggagcagagctgcagcaccaagtaccgcacgctaaggcagtgcgtggcgggcaaggagaccaacttcagcctggcatccggcctggaggccaaggatgagtgccgcagcgccatggaggccctgaagcagaagtcgctctacaactgccgctgcaagcggggtatgaagaaggagaagaactgcctgcgcatttactggagcatgtaccagagcctgcagggaaatgatctgctggaggattccccatatgaaccagttaacagcagattgtcagatatattccgggtggtcccattcatatcagatttgcagtggagcacattcccaaagggaacaactgcctggatgcagcgaaggcctgcaacctcgacgacatttgcaagaagtacaggtcggcgtacatcaccccgtgcaccaccagcgtgtccaacgatgtctgcaaccgccgcaagtgccacaaggccctccggcagttctttgacaaggtcccggccaagcacagctacggaatgctcttctgctcctgccgggacatcgcctgcacagagcggaggcgacagaccatcgtgcctgtgtgctcctatgaagagagggagaagcccaactgtttgaatttgcaggactcctgcaagacgaattacatctgcagatctcgccttgcggatttttttaccaactgccagccagagtcaaggtctgtcagcagctgtctaaaggaaaactacgctgactgcctcctcgcctactcggggcttattggcacagtcatgacccccaactacatagactccagtagcctcagtgtggccccatggtgtgactgcagcaacagtgggaacgacctagaagagtgcttgaaatttttgaatttcttcaaggacaatacatgtcttaaaaatgcaattcaagcctttggcaatggctccgatgtgaccgtgtggcagccagccttcccagtacagaccaccactgccactaccaccactgccctccgggttaagaacaagcccctggggccagcagggtctgagaatgaaattcccactcatgttttgccaccgtgtgcaaatttacaggcacagaagctgaaatccaatgtgtcgggcaatacacacctctgtatttccaatggtaattatgaaaaagaaggtctcggtgcttccagccacataaccacaaaatcaatggctgctcctccaagctgtggtctgagcccactgctggtcctggtggtaaccgctctgtccaccctattatctttaacagaaacatcatagctgcattaaaaaaatacaatatggacatgtaaaaagacaaaaaccaagttatctgtttcctgttctcttgtatagctgaaattccagtttaggagctcagttgagaaacagttccattcaactggaacattttttttttttccttttaagaaagcttcttgtgatccttcggggcttctgtgaaaaacctgatgcagtgctccatccaaactcagaaggctttgggatatgctgtattttaaagggacagtttgtaacttgggctgtaaagcaaactggggctgtgttttcgatgatgatgatcatcatgatnatgatgattttaacagttttacttctggcctttcctagctagagaaggagttaatatttctaaggtaactcccatatctcctttaatgacattgatttctaatgatataaatttcagcctacattgatgccaagcttttttgccacaaagaagattcttaccaagagtgggctttgtggaaacagctggtactgatgttcacctttatatatgtactagcattttccacgctgatgtttatgtactgtaaacagttctgcactcttgtacaaaagaaaaaacacctgtcacatccaaatatagtatctgtcttttcgtcaaaatagagagtggggaatgagtgtgccgattcaatacctcaatccctgaacgacactctcctaatcctaagccttacctgagtgagaagccctttacctaacaaaagtccaatatagctgaaatgtcgctctaatactctttacacatatgaggttatatgtagaaaaaaattttactactaaatgatttcaactattggctttctatattttgaaagtaatgatattgtctcatttttttactgatggtttaatacaaaatacacagagcttgtttcccctcataagtagtgttcgctctgatatgaacttcacaaatacagctcatcaaaagcagactctgagaagcctcgtgctgtagcagaaagttctgcatcatgtgactgtggacaggcaggaggaaacagaacagacaagcattgtctttgtcattgctcgaagtgcaagcgtgcatacctgtggagggaactggtggctgcttgtaaatgttctgcagcatctcttgacacacttgtcatgacacaatccagtaccttggttttcaggttatctgacaaaggcagctttgattgggacatggaggcatgggcaggttctcctttcttgggaaacacatccatgctgggatgcacagttcttttcctaaggattgtgtttactcctgactgcaacgtcttggccactgtttggaacagtttggtctgaaggtcattaaggatctgcttgcatcttgtttcatgtcctccgtgacagactgcagaccatgttagaatagaaggaaggtttgtggatcaagagggttgacattaggtttggtgagatgagttgcttggcacagatcagcagaacaggaccctggtgataaggcatctggctttgctaaccacttatcatcttccattattctctttcttaactaagtagacccgaaagtgcacttttgaagtctggtttagatggcgagattccgaatctacaatgatcgagtactggtggccacttttctccaacattaagtaaagaggaggagattccaccttcagaaagtgctgggaagcattggctttcttcccacattggtagaagagatggaggaggaaaccagggtgcacatttctacagatcccctttgcctgctggtgtttgccttgtaagataagtcactggggggaaggggaaatctatgaaatccaagataaaggcatagtctttcagctctattggtgttaaaagtatatttgtgtccaaatgttaatcaacacaaatgtacagtactcagtactgacttttttcacttcaaaatgttttcaagggaaattcagcagacacccaactgtatttaattagtgaaaagatctataaagactcttactttgaataaacacattaagtaagtgtgtcaaaaaaa

SEQ ID NO: 441040 - DNA, 1992 bp, Homo sapiens
gaattccggccagaagaaatctggcctcggaacacgccattctccgcgccgcttccaataaccactaacatccctaacgagcatccgagccgagggctctgctcggaaatcgtcctggcccaactcggcccttcgagctctcgaagattaccgcatctattttttttttcttttttttcttttcctagcgcagataaagtgagcccggaaagggaaggagggggcggggacaccattgccctgaaagaataaataagtaaataaacaaactggctcctcgccgcagctggacgcggtcggttgagtccaggttgggtcggacctgaacccctaaaagcggaaccgcctcccgccctcgccatcccggagctgagtcgccggcggcggtggctgctgccagacccggagtttcctctttcactggatggagctgaactttgggcggccagagcagcacagctgtccggggatcgctgcatgctgagctccctcggcaagacccagcggcggctcgggatttttttgggggggcggggaccagccccgcgccggcaccatgttcctggcgaccctgtacttcgcgctgccgctcttggacttgctcctgtcggccgaagtgagcggcggagaccgcctggattgcgtgaaagccagtgatcagtgcctgaaggagcagagctgcagcaccaagtaccgcacgctaaggcagtgcgtggcgggcaaggagaccaacttcagcctggcatccggcctggaggccaaggatgagtgccgcagcgccatggaggccctgaagcagaagtcgctctacaactgccgctgcaagcggggtatgaagaaggagaagaactgcctgcgcatttactggagcatgtaccagagcctgcagggaaatgatctgctggaggattccccatatgaaccagttaacagcagattgtcagatatattccgggtggtcccattcatatcagatttgcagtggagcacattcccaaagggaacaactgcctggatgcagcgaaggcctgcaacctcgacgacatttgcaagaagtacaggtcggcgtacatcaccccgtgcaccaccagcgtgtccaacgatgtctgcaaccgccgcaagtgccacaaggccctccggcagttctttgacaaggtcccggccaagcacagctacggaatgctcttctgctcctgccgggacatcgcctgcacagagcggaggcgacagaccatcgtgcctgtgtgctcctatgaagagagggagaagcccaactgtttgaatttgcaggactcctgcaagacgaattacatctgcagatctcgccttgcggatttttttaccaactgccagccagagtcaaggtctgtcagcagctgtctaaaggaaaactacgctgactgcctcctcgcctactcggggcttattggcacagtcatgacccccaactacatagactccagtagcctcagtgtggccccatggtgtgactgcagcaacagtgggaacgacctagaagagtgcttgaaatttttgaatttcttcaaggacaatacatgtcttaaaaatgcaattcaagcctttggcaatggctccgatgtgaccgtgtggcagccagccttcccagtacagaccaccactgccactaccaccactgccctccgggttaagaacaagcccctggggccagcagggtctgagaatgaaattcccactcatgttttgccaccgtgtgcaaatttacaggcacagaagctgaaatccaatgtgtcgggcaatacacacctctgtatttccaatggtaattatgaaaaagaaggtctcggtgcttccagccacataaccacaaaatcaatggctgctcctccaagctgtggtctgagcccactgctggtcctggtggtaaccgctctgtccaccctattatctttaacagaaacatcatagctgcattaaaaaaatacaatatggacatgtaaaaagacaaaaacc

SEQ ID NO: 441041 - DNA, 4027 bp, Homo sapiens
  misc_feature (2267)..(2267): n is a, c, g, or t
  misc_feature (2270)..(2270): n is a, c, g, or t
  misc_feature (2299)..(2299): n is a, c, g, or t
gaattccggccagaagaaatctggcctcggaacacgccattctccgcgccgcttccaataaccactaacatccctaacgagcatccgagccgagggctctgctcggaaatcgtcctggcccaactcggcccttcgagctctcgaagattaccgcatctattttttttttcttttttttcttttcctagcgcagataaagtgagcccggaaagggaaggagggggcggggacaccattgccctgaaagaataaataagtaaataaacaaactggctcctcgccgcagctggacgcggtcggttgagtccaggttgggtcggacctgaacccctaaaagcggaaccgcctcccgccctcgccatcccggagctgagtcgccggcggcggtggctgctgccagacccggagtttcctctttcactggatggagctgaactttgggcggccagagcagcacagctgtccggggatcgctgcatgctgagctccctcggcaagacccagcggcggctcgggatttttttgggggggcggggaccagccccgcgccggcaccatgttcctggcgaccctgtacttcgcgctgccgctcttggacttgctcctgtcggccgaagtgagcggcggagaccgcctggattgcgtgaaagccagtgatcagtgcctgaaggagcagagctgcagcaccaagtaccgcacgctaaggcagtgcgtggcgggcaaggagaccaacttcagcctggcatccggcctggaggccaaggatgagtgccgcagcgccatggaggccctgaagcagaagtcgctctacaactgccgctgcaagcggggtatgaagaaggagaagaactgcctgcgcatttactggagcatgtaccagagcctgcagggaaatgatctgctggaggattccccatatgaaccagttaacagcagattgtcagatatattccgggtggtcccattcatatcagatttgcagtggagcacattcccaaagggaacaactgcctggatgcagcgaaggcctgcaacctcgacgacatttgcaagaagtacaggtcggcgtacatcaccccgtgcaccaccagcgtgtccaacgatgtctgcaaccgccgcaagtgccacaaggccctccggcagttctttgacaaggtcccggccaagcacagctacggaatgctcttctgctcctgccgggacatcgcctgcacagagcggaggcgacagaccatcgtgcctgtgtgctcctatgaagagagggagaagcccaactgtttgaatttgcaggactcctgcaagacgaattacatctgcagatctcgccttgcggatttttttaccaactgccagccagagtcaaggtctgtcagcagctgtctaaaggaaaactacgctgactgcctcctcgcctactcggggcttattggcacagtcatgacccccaactacatagactccagtagcctcagtgtggccccatggtgtgactgcagcaacagtgggaacgacctagaagagtgcttgaaatttttgaatttcttcaaggacaatacatgtcttaaaaatgcaattcaagcctttggcaatggctccgatgtgaccgtgtggcagccagccttcccagtacagaccaccactgccactaccaccactgccctccgggttaagaacaagcccctggggccagcagggtctgagaatgaaattcccactcatgttttgccaccgtgtgcaaatttacaggcacagaagctgaaatccaatgtgtcgggcaatacacacctctgtatttccaatggtaattatgaaaaagaaggtctcggtgcttccagccacataaccacaaaatcaatggctgctcctccaagctgtggtctgagcccactgctggtcctggtggtaaccgctctgtccaccctattatctttaacagaaacatcatagctgcattaaaaaaatacaatatggacatgtaaaaagacaaaaaccaagttatctgtttcctgttctcttgtatagctgaaattccagtttaggagctcagttgagaaacagttccattcaactggaacattttttttttttccttttaagaaagcttcttgtgatccttcggggcttctgtgaaaaacctgatgcagtgctccatccaaactcagaaggctttgggatatgctgtattttaaagggacagtttgtaacttgggctgtaaagcaaactggggctgtgttttcgatgatgatgatcatcatgatgatgatcntcntgatcatgatgatgatcatcatgatcatnatgatgattttaacagttttacttctggcctttcctagctagagaaggagttaatatttctaaggtaactcccatatctcctttaatgacattgatttctaatgatataaatttcagcctacattgatgccaagcttttttgccacaaagaagattcttaccaagagtgggctttgtggaaacagctggtactgatgttcacctttatatatgtactagcattttccacgctgatgtttatgtactgtaaacagttctgcactcttgtacaaaagaaaaaacacctgtcacatccaaatatagtatctgtcttttcgtcaaaatagagagtggggaatgagtgtgccgattcaatacctcaatccctgaacgacactctcctaatcctaagccttacctgagtgagaagccctttacctaacaaaagtccaatatagctgaaatgtcgctctaatactctttacacatatgaggttatatgtagaaaaaaattttactactaaatgatttcaactattggctttctatattttgaaagtaatgatattgtctcatttttttactgatggtttaatacaaaatacacagagcttgtttcccctcataagtagtgttcgctctgatatgaacttcacaaatacagctcatcaaaagcagactctgagaagcctcgtgctgtagcagaaagttctgcatcatgtgactgtggacaggcaggaggaaacagaacagacaagcattgtctttgtcattgctcgaagtgcaagcgtgcatacctgtggagggaactggtggctgcttgtaaatgttctgcagcatctcttgacacacttgtcatgacacaatccagtaccttggttttcaggttatctgacaaaggcagctttgattgggacatggaggcatgggcaggttctcctttcttgggaaacacatccatgctgggatgcacagttcttttcctaaggattgtgtttactcctgactgcaacgtcttggccactgtttggaacagtttggtctgaaggtcattaaggatctgcttgcatcttgtttcatgtcctccgtgacagactgcagaccatgttagaatagaaggaaggtttgtggatcaagagggttgacattaggtttggtgagatgagttgcttggcacagatcagcagaacaggaccctggtgataaggcatctggctttgctaaccacttatcatcttccattattctctttcttaactaagtagacccgaaagtgcacttttgaagtctggtttagatggcgagattccgaatctacaatgatcgagtactggtggccacttttctccaacattaagtaaagaggaggagattccaccttcagaaagtgctgggaagcattggctttcttcccacattggtagaagagatggaggaggaaaccagggtgcacatttctacagatcccctttgcctgctggtgtttgccttgtaagataagtcactggggggaaggggaaatctatgaaatccaagataaaggcatagtctttcagctctattggtgttaaaagtatatttgtgtccaaatgttaatcaacacaaatgtacagtactcagtactgacttttttcacttcaaaatgttttcaagggaaattcagcagacacccaactgtatttaattagtgaaaagatctataaagactcttactttgaataaacacattaagtaagtgtgtcaaaaaaa

SEQ ID NO: 441042 - DNA, 2082 bp, Homo sapiens
  misc_feature (1164)..(1164): n is a, c, g, or t
  misc_feature (1171)..(1171): n is a, c, g, or t
agaagcacatatgtttttgtattttgataaaattttagcatacagtctatcctcattatttgtggattctgtatttatgaattcacctacttactaaaatttgtctgtagccctcaaattaatacttacaatgcttttgtggtctttggaagacatgacattttttcacgtgaaaaattttagttgcctgatgcacatgttctcaactgaagtcaaacaaggtgacactgccttcttgtcaactctcatattgtaagcaaatgtcatttttgcagtctttggtgctacatttttctcatctttgtgctttttgtcggtgattccactgtttgagatagcccccaagcatagtgctgaggtgcttctaaatgcaagaagattgtgatttgtcttatggagaaaatatgtgtgttagataagctttgtttaggcatgagttcagtattaatgaattactaatgtatattcagtaagtgcctttaaacataaacacacataaaacatgattatgtattgattggttgacaagaatgtgcccagaggctttcaggaacctgtttccccaaggaacagtggttctgtgttggataatttagtgtctgtagcgacttcatagaacataattgttgtgaataatgagaacctactgtaattggtttcatttctaaacctgtgtattttctgtaaagacatcctgagcctgagtctggtggctcatacctgtaatcccagcactttgggaggccaagacaggaggattgcttgagcccaggagttcaagaccagcctaggcaacatagggagaccccatctctacaaaaaattaaaatatccagacatgttggcacgcacctgtagtcccagccactcgggctgaggtgggagcaagacttggcctgggaggttgaagctgcattgagccatgattgtgccactgcactccagtctgggtgatggagcaagaccctatctcgaaaaaaaaaagtccgccaaagggggtctttggcacacacaaagaaataagaaccattagcccttaatgtagcctgagaaattagatctatcctttttttttattttttatttttattttttaagatggagtctcgctctgtcacccaggctggagttcagtggcacaatctcagctcactgcaacctccnctgcctnggttcaagtgattctcctgcctcagcctcctgagtagctgggattacaggtgtgcgccactacacccagctaatttttgtatttttattagagacgtggtttcaccatgtcagccaggatgttctcaatctcttgacacgtgtctccctccagcttctgcccttatttacctgcctgttggctcttaaaggcatttttggttgagacttttgcatgtaaaataagaactttgccatctttggattcccccatgtttgtttgtttgtttttaataaataatatttaatattaaaaggagctgtggtttttttctctctaaagagcaggaaaggacagagactggtcgctctctgcagtcacacttgaggtgaagaaaccatgggatagaattagctgttagttgagtccctaggttcagaggaagaaagaagaccataccacctggtagggagtgcgaaggaggttccagggactgatccatagaagggtgtcagaacaacttcataataaagagttgccttattttcttggtcaaggggaacttcctgtgtgccttctatcctgatgacaccccctcactgaaatcctggtgttgtttccacagagctgtctggccttttgtccttgatccttggttaaggaaatgaccaaccagtaagacctgtgttgaagggaaaaacatcaattggtctctttgccaagttcaagtccagtaggttttctggatgtgtagtcaagaaactagcatctcattcttgcccggctcctaaagagctgggtgaccctgggtacctagtcaccacagtgttaggtgggactagtgaaatgcaaatactgagaggaggattggttcatccaagtctttaccacaatttagtgagtaatagaagaagcttaaaagatgttgtaca

SEQ ID NO: 441043 - DNA, 500 bp, Homo sapiens
ctactactactactactaaattcgcggccgcgtcgaccttctgcataccctggaaggccatgccatgcccattcgctccttgaccttttccccggactcccagctccttgtcactgcttcagatgatggctacatcaagatctatgatgtgtgtcgcttcttgctgctctcaagccctactccccatgcttctgcttctagcttgctgggagctgggaaactgaccaagcatggaaaactacagcaatgctcataacaggctaaaaggctctggggaagaaggcatttcaacagcagaaaagaggaagaagagggagaagagaaaatggagaaacaagaaataagccaacacaaaagaggggtgaagaaaagagagggtgcaaaagagaacaaagtaaaaacaaaaacaaaacaaaaaggacaaacaaatccccaaagaactctccaacggcaggtttcctggatgctccacccttccttataataaagaaggaaatgga

SEQ ID NO: 441044 - DNA, 886 bp, Homo sapiens
aagtaatccttttaaacagtaaaactcttagttttttcattataaattgaggcttctaccaaagtgactctaaggtagacttgtgttccaatggtaacttaaaatatgtaaatgtttgtaaaatgttgtttatagatcccagtgttggtcaggcctgggatggccaagacagttggaaagcaggagatggacaacttgaaggcattgcacagtgctttagaggcctcctgcgagccttggttttgaagctttaacaggcctccctcccatctggaaataggtagctgtgtctgagactcctggagaacaattaatatgagggccaggcagatcacaatttcaggaaaatggctaccctgtgaggagagaaagccacccaatgatgctgatacctggccatttcctgtaccgaggcatggggttggggggtctgaagttagaagaatgtaagtcatcaaaggatttttggtcgaagtccttccaacttcaaaccgatactaatgttcactttttaaaatagttcgtctgacaaaagtgtaaaagtttgggatgttggaacgaggacttgtgttcacaccttctttgatcaccaggatcaggtctggggagtaaaatacaatggaaatggttcaaaaattgtgtctgttggagatgaccaggaaattcacatctatgattgtccaatttaaacatcaaagtctccaggcttatgctgcaaagagaatgtacggattgatcatgacattccttaccttcttaggcttgtttaaaagaaatatagcatttattgtagcaaagacttaaattttgtagatacaatatgaatcttttcatgttttattggaaatgctgttcatactttaacataaagctttcttaatgcaaa

SEQ ID NO: 441045 - DNA, 304 bp, Homo sapiens
ctactactactactactaaattcgcggccgcgtcgaatggaaatggttcaaaaattgtgtctgttggagatgaccaggaaattcacatctatgattgtccaatttaaacatcaaagtctccaggcttatgctgcaaagagaatgtacggattgatcatgacattccttaccttcttaggcttgtttaaaagaaatatagcatttattgtagcaaagacttaaattttgtagatacaatatgaatcttttcatgttttattggaaatgctgttcatactttaacataaagctttcttaatgcaaa

SEQ ID NO: 441046 - DNA, 1518 bp, Homo sapiens
gatttcactgaatttatttcagcaacagaagttattagctttagtccaatctcaaaagtacaaaatgaaattgcaacacaaacctctaaacctgcagttgccggaagctaaacgtctgcgcttccggaagcaaatttccaactaccactcctctggaagcaggacctggcttcctccctcctctctccgcccaccctcgtcggcgtctgccccgcgcccgccatagcgacggcaacgggcgctgcggagtgctccgagccgtgagggcggggccggcgcgatgccccgccccttcgatagctcatctttgcgcgtcgcagtcgcgcggagcccggcttccgacgtgcagcctggcagtgcagtgagctgtctggccttttgtccttgatccttggttaaggaaatgaccaaccagtacggtattctcttcaaacaagagcaagcccatgatgatgccatttggtcagttgcttgggggacaaacaagaaggaaaactctgagacagtggtcacaggctccctagatgacctggtgaaggtctggaaatggcgtgatgagaggctggacctacagtggagtctggagggacatcagctgggagtggtgtctgtggacatcagccacaccctgcccattgctgcatccagctctcttgatgctcatattcgtctttgggacttggaaaatggcaaacagataaagtccatagatgcaggacctgtggatgcctggactttggccttttctcctgattcccagtatctggccacaggaactcatgtcgggaaagtgaacatttttggtgtggaaagtgggaaaaaggaatattctttggacacgagaggaaaattcattcttagtattgcatatagtcctgatgggaaatacctagccagtggagccatagatggaatcatcaatatttttgatattgcaactggaaaacttctgcataccctggaaggccatgccatgcccattcgctccttgaccttttccccggactcccagctccttgtcactgcttcagatgatggctacatcaagatctatgatgtacaacatgccaatttggctggcacgctgagcggccatgcctcctgggtgctgaacgttgcattctgtcctgatgacactcactttgtttccagttcgtctgacaaaagtgtaaaagtttgggatgttggaacgaggacttgtgttcacaccttctttgatcaccaggatcaggtctggggagtaaaatacaatggaaatggttcaaaaattgtgtctgttggagatgaccaggaaattcacatctatgattgtccaatttaaacatcaaagtctccaggcttatgctgcaaagagaatgtacggattgatcatgacattccttaccttcttaggcttgtttaaaagaaatatagcatttattgtagcaaagacttaaattttgtagatacaatatgaatcttttcatgttttattggaaatgctgttcatactttaacataaagctttcttaatgcaaa

SEQ ID NO: 441047 - DNA, 1676 bp, Homo sapiens
  misc_feature (1527)..(1527): n is a, c, g, or t
gatttcactgaatttatttcagcaacagaagttattagctttagtccaatctcaaaagtacaaaatgaaattgcaacacaaacctctaaacctgcagttgccggaagctaaacgtctgcgcttccggaagcaaatttccaactaccactcctctggaagcaggacctggcttcctccctcctctctccgcccaccctcgtcggcgtctgccccgcgcccgccatagcgacggcaacgggcgctgcggagtgctccgagccgtgagggcggggccggcgcgatgccccgccccttcgatagctcatctttgcgcgtcgcagtcgcgcggagcccggcttccgacgtgcagcctggcagtgcagtgagctgtctggccttttgtccttgatccttggttaaggaaatgaccaaccagtacggtattctcttcaaacaagagcaagcccatgatgatgccatttggtcagttgcttgggggacaaacaagaaggaaaactctgagacagtggtcacaggctccctagatgacctggtgaaggtctggaaatggcgtgatgagaggctggacctacagtggagtctggagggacatcagctgggagtggtgtctgtggacatcagccacaccctgcccattgctgcatccagctctcttgatgctcatattcgtctttgggacttggaaaatggcaaacagataaagtccatagatgcaggacctgtggatgcctggactttggccttttctcctgattcccagtatctggccacaggaactcatgtcgggaaagtgaacatttttggtgtggaaagtgggaaaaaggaatattctttggacacgagaggaaaattcattcttagtattgcatatagtcctgatgggaaatacctagccagtggagccatagatggaatcatcaatatttttgatattgcaactggaaaacttctgcataccctggaaggccatgccatgcccattcgctccttgaccttttccccggactcccagctccttgtcactgcttcagatgatggctacatcaagatctatgatgtacaacatgccaatttggctggcacgctgagcggccatgcctcctgggtgctgaacgttgcattctgtcctgatgacactcactttgtttccagttcgtctgacaaaagtgtaaaagtttgggatgttggaacgaggacttgtgttcacaccttctttgatcaccaggatcaggtctggggagtaaaatacaatggaaatggttcaaaaattgtgtctgttggagatgaccaggaaattcacatctatgattgtccaatttaaacatcaaagtctccaggcttatgctgcaaagagaatgtacggattgatcatgacattccttaccttcttaggcttgtttaaaagaaatatagcatttattgtagcaaagacttaaattttgtagatacaatatgaatcttttcatgttttattggaaatgctgttcatactttaacataaagctttcttaatgcaaaaaaaaaaantagggaaggcggattacattcactggcccggcgtttacaacgtcggaactggggaacccctgggggtacccactttaatggccttgaggaaattcccttttggcagttggggaataacgaaagggccgaaccgtcggcttccaacagga

SEQ ID NO: 441048 - DNA, 2239 bp, Homo sapiens
  misc_feature (1528)..(1528): n is a, c, g, or t
  misc_feature (1533)..(1533): n is a, c, g, or t
  misc_feature (1538)..(1538): n is a, c, g, or t
  misc_feature (1543)..(1543): n is a, c, g, or t
  misc_feature (1548)..(1548): n is a, c, g, or t
  misc_feature (1554)..(1554): n is a, c, g, or t
  misc_feature (1559)..(1559): n is a, c, g, or t
  misc_feature (1564)..(1564): n is a, c, g, or t
  misc_feature (1569)..(1569): n is a, c, g, or t
  misc_feature (1609)..(1609): n is a, c, g, or t
  misc_feature (1613)..(1613): n is a, c, g, or t
  misc_feature (1615)..(1615): n is a, c, g, or t
gatttcactgaatttatttcagcaacagaagttattagctttagtccaatctcaaaagtacaaaatgaaattgcaacacaaacctctaaacctgcagttgccggaagctaaacgtctgcgcttccggaagcaaatttccaactaccactcctctggaagcaggacctggcttcctccctcctctctccgcccaccctcgtcggcgtctgccccgcgcccgccatagcgacggcaacgggcgctgcggagtgctccgagccgtgagggcggggccggcgcgatgccccgccccttcgatagctcatctttgcgcgtcgcagtcgcgcggagcccggcttccgacgtgcagcctggcagtgcagtgagctgtctggccttttgtccttgatccttggttaaggaaatgaccaaccagtacggtattctcttcaaacaagagcaagcccatgatgatgccatttggtcagttgcttgggggacaaacaagaaggaaaactctgagacagtggtcacaggctccctagatgacctggtgaaggtctggaaatggcgtgatgagaggctggacctacagtggagtctggagggacatcagctgggagtggtgtctgtggacatcagccacaccctgcccattgctgcatccagctctcttgatgctcatattcgtctttgggacttggaaaatggcaaacagataaagtccatagatgcaggacctgtggatgcctggactttggccttttctcctgattcccagtatctggccacaggaactcatgtcgggaaagtgaacatttttggtgtggaaagtgggaaaaaggaatattctttggacacgagaggaaaattcattcttagtattgcatatagtcctgatgggaaatacctagccagtggagccatagatggaatcatcaatatttttgatattgcaactggaaaacttctgcataccctggaaggccatgccatgcccattcgctccttgaccttttccccggactcccagctccttgtcactgcttcagatgatggctacatcaagatctatgatgtacaacatgccaatttggctggcacgctgagcggccatgcctcctgggtgctgaacgttgcattctgtcctgatgacactcactttgtttccagttcgtctgacaaaagtgtaaaagtttgggatgttggaacgaggacttgtgttcacaccttctttgatcaccaggatcaggtctggggagtaaaatacaatggaaatggttcaaaaattgtgtctgttggagatgaccaggaaattcacatctatgattgtccaatttaaacatcaaagtctccaggcttatgctgcaaagagaatgtacggattgatcatgacattccttaccttcttaggcttgtttaaaagaaatatagcatttattgtagcaaagacttaaattttgtagatacaatatgaatcttttcatgttttattggaaatgctgttcatactttaacataaagctttcttaatgcaaaaaaaaaaaanaaaanaaaanaaaanaaaanaaaaanaaaanaaaanaaaanaaaaaaaaaaaaaaaaaaaaaaaaaaaaaaaaaaaaacanacananaaaaaaaaaaaaaaaaaaaaaacaaagacaaaaaaaaaaaaaagaaaaaaaaaaaaaaaaaaaaaaaacgatggatgagtgagaagagaagagcataacaagatgagagaaatacgagaggtcagacaccgcccgagaagaggataatgagaaggaaaagagaacgcagatttagtttagagagcaacagcacacacaccgactccacggacgaccggcgcgcagagtcaaaaaagagaggagtaaaaccgaatcacgagaaagtacaaaacaggaagagaacgaagagccagacccaaacgaacgggaaagagatagacgcagagcacaaagtcaaagaaagagaacaaagcagcaggacaagagggaagagcgagaacaagaggaaagacaagtaggaaatccagagagagaatgaaaccaacagaagactacacagcggcagcagagaaacaagagaaaacagaacaaggacacacaaaagcagaaacactacaagccgaagaaacaagacaaaaggcgaaggcaagagaaggaaagagaaagctagaaggcaaccagggaaggaaaacagcacacacaaacaagaagagaacagcaagcgaaaaagaacaacgaaaaaaa

SEQ ID NO: 441049 - DNA, 2929 bp, Homo sapiens
  misc_feature (1164)..(1164): n is a, c, g, or t
  misc_feature (1171)..(1171): n is a, c, g, or t
agaagcacatatgtttttgtattttgataaaattttagcatacagtctatcctcattatttgtggattctgtatttatgaattcacctacttactaaaatttgtctgtagccctcaaattaatacttacaatgcttttgtggtctttggaagacatgacattttttcacgtgaaaaattttagttgcctgatgcacatgttctcaactgaagtcaaacaaggtgacactgccttcttgtcaactctcatattgtaagcaaatgtcatttttgcagtctttggtgctacatttttctcatctttgtgctttttgtcggtgattccactgtttgagatagcccccaagcatagtgctgaggtgcttctaaatgcaagaagattgtgatttgtcttatggagaaaatatgtgtgttagataagctttgtttaggcatgagttcagtattaatgaattactaatgtatattcagtaagtgcctttaaacataaacacacataaaacatgattatgtattgattggttgacaagaatgtgcccagaggctttcaggaacctgtttccccaaggaacagtggttctgtgttggataatttagtgtctgtagcgacttcatagaacataattgttgtgaataatgagaacctactgtaattggtttcatttctaaacctgtgtattttctgtaaagacatcctgagcctgagtctggtggctcatacctgtaatcccagcactttgggaggccaagacaggaggattgcttgagcccaggagttcaagaccagcctaggcaacatagggagaccccatctctacaaaaaattaaaatatccagacatgttggcacgcacctgtagtcccagccactcgggctgaggtgggagcaagacttggcctgggaggttgaagctgcattgagccatgattgtgccactgcactccagtctgggtgatggagcaagaccctatctcgaaaaaaaaaagtccgccaaagggggtctttggcacacacaaagaaataagaaccattagcccttaatgtagcctgagaaattagatctatcctttttttttattttttatttttattttttaagatggagtctcgctctgtcacccaggctggagttcagtggcacaatctcagctcactgcaacctccnctgcctnggttcaagtgattctcctgcctcagcctcctgagtagctgggattacaggtgtgcgccactacacccagctaatttttgtatttttattagagacgtggtttcaccatgtcagccaggatgttctcaatctcttgacacgtgtctccctccagcttctgcccttatttacctgcctgttggctcttaaaggcatttttggttgagacttttgcatgtaaaataagaactttgccatctttggattcccccatgtttgtttgtttgtttttaataaataatatttaatattaaaaggagctgtggtttttttctctctaaagagcaggaaaggacagagactggtcgctctctgcagtcacacttgaggtgaagaaaccatgggatagaattagctgttagttgagtccctaggttcagaggaagaaagaagaccataccacctggtagggagtgcgaaggaggttccagggactgatccatagaagggtgtcagaacaacttcataataaagagttgccttattttcttggtcaaggggaacttcctgtgtgccttctatcctgatgacaccccctcactgaaatcctggtgttgtttccacagagctgtctggccttttgtccttgatccttggttaaggaaatgaccaaccagtacggtattctcttcaaacaagagcaagcccatgatgatgccatttggtcagttgcttgggggacaaacaagaaggaaaactctgagacagtggtcacaggctccctagatgacctggtgaaggtctggaaatggcgtgatgagaggctggacctacagtggagtctggagggacatcagctgggagtggtgtctgtggacatcagccacaccctgcccattgctgcatccagctctcttgatgctcatattcgtctttgggacttggaaaatggcaaacagataaagtccatagatgcaggacctgtggatgcctggactttggccttttctcctgattcccagtatctggccacaggaactcatgtcgggaaagtgaacatttttggtgtggaaagtgggaaaaaggaatattctttggacacgagaggaaaattcattcttagtattgcatatagtcctgatgggaaatacctagccagtggagccatagatggaatcatcaatatttttgatattgcaactggaaaacttctgcataccctggaaggccatgccatgcccattcgctccttgaccttttccccggactcccagctccttgtcactgcttcagatgatggctacatcaagatctatgatgtacaacatgccaatttggctggcacgctgagcggccatgcctcctgggtgctgaacgttgcattctgtcctgatgacactcactttgtttccagttcgtctgacaaaagtgtaaaagtttgggatgttggaacgaggacttgtgttcacaccttctttgatcaccaggatcaggtctggggagtaaaatacaatggaaatggttcaaaaattgtgtctgttggagatgaccaggaaattcacatctatgattgtccaatttaaacatcaaagtctccaggcttatgctgcaaagagaatgtacggattgatcatgacattccttaccttcttaggcttgtttaaaagaaatatagcatttattgtagcaaagacttaaattttgtagatacaatatgaatcttttcatgttttattggaaatgctgttcatactttaacataaagctttcttaatgcaaa

SEQ ID NO: 441050 - DNA, 1581 bp, Homo sapiens
gatttcactgaatttatttcagcaacagaagttattagctttagtccaatctcaaaagtacaaaatgaaattgcaacacaaacctctaaacctgcagttgccggaagctaaacgtctgcgcttccggaagcaaatttccaactaccactcctctggaagcaggacctggcttcctccctcctctctccgcccaccctcgtcggcgtctgccccgcgcccgccatagcgacggcaacgggcgctgcggagtgctccgagccgtgagggcggggccggcgcgatgccccgccccttcgatagctcatctttgcgcgtcgcagtcgcgcggagcccggcttccgacgtgcagcctggcagtgcagtgagctgtctggccttttgtccttgatccttggttaaggaaatgaccaaccagtacggtattctcttcaaacaagagcaagcccatgatgatgccatttggtcagttgcttgggggacaaacaagaaggaaaactctgagacagtggtcacaggctccctagatgacctggtgaaggtctggaaatggcgtgatgagaggctggacctacagtggagtctggagggacatcagctgggagtggtgtctgtggacatcagccacaccctgcccattgctgcatccagctctcttgatgctcatattcgtctttgggacttggaaaatggcaaacagataaagtccatagatgcaggacctgtggatgcctggactttggccttttctcctgattcccagtatctggccacaggaactcatgtcgggaaagtgaacatttttggtgtggaaagtgggaaaaaggaatattctttggacacgagaggaaaattcattcttagtattgcatatagtcctgatgggaaatacctagccagtggagccatagatggaatcatcaatatttttgatattgcaactggaaaacttctgcataccctggaaggccatgccatgcccattcgctccttgaccttttccccggactcccagctccttgtcactgcttcagatgatggctacatcaagatctatgatgtacaacatgccaatttggctggcacgctgagcggccatgcctcctgggtgctgaacgttgcattctgtcctgatgacactcactttgtttccagttcgtctgacaaaagtgtaaaagtttgggatgttggaacgaggacttgtgttcacaccttctttgatcaccaggatcaggtgtcgcttcttgctgctctcaagccctactccccatgcttctgcttctagcttgctgggagctgggaaactgaccaagcatggaaaactacagcaatgctcataacaggctaaaaggctctggggaagaaggcatttcaacagcagaaaagaggaagaagagggagaagagaaaatggagaaacaagaaataagccaacacaaaagaggggtgaagaaaagagagggtgcaaaagagaacaaagtaaaaacaaaaacaaaacaaaaaggacaaacaaatccccaaagaactctccaacggcaggtttcctggatgctccacccttccttataataaagaaggaaatgga

SEQ ID NO: 441051 - DNA, 2981 bp, Homo sapiens
  misc_feature (1164)..(1164): n is a, c, g, or t
  misc_feature (1171)..(1171): n is a, c, g, or t
agaagcacatatgtttttgtattttgataaaattttagcatacagtctatcctcattatttgtggattctgtatttatgaattcacctacttactaaaatttgtctgtagccctcaaattaatacttacaatgcttttgtggtctttggaagacatgacattttttcacgtgaaaaattttagttgcctgatgcacatgttctcaactgaagtcaaacaaggtgacactgccttcttgtcaactctcatattgtaagcaaatgtcatttttgcagtctttggtgctacatttttctcatctttgtgctttttgtcggtgattccactgtttgagatagcccccaagcatagtgctgaggtgcttctaaatgcaagaagattgtgatttgtcttatggagaaaatatgtgtgttagataagctttgtttaggcatgagttcagtattaatgaattactaatgtatattcagtaagtgcctttaaacataaacacacataaaacatgattatgtattgattggttgacaagaatgtgcccagaggctttcaggaacctgtttccccaaggaacagtggttctgtgttggataatttagtgtctgtagcgacttcatagaacataattgttgtgaataatgagaacctactgtaattggtttcatttctaaacctgtgtattttctgtaaagacatcctgagcctgagtctggtggctcatacctgtaatcccagcactttgggaggccaagacaggaggattgcttgagcccaggagttcaagaccagcctaggcaacatagggagaccccatctctacaaaaaattaaaatatccagacatgttggcacgcacctgtagtcccagccactcgggctgaggtgggagcaagacttggcctgggaggttgaagctgcattgagccatgattgtgccactgcactccagtctgggtgatggagcaagaccctatctcgaaaaaaaaaagtccgccaaagggggtctttggcacacacaaagaaataagaaccattagcccttaatgtagcctgagaaattagatctatcctttttttttattttttatttttattttttaagatggagtctcgctctgtcacccaggctggagttcagtggcacaatctcagctcactgcaacctccnctgcctnggttcaagtgattctcctgcctcagcctcctgagtagctgggattacaggtgtgcgccactacacccagctaatttttgtatttttattagagacgtggtttcaccatgtcagccaggatgttctcaatctcttgacacgtgtctccctccagcttctgcccttatttacctgcctgttggctcttaaaggcatttttggttgagacttttgcatgtaaaataagaactttgccatctttggattcccccatgtttgtttgtttgtttttaataaataatatttaatattaaaaggagctgtggtttttttctctctaaagagcaggaaaggacagagactggtcgctctctgcagtcacacttgaggtgaagaaaccatgggatagaattagctgttagttgagtccctaggttcagaggaagaaagaagaccataccacctggtagggagtgcgaaggaggttccagggactgatccatagaagggtgtcagaacaacttcataataaagagttgccttattttcttggtcaaggggaacttcctgtgtgccttctatcctgatgacaccccctcactgaaatcctggtgttgtttccacagagctgtctggccttttgtccttgatccttggttaaggaaatgaccaaccagctcacaattgttgaacagtatctcggcttcattaagtcgtatgcaagaagactttataaatgaagcactttccattctagcccatgatgatgccatttggtcagttgcttgggggacaaacaagaaggaaaactctgagacagtggtcacaggctccctagatgacctggtgaaggtctggaaatggcgtgatgagaggctggacctacagtggagtctggagggacatcagctgggagtggtgtctgtggacatcagccacaccctgcccattgctgcatccagctctcttgatgctcatattcgtctttgggacttggaaaatggcaaacagataaagtccatagatgcaggacctgtggatgcctggactttggccttttctcctgattcccagtatctggccacaggaactcatgtcgggaaagtgaacatttttggtgtggaaagtgggaaaaaggaatattctttggacacgagaggaaaattcattcttagtattgcatatagtcctgatgggaaatacctagccagtggagccatagatggaatcatcaatatttttgatattgcaactggaaaacttctgcataccctggaaggccatgccatgcccattcgctccttgaccttttccccggactcccagctccttgtcactgcttcagatgatggctacatcaagatctatgatgtacaacatgccaatttggctggcacgctgagcggccatgcctcctgggtgctgaacgttgcattctgtcctgatgacactcactttgtttccagttcgtctgacaaaagtgtaaaagtttgggatgttggaacgaggacttgtgttcacaccttctttgatcaccaggatcaggtctggggagtaaaatacaatggaaatggttcaaaaattgtgtctgttggagatgaccaggaaattcacatctatgattgtccaatttaaacatcaaagtctccaggcttatgctgcaaagagaatgtacggattgatcatgacattccttaccttcttaggcttgtttaaaagaaatatagcatttattgtagcaaagacttaaattttgtagatacaatatgaatcttttcatgttttattggaaatgctgttcatactttaacataaagctttcttaatgcaaa

SEQ ID NO: 441052 - DNA, 1615 bp, Homo sapiens
gatttcactgaatttatttcagcaacagaagttattagctttagtccaatctcaaaagtacaaaatgaaattgcaacacaaacctctaaacctgcagttgccggaagctaaacgtctgcgcttccggaagcaaatttccaactaccactcctctggaagcaggacctggcttcctccctcctctctccgcccaccctcgtcggcgtctgccccgcgcccgccatagcgacggcaacgggcgctgcggagtgctccgagccgtgagggcggggccggcgcgatgccccgccccttcgatagctcatctttgcgcgtcgcagtcgcgcggagcccggcttccgacgtgcagcctggcagtgcagtgagctgtctggccttttgtccttgatccttggttaaggaaatgaccaaccagtacggtattctcttcaaacaagagcaagcccatgatgatgccatttggtcagttgcttgggggacaaacaagaaggaaaactctgagacagtggtcacaggctccctagatgacctggtgaaggtctggaaatgaccattggtattgcatagtcacagggacccagaatttcagatgccaggtaaagtgtgttctttgtgaagaaatccatttctctgtcccctgttgaaggcgtgatgagaggctggacctacagtggagtctggagggacatcagctgggagtggtgtctgtggacatcagccacaccctgcccattgctgcatccagctctcttgatgctcatattcgtctttgggacttggaaaatggcaaacagataaagtccatagatgcaggacctgtggatgcctggactttggccttttctcctgattcccagtatctggccacaggaactcatgtcgggaaagtgaacatttttggtgtggaaagtgggaaaaaggaatattctttggacacgagaggaaaattcattcttagtattgcatatagtcctgatgggaaatacctagccagtggagccatagatggaatcatcaatatttttgatattgcaactggaaaacttctgcataccctggaaggccatgccatgcccattcgctccttgaccttttccccggactcccagctccttgtcactgcttcagatgatggctacatcaagatctatgatgtacaacatgccaatttggctggcacgctgagcggccatgcctcctgggtgctgaacgttgcattctgtcctgatgacactcactttgtttccagttcgtctgacaaaagtgtaaaagtttgggatgttggaacgaggacttgtgttcacaccttctttgatcaccaggatcaggtctggggagtaaaatacaatggaaatggttcaaaaattgtgtctgttggagatgaccaggaaattcacatctatgattgtccaatttaaacatcaaagtctccaggcttatgctgcaaagagaatgtacggattgatcatgacattccttaccttcttaggcttgtttaaaagaaatatagcatttattgtagcaaagacttaaattttgtagatacaatatgaatcttttcatgttttattggaaatgctgttcatactttaacataaagctttcttaatgcaaa

SEQ ID NO: 441053 - DNA, 1593 bp, Homo sapiens
gatttcactgaatttatttcagcaacagaagttattagctttagtccaatctcaaaagtacaaaatgaaattgcaacacaaacctctaaacctgcagttgccggaagctaaacgtctgcgcttccggaagcaaatttccaactaccactcctctggaagcaggacctggcttcctccctcctctctccgcccaccctcgtcggcgtctgccccgcgcccgccatagcgacggcaacgggcgctgcggagtgctccgagccgtgagggcggggccggcgcgatgccccgccccttcgatagctcatctttgcgcgtcgcagtcgcgcggagcccggcttccgacgtgcagcctggcagtgcagtgagctgtctggccttttgtccttgatccttggttaaggaaatgaccaaccagtacggtattctcttcaaacaagagcaagcccatgatgatgccatttggtcagttgcttgggggacaaacaagaaggaaaactctgagacagtggtcacaggctccctagatgacctggtgaaggtctggaaatggcgtgatgagaggctggacctacagtggagtctggagggacatcagctgggagtggtgtctgtggacatcagccacaccctgcccattgctgcatccagctctcttgatgctcatattcgtctttgggacttggaaaatggcaaacagataaagtccatagatgcaggacctgtggatgcctggactttggccttttctcctgattcccagtatctggccacaggaactcatgtcgggaaagtgaacatttttggtgtggaaagtgggaaaaaggaatattctttggacacgagaggaaaattcattcttagtattgcatatagtcctgatgggaaatacctagccagtggagccatagatggaatcatcaatatttttgatattgcaactggaaaacttctgcataccctggaaggtggatgaaagtattgtgcccactgtccacaccggtggcctctggaaaggaggactgggtagctaaagaacaggggccatgccatgcccattcgctccttgaccttttccccggactcccagctccttgtcactgcttcagatgatggctacatcaagatctatgatgtacaacatgccaatttggctggcacgctgagcggccatgcctcctgggtgctgaacgttgcattctgtcctgatgacactcactttgtttccagttcgtctgacaaaagtgtaaaagtttgggatgttggaacgaggacttgtgttcacaccttctttgatcaccaggatcaggtctggggagtaaaatacaatggaaatggttcaaaaattgtgtctgttggagatgaccaggaaattcacatctatgattgtccaatttaaacatcaaagtctccaggcttatgctgcaaagagaatgtacggattgatcatgacattccttaccttcttaggcttgtttaaaagaaatatagcatttattgtagcaaagacttaaattttgtagatacaatatgaatcttttcatgttttattggaaatgctgttcatactttaacataaagctttcttaatgcaaa

SEQ ID NO: 441054 - DNA, 2201 bp, Homo sapiens
  misc_feature (1164)..(1164): n is a, c, g, or t
  misc_feature (1171)..(1171): n is a, c, g, or t
agaagcacatatgtttttgtattttgataaaattttagcatacagtctatcctcattatttgtggattctgtatttatgaattcacctacttactaaaatttgtctgtagccctcaaattaatacttacaatgcttttgtggtctttggaagacatgacattttttcacgtgaaaaattttagttgcctgatgcacatgttctcaactgaagtcaaacaaggtgacactgccttcttgtcaactctcatattgtaagcaaatgtcatttttgcagtctttggtgctacatttttctcatctttgtgctttttgtcggtgattccactgtttgagatagcccccaagcatagtgctgaggtgcttctaaatgcaagaagattgtgatttgtcttatggagaaaatatgtgtgttagataagctttgtttaggcatgagttcagtattaatgaattactaatgtatattcagtaagtgcctttaaacataaacacacataaaacatgattatgtattgattggttgacaagaatgtgcccagaggctttcaggaacctgtttccccaaggaacagtggttctgtgttggataatttagtgtctgtagcgacttcatagaacataattgttgtgaataatgagaacctactgtaattggtttcatttctaaacctgtgtattttctgtaaagacatcctgagcctgagtctggtggctcatacctgtaatcccagcactttgggaggccaagacaggaggattgcttgagcccaggagttcaagaccagcctaggcaacatagggagaccccatctctacaaaaaattaaaatatccagacatgttggcacgcacctgtagtcccagccactcgggctgaggtgggagcaagacttggcctgggaggttgaagctgcattgagccatgattgtgccactgcactccagtctgggtgatggagcaagaccctatctcgaaaaaaaaaagtccgccaaagggggtctttggcacacacaaagaaataagaaccattagcccttaatgtagcctgagaaattagatctatcctttttttttattttttatttttattttttaagatggagtctcgctctgtcacccaggctggagttcagtggcacaatctcagctcactgcaacctccnctgcctnggttcaagtgattctcctgcctcagcctcctgagtagctgggattacaggtgtgcgccactacacccagctaatttttgtatttttattagagacgtggtttcaccatgtcagccaggatgttctcaatctcttgacacgtgtctccctccagcttctgcccttatttacctgcctgttggctcttaaaggcatttttggttgagacttttgcatgtaaaataagaactttgccatctttggattcccccatgtttgtttgtttgtttttaataaataatatttaatattaaaaggagctgtggtttttttctctctaaagagcaggaaaggacagagactggtcgctctctgcagtcacacttgaggtgaagaaaccatgggatagaattagctgttagttgagtccctaggttcagaggaagaaagaagaccataccacctggtagggagtgcgaaggaggttccagggactgatccatagaagggtgtcagaacaacttcataataaagagttgccttattttcttggtcaaggggaacttcctgtgtgccttctatcctgatgacaccccctcactgaaatcctggtgttgtttccacagagctgtctggccttttgtccttgatccttggttaaggaaatgaccaaccagctcacaattgttgaacagtatctcggcttcattaagtcgtatgcaagaagactttataaatgaagcactttccattctagcccatgatgatgccatttggtcagttgcttgggggacaaacaagaaggaaaactctgagacagtggtcacaggctccctagatgacctggtgaaggtctggaaatggtgagtgcctctcccctaacatacagccttggaaaattgggggctgaggttttgcttctgaactctccagttgcagtccgggaaatacttttttctaggcaagaaagcaatagcaatatggtggtataaaacagcagcttatttttcccacttgttttcctgttactctgtattaaagccctaaagtta

SEQ ID NO: 441055 - DNA, 770 bp, Homo sapiens
  misc_feature (441)..(441): n is a, c, g, or t
  misc_feature (508)..(508): n is a, c, g, or t
  misc_feature (513)..(513): n is a, c, g, or t
  misc_feature (518)..(518): n is a, c, g, or t
  misc_feature (523)..(523): n is a, c, g, or t
  misc_feature (528)..(528): n is a, c, g, or t
  misc_feature (534)..(534): n is a, c, g, or t
  misc_feature (539)..(539): n is a, c, g, or t
  misc_feature (544)..(544): n is a, c, g, or t
  misc_feature (549)..(549): n is a, c, g, or t
gatttcactgaatttatttcagcaacagaagttattagctttagtccaatctcaaaagtacaaaatgaaattgcaacacaaacctctaaacctgcagttgccggaagctaaacgtctgcgcttccggaagcaaatttccaactaccactcctctggaagcaggacctggcttcctccctcctctctccgcccaccctcgtcggcgtctgccccgcgcccgccatagcgacggcaacgggcgctgcggagtgctccgagccgtgagggcggggccggcgcgatgccccgccccttcgatagctcatctttgcgcgtcgcagtcgcgcggagcccggcttccgacgtgcagcctggcagtgcagtgagctgtctggccttttgtccttgatccttggttaaggaaatgaccaaccagtacggtattctcttcaaacaagagcnagcccatgatgatgccatttggtcagttgcttgggggacatagcgagactcggtctcaaaaaaaaanaaaanaaaanaaaanaaaanaaaaanaaaanaaaanaaaanaaaacactgccaaactgtttccaaagcatctgcatcgtgtttaatttccataagtaaccgtatgagaattctaggtcctccaaataattagcagtccttcgtagtgtcagtttttgtttcagccttcctttatgggtatgctgtggcatatccctggagattttaattcgcattttccagtgactaaggggtgttgaaccactcgtgccttcctgtgccta

SEQ ID NO: 441056 - DNA, 700 bp, Homo sapiens
aaatacctgcctgcaggcagggccatcacacccttgtgtggctccaaaatcacttttttaattaatccaatcctcagcaatgctcataacaggctaaaaggctctggggaagaaggcatttcaacagcagaaaagaggaagaagagggagaagagaaaatggagaaacaagaaataagccaacacaaaagaggggtgaagaaaagagagggtgcaaaagagaacaaagtaaaaacaaaaacaaaacaaaaaggacaaacaaatccccaaagaactctccaacggcaggtttcctggatgctccacccttccttataataaagaaggaaatggatttcttgggatttgccacttccttccctctggggctctttctccaccaccctcactccatttggctcccggctccctaggctggggtcagctgagacagcaaggaacgctggctcttggtggggcccaggacctcaaatagtccacccctggacaggacaggctttcccaaagaagttacacacagatgcttcccagccccggctcaggagggctaggatctgggctgtgaccacgtaagggcatcttggacacaatgccagggtgttgagctcacaaccagtggtctggagcttcgtgtaaactgtgatcctcaaactcctccttgagggaggaaatgggtgccttgggaggtctatggaagccta

SEQ ID NO: 441057 - DNA, 473 bp, Homo sapiens
gacatgagccaccatacctggcctgtcactatagatttaacctagacatactagttcttgtaacagtgttaagtgcttgtttgggtgaacagacttactttttatttattatatcgtaatctatcacattatgtatgtgtgtgttaatatatatttgctatatgaatgtctcatttctgttattttggattctgatgaactttgtgattggaaacaactttttgttgataatttgaaggtggatgaaagtattgtgcccactgtccacaccggtggcctctggaaaggaggactgggtagctaaagaacaggggtaggttggagggagactttattatgcgtactgttgtgctgttttgaattctaatcaagtgaatttattacgtcctcacattgctatagtttatcctttatactataataaaggatttgatagggaaataataccttaatttgttcaaccttacaaatca

SEQ ID NO: 441058 - DNA, 430 bp, Homo sapiens
aagctgtataggaaagcactttgtaaaatagtaaagcaaatacaaataaatgttacctcacaattgttgaacagtatctcggcttcattaagtcgtatgcaagaagactttataaatgaagcactttccattctagcccatgatgatgccatttggtcagttgcttgggggacaaacaagaaggaaaactctgagacagtggtcacaggctccctagatgacctggtgaaggtctggaaatggtgagtgcctctcccctaacatacagccttggaaaattgggggctgaggttttgcttctgaactctccagttgcagtccgggaaatacttttttctaggcaagaaagcaatagcaatatggtggtataaaacagcagcttatttttcccacttgttttcctgttactctgtattaaagccctaaagtt

SEQ ID NO: 441059 - DNA, 2045 bp, Homo sapiens
  misc_feature (1554)..(1554): n is a, c, g, or t
  misc_feature (1558)..(1558): n is a, c, g, or t
  misc_feature (1560)..(1560): n is a, c, g, or t
gatttcactgaatttatttcagcaacagaagttattagctttagtccaatctcaaaagtacaaaatgaaattgcaacacaaacctctaaacctgcagttgccggaagctaaacgtctgcgcttccggaagcaaatttccaactaccactcctctggaagcaggacctggcttcctccctcctctctccgcccaccctcgtcggcgtctgccccgcgcccgccatagcgacggcaacgggcgctgcggagtgctccgagccgtgagggcggggccggcgcgatgccccgccccttcgatagctcatctttgcgcgtcgcagtcgcgcggagcccggcttccgacgtgcagcctggcagtgcagtgagctgtctggccttttgtccttgatccttggttaaggaaatgaccaaccagtacggtattctcttcaaacaagagcaagcccatgatgatgccatttggtcagttgcttgggggacaaacaagaaggaaaactctgagacagtggtcacaggctccctagatgacctggtgaaggtctggaaatggcgtgatgagaggctggacctacagtggagtctggagggacatcagctgggagtggtgtctgtggacatcagccacaccctgcccattgctgcatccagctctcttgatgctcatattcgtctttgggacttggaaaatggcaaacagataaagtccatagatgcaggacctgtggatgcctggactttggccttttctcctgattcccagtatctggccacaggaactcatgtcgggaaagtgaacatttttggtgtggaaagtgggaaaaaggaatattctttggacacgagaggaaaattcattcttagtattgcatatagtcctgatgggaaatacctagccagtggagccatagatggaatcatcaatatttttgatattgcaactggaaaacttctgcataccctggaaggccatgccatgcccattcgctccttgaccttttccccggactcccagctccttgtcactgcttcagatgatggctacatcaagatctatgatgtacaacatgccaatttggctggcacgctgagcggccatgcctcctgggtgctgaacgttgcattctgtcctgatgacactcactttgtttccagttcgtctgacaaaagtgtaaaagtttgggatgttggaacgaggacttgtgttcacaccttctttgatcaccaggatcaggtctggggagtaaaatacaatggaaatggttcaaaaattgtgtctgttggagatgaccaggaaattcacatctatgattgtccaatttaaacatcaaagtctccaggcttatgctgcaaagagaatgtacggattgatcatgacattccttaccttcttaggcttgtttaaaagaaatatagcatttattgtagcaaagacttaaattttgtagatacaatatgaatcttttcatgttttattggaaatgctgttcatactttaacataaagctttcttaatgcaaaaaaaaaaaaaaaaaaaaaaaaaaaaaaaaaaaacanacananaaaaaaaaaaaaaaaaaaaaaacaaagacaaaaaaaaaaaaaagacacagaaaacaggaacagagtaaggaaacaaatctaccctccccttaacagggaaactactcccaccctggaacctccgtagacctaaacatctactccttacacctagcaggtgtctcctctatcttaggggccatcaatttcatcacaacaattatcaatataaaaccccctgccataacccaataccaaagcccctcttcgtctgatccgtcctaatcacagcagtacctacttctcctaatctctcccagtcctagctgctggcatcactatactactaatagacggaagcttaagaccaccttcttcgaccccgccggagggaggagacacaattctattcaaatctattcaaatttttcggacaacccggaagttaatatgcttaatcaacagggttggaataactccctaggggattaaagaacggaaaggac

SEQ ID NO: 441060 - DNA, 1586 bp, Homo sapiens
gatttcactgaatttatttcagcaacagaagttattagctttagtccaatctcaaaagtacaaaatgaaattgcaacacaaacctctaaacctgcagttgccggaagctaaacgtctgcgcttccggaagcaaatttccaactaccactcctctggaagcaggacctggcttcctccctcctctctccgcccaccctcgtcggcgtctgccccgcgcccgccatagcgacggcaacgggcgctgcggagtgctccgagccgtgagggcggggccggcgcgatgccccgccccttcgatagctcatctttgcgcgtcgcagtcgcgcggagcccggcttccgacgtgcagcctggcagtgcagtggggaacttcctgtgtgccttctatcctgatgacaccccctcactgaaatcctggtgttgtttccacagagctgtctggccttttgtccttgatccttggttaaggaaatgaccaaccagtacggtattctcttcaaacaagagcaagcccatgatgatgccatttggtcagttgcttgggggacaaacaagaaggaaaactctgagacagtggtcacaggctccctagatgacctggtgaaggtctggaaatggcgtgatgagaggctggacctacagtggagtctggagggacatcagctgggagtggtgtctgtggacatcagccacaccctgcccattgctgcatccagctctcttgatgctcatattcgtctttgggacttggaaaatggcaaacagataaagtccatagatgcaggacctgtggatgcctggactttggccttttctcctgattcccagtatctggccacaggaactcatgtcgggaaagtgaacatttttggtgtggaaagtgggaaaaaggaatattctttggacacgagaggaaaattcattcttagtattgcatatagtcctgatgggaaatacctagccagtggagccatagatggaatcatcaatatttttgatattgcaactggaaaacttctgcataccctggaaggccatgccatgcccattcgctccttgaccttttccccggactcccagctccttgtcactgcttcagatgatggctacatcaagatctatgatgtacaacatgccaatttggctggcacgctgagcggccatgcctcctgggtgctgaacgttgcattctgtcctgatgacactcactttgtttccagttcgtctgacaaaagtgtaaaagtttgggatgttggaacgaggacttgtgttcacaccttctttgatcaccaggatcaggtctggggagtaaaatacaatggaaatggttcaaaaattgtgtctgttggagatgaccaggaaattcacatctatgattgtccaatttaaacatcaaagtctccaggcttatgctgcaaagagaatgtacggattgatcatgacattccttaccttcttaggcttgtttaaaagaaatatagcatttattgtagcaaagacttaaattttgtagatacaatatgaatcttttcatgttttattggaaatgctgttcatactttaacataaagctttcttaatgcaaa

SEQ ID NO: 441061 - DNA, 1421 bp, Homo sapiens
gatttcactgaatttatttcagcaacagaagttattagctttagtccaatctcaaaagtacaaaatgaaattgcaacacaaacctctaaacctgcagttgccggaagctaaacgtctgcgcttccggaagcaaatttccaactaccactcctctggaagcaggacctggcttcctccctcctctctccgcccaccctcgtcggcgtctgccccgcgcccgccatagcgacggcaacgggcgctgcggagtgctccgagccgtgagggcggggccggcgcgatgccccgccccttcgatagctcatctttgcgcgtcgcagtcgcgcggagcccggcttccgacgtgcagcctggcagtgcagtgagctgtctggccttttgtccttgatccttggttaaggaaatgaccaaccagtacggtattctcttcaaacaagagcaagcccatgatgatgccatttggtcagttgcttgggggacaaacaagaaggaaaactctgagacagtggtcacaggctccctagatgacctggtgaaggtctggaaatggcgtgatgagaggctggacctacagtggagtctggagggacatcagctgggagtggtgtctgtggacatcagccacaccctgcccattgctgcatccagctctcttgatgctcatattcgtctttgggacttggaaaatggcaaacagataaagtccatagatgcaggacctgtggatgcctggactttggccttttctcctgattcccagtatctggccacaggaactcatgtcgggaaagtgaacatttttggtgtggaaagtgggaaaaaggaatattctttggacacgagaggaaaattcattcttagtattgcatatagtcctgatgggaaatacctagccagtggagccatagatggaatcatcaatatttttgatattgcaactggaaaacttctgcataccctggaaggccatgccatgcccattcgctccttgaccttttccccggactcccagctccttgtcactgcttcagatgatggctacatcaagatctatgatgtacaacatgccaatttggctggcacgctgagcggccatgcctcctgggtgctgaacgttgcattctgtcctgatgacactcactttgtttccagttcgtctgacaaaagtgtaaaagtttgggatgttggaacgaggacttgtgttcacaccttctttgatcaccaggatcaggtctggggagtaaaatacaatggaaatggttcaaaaattgtgtctgttggagatgaccaggaaattcacatctatgattgtccaatttaaacatcaaagtctccaggcttatgctgcaaagatgtcggtggccggactcctactctggctgttaagaatgctttgggcaactattggaacaaggcttcgg

SEQ ID NO: 441062 - DNA, 1183 bp, Homo sapiens
  misc_feature (27)..(27): n is a, c, g, or t
  misc_feature (106)..(106): n is a, c, g, or t
gcaggtagaggccgggtgttaatcggncgagggagctgtctggctttgtccttgatcctggttaggaaatgaccaaccagtacggtattctcttcaaacaagagcnagcccatgatgatgccatttggtcagttgcttgggggacaaacaagaaggaaaactctgagacagtggtcacaggctccctagatgacctggtgaaggtctggaaatggcgtgatgagaggctggacctacagtggagtctggagggacatcagctgggagtggtgtctgtggacatcagccacaccctgcccattgctgcatccagctctcttgatgctcatattcgtctttgggacttggaaaatggcaaacagataaagtccatagatgcaggacctgtggatgcctggactttggccttttctcctgattcccagtatctggccacaggaactcatgtcgggaaagtgaacatttttggtgtggaaagtgggaaaaaggaatattctttggacacgagaggaaaattcattcttagtattgcatatagtcctgatgggaaatacctagccagtggagccatagatggaatcatcaatatttttgatattgcaactggaaaacttctgcataccctggaaggccatgccatgcccattcgctccttgaccttttccccggactcccagctccttgtcactgcttcagatgatggctacatcaagatctatgatgtacaacatgccaatttggctggcacgctgagcggccatgcctcctgggtgctgaacgttgcattctgtcctgatgacactcactttgtttccagttcgtctgacaaaagtgtaaaagtttgggatgttggaacgaggacttgtgttcacaccttctttgatcaccaggatcaggtctggggagtaaaatacaatggaaatggttcaaaaattgtgtctgttggagatgaccaggaaattcacatctatgattgtccaatttaaacatcaaagtctccaggcttatgctgcaaagagaatgtacggattgatcatgacattccttaccttcttaggcttgtttaaaagaaatatagcatttattgtagcaaagacttaaattttgtagatacaatatgaatcttttcatgttttattggaaatgctgttcatactttaacataaagctttcttaatgcaaa

SEQ ID NO: 441063 - DNA, 930 bp, Homo sapiens
gtaattaataaccatccaatttacaatctctatcggtgggtttctttttttatactaattccaatatgatggttgtaatagcacgcatgcgtcacctgagcataatccgctgatgattgacaagaagcataattcgcctgtggatctgacttgcttttctcctgattcccagtatctggccacaggaactcatgtcgggaaagtgaacatttttggtgtggaaagtgggaaaaaggaatattctttggacacgagaggaaaattcattcttagtattgcatatagtcctgatgggaaatacctagccagtggagccatagatggaatcatcaatatttttgatattgcaactggaaaacttctgcataccctggaaggccatgccatgcccattcgctccttgaccttttccccggactcccagctccttgtcactgcttcagatgatggctacatcaagatctatgatgtacaacatgccaatttggctggcacgctgagcggccatgcctcctgggtgctgaacgttgcattctgtcctgatgacactcactttgtttccagttcgtctgacaaaagtgtaaaagtttgggatgttggaacgaggacttgtgttcacaccttctttgatcaccaggatcaggtctggggagtaaaatacaatggaaatggttcaaaaattgtgtctgttggagatgaccaggaaattcacatctatgattgtccaatttaaacatcaaagtctccaggcttatgctgcaaagagaatgtacggattgatcatgacattccttaccttcttaggcttgtttaaaagaaatatagcatttattgtagcaaagacttaaattttgtagatacaatatgaatcttttcatgttttattggaaatgctgttcatactttaacataaagctttcttaatgcaaa

SEQ ID NO: 441064 - DNA, 631 bp, Homo sapiens
aagggcccgggtagatcctactgttgaaaatgaggaaacattcatgaacagagttgaagttaaagtaaagattcctgaatagctaaaaccgtggcttgttgatgactgggacttaattaccaggcaaaaacagctcttttatcttcctgccaagaagaatgtggattccattcttgaggattatgcaaattacaagaaatctcgtggaaacacagataataaggagtatgcggttaatgaagttgtggcagggataaaagaatacttcaacgtaatgttgggtacccagctactctataaatttgagagaccacagtatgccgaaattcttgcagatcatcccgatgcacccatgtcccaggtgtatggagcgccacatctcctgagattatttgtacgaattggagcaatgttggcctatacacctctggatgagaagagccttgctttattactcaattatcttcacgatttcctaaagtacctggcaaagaattctgcaactttgtttagtgccagcgattatgaagtggctcctcctgagtaccatcggaaagctgtgtgagaggcactctcacgcccgtatattcgtatattcctggttacacactgtgttgcccgtgatgtatat

SEQ ID NO: 441065 - DNA, 329 bp, Homo sapiens
tggcgcggaagcaggacccgaagcctaaattccaggagggtgagcgagtgcttgtgtaaaggttgccataaaggacaaacaagtgaaatacttcatacattacagtggttggaataaaaattgggatgaatgggttccggagagcagagtactcaaatacgtggacaccaatttgcagaaacagcgagaacttcaaaaagccaatcaggagcagtatgcagaggggaagatgagaggggctgccccaggaaagaagacatctggtctgcaacagaaaaatgttgaagtgaaaacgaaaaagaacaaacagaaaacacctggaaatggag

SEQ ID NO: 441066 - DNA, 1129 bp, Homo sapiens
aagggcccgggtagatcctactgttgaaaatgaggaaacattcatgaacagagttgaagttaaagtaaagattcctgaatagctaaaaccgtggcttgttgatgactgggacttaattaccaggcaaaaacagctcttttatcttcctgccaagaagaatgtggattccattcttgaggattatgcaaattacaagaaatctcgtggaaacacagataataaggagtatgcggttaatgttgggtacccagctactctataaatttgagagaccacagtatgccgaaattcttgcagatcatcccgatgcacccatgtcccaggtgtatggagcgccacatctcctgagattatttgtacgaattggagcaatgttggcctatacacctctggatgagaagagccttgctttattactcaattatcttcacgatttcctaaagtacctggcaaagaattctgcaactttgtttagtgccagcgattatgaagtggctcctcctgagtaccatcggaaagctgtgtgagaggcactctcactcacttatgtttggatctccgtaaacacatttttgttcttagtctatctcttgtacaaacaatgtgctttgaagatgttagtgtataacaattgatgtttgttttctgtttgattttaaacagagaaaataaaaggggtaatagctccttttttcttttctttttttttttcatttcaaagttgctgccagtgttttcaatgatggacaacagagggatatgctgtagagtgttttattgcctagttgacaaagctgcttttgaatgctggtggttctattcctttgacactacgctataaaacactctacaccatattaccctgcttagagttttcaatacaaagtggatcaaaactacatgctcagtcaacagtggactgcacagtgtgaattatgccaaataaatttaaaacgtagacacaggcacacacatggagctgcaaagggagttatgacatttacatttaggagtagtgggttgtgggttgtggctttggaatgacttggaaataattttggctggagagaaaaggttatattgtagagaactttgagagtcagcccgagattgaatttcctgcctatga

SEQ ID NO: 441067 - DNA, 1167 bp, Homo sapiens
aagggcccgggtagatcctactgttgaaaatgaggaaacattcatgaacagagttgaagttaaagtaaagattcctgaatagctaaaaccgtggcttgttgatgactgggacttaattaccaggcaaaaacagctcttttatcttcctgccaagaagaatgtggattccattcttgaggattatgcaaattacaagaaatctcgtggaaacacagataataaggagtatgcggttaatgaagttgtggcagggataaaagaatacttcaacgtaatgttgggtacccagctactctataaatttgagagaccacagtatgccgaaattcttgcagatcatcccgatgcacccatgtcccaggtgtatggagcgccacatctcctgagattatttgtacgaattggagcaatgttggcctatacacctctggatgagaagagccttgctttattactcaattatcttcacgatttcctaaagtacctggcaaagaattctgcaactttgtttagtgccagcgattatgaagtggctcctcctgagtaccatcggaaagctgtgtgagaggcactctcactcacttatgtttggatctccgtaaacacatttttgttcttagtctatctcttgtacaaacaatgtgctttgaagatgttagtgtataacaattgatgtttgttttctgtttgattttaaacagagaaaataaaaggggtaatagctccttttttcttttctttttttttttcatttcaaagttgctgccagtgttttcaatgatggacaacagagggatatgctgtagagtgttttattgcctagttgacaaagctgcttttgaatgctggtggttctattcctttgacactacgctataaaacactctacaccatattaccctgcttagagttttcaatacaaagtggatcaaaactacatgctcagtcaacagtggactgcacagtgtgaattatgccaaataaatttaaaacgtagacacaggcacacacatggagctgcaaagggagttatgacatttacatttaggagtagtgggttgtgggttgtggctttggaatgacttggaaataattttggctggagagaaaaggttatattgtagagaactttgagagtcagcccgagattgaatttcctgcctatga

SEQ ID NO: 441068 - DNA, 1132 bp, Homo sapiens
tggcgcggaagcaggacccgaagcctaaattccaggagggtgagcgagtgctgtgctttcatgggcctcttctttatgaagcaaagtgtgtaaaggttgccataaaggacaaacaagtgaaatacttcatacattacagtggttggaataaaaattgggatgaatgggttccggagagcagagtactcaaatacgtggacaccaatttgcagaaacagcgagaacttcaaaaagccaatcaggagcagtatgcagaggggaagatgagaggggctgccccaggaaagaagacatctggtctgcaacagaaaaatgttgaagtgaaaacgaaaaagaacaaacatctcctgagattatttgtacgaattggagcaatgttggcctatacacctctggatgagaagagccttgctttattactcaattatcttcacgatttcctaaagtacctggcaaagaattctgcaactttgtttagtgccagcgattatgaagtggctcctcctgagtaccatcggaaagctgtgtgagaggcactctcactcacttatgtttggatctccgtaaacacatttttgttcttagtctatctcttgtacaaacaatgtgctttgaagatgttagtgtataacaattgatgtttgttttctgtttgattttaaacagagaaaataaaaggggtaatagctccttttttcttttctttttttttttcatttcaaagttgctgccagtgttttcaatgatggacaacagagggatatgctgtagagtgttttattgcctagttgacaaagctgcttttgaatgctggtggttctattcctttgacactacgctataaaacactctacaccatattaccctgcttagagttttcaatacaaagtggatcaaaactacatgctcagtcaacagtggactgcacagtgtgaattatgccaaataaatttaaaacgtagacacaggcacacacatggagctgcaaagggagttatgacatttacatttaggagtagtgggttgtgggttgtggctttggaatgacttggaaataattttggctggagagaaaaggttatattgtagagaactttgagagtcagcccgagattgaatttcctgcctatga

SEQ ID NO: 441069 - DNA, 2743 bp, Homo sapiens
aaagaggctttctcaccagccaaagttcaggtactgcccctgtctgagtttggacatgtggcccacagatgccagctgggggctggaatactgtaccttgatcttagggcctggaaaaatcaggtaggtaactctctggtcctaggtggaggtgtaggggaggttgggccagggatgccttcactgtgtctctctggtcttgccaccccagaccgagggacacacaggcactgctgtctgcaacacaagcaatggacctgcggaggcgagactaccacatggaacggccgctgctgaaccaggagcatttggaggagctggggcgctggggctcagcacctaggacccaccagtggcggacctggttgcagtgctcccgtgctcgggcctatgcccttctgctccaacacctcccggttttggtctggttaccccggtatcctgtgcgtgactggctcctgggtgacctgttatccggcctgagtgtggccatcatgcagcttccgcagggcttggcctacgccctcctggctggattgccccccgtgtttggcctctatagctccttctaccctgtcttcatctacttcctgtttggcacttcccggcacatctccgtggggacctttgctgtcatgtctgtgatggtgggcagtgtgacagaatccctggccccgcaggccttgaacgactccatgatcaatgagacagccagagatgctgcccgggtacaggtggcctccacactcagtgtcctggttggcctcttccaggtggggctgggcctgatccacttcggcttcgtggtcacctacctgtcagaacctcttgtccgaggctataccacagctgcagctgtgcaggtcttcgtctcacagctcaagtatgtgtttggcctccatctgagcagccactctgggccactgtccctcatctatacagtgctggaggtctgctggaagctgccccagagcaaggttggcaccgtggtcactgcagctgtggctggggtggtgctcgtggtggtgaagctgttgaatgacaagctgcagcagcagctgcccatgccgatacccggggagctgctcacgctcatcggggccacaggcatctcctatggcatgggtctaaagcacagatttgaggtagatgtcgtgggcaacatccctgcagggctggtgcccccagtggcccccaacacccagctgttctcaaagctcgtgggcagcgccttcaccatcgctgtggttgggtttgccattgccatctcactggggaagatcttcgccctgaggcacggctaccgggtggacagcaaccaggagctggtggccctgggcctcagtaaccttatcggaggcatcttccagtgcttccccgtgagttgctctatgtctcggagcctggtacaggagagcaccgggggcaactcgcaggttgctggagccatctcttcccttttcatcctcctcatcattgtcaaacttggggaactcttccatgacctgcccaaggcggtcctggcagccatcatcattgtgaacctgaagggcatgctgaggcagctcagcgacatgcgctccctctggaaggccaatcgggcggatctgcttatctggctggtgaccttcacggccaccatcttgctgaacctggaccttggcttggtggttgcggtcatcttctccctgctgctcgtggtggtccggacacagatgccccactactctgtcctggggcaggtgccagacacggatatttacagagatgtggcagagtactcagaggccaaggaagtccggggggtgaaggtcttccgctcctcggccaccgtgtactttgccaatgctgagttctacagtgatgcgctgaagcagaggtgtggtgtggatgtcgacttcctcatctcccagaagaagaaactgctcaagaagcaggagcagctgaagctgaagcaactgcagaaagaggagaagcttcggaaacaggctgcctcccccaagggcgcctcagtttccattaatgtcaacaccagccttgaagacatgaggagcaacaacgttgaggactgcaagatgatgagcaggtgagctcaggagataagatggaagatgcaacagccaatggtcaagaagactccaaggccccagatgggtccacactgaaggccctgggcctgcctcagccagacttccacagcctcatcctggacctgggtgccctctcctttgtggacactgtgtgcctcaagagcctgaagaatattttccatgacttccgggagattgaggtggaggtgtacatggcggcctgccacagccctgtggtcagccagcttgaggctgggcacttcttcgatgcatccatcaccaagaagcatctctttgcctctgtccatgatgctgtcacctttgccctccaacacccgaggcctgtccccgacagccctgtttcggtcaccagactctgaacatgctacatcctgcccaagactgcacctctggaggtgcagggcacccttgagaagcccctcacccctaggccgcctccaggtgctacccaggagtcccctccatgtacacacacacaactcagggaaggaggtcctgggactccaagttcagcgctccaggtctgggacagggcctgcatgcagtcaggctggcagtggcgcggtacagggagggaactggtgcatattttagcctcaggaataaagatttgtctgctcaaaaaaaaaaaa

SEQ ID NO: 441070 - DNA, 2630 bp, Homo sapiens
cggcgccgccttccggagcgtagcggcctctagctcgagcagcaggagcagcccgcaccggacaacttgcgagccatggggctggcggatgcgtcgggaccgagggacacacaggcactgctgtctgcaacacaagcaatggacctgcggaggcgagactaccacatggaacggccgctgctgaaccaggagcatttggaggagctggggcgctggggctcagcacctaggacccaccagtggcggacctggttgcagtgctcccgtgctcgggcctatgcccttctgctccaacacctcccggttttggtctggttaccccggtatcctgtgcgtgactggctcctgggtgacctgttatccggcctgagtgtggccatcatgcagcttccgcagggcttggcctacgccctcctggctggattgccccccgtgtttggcctctatagctccttctaccctgtcttcatctacttcctgtttggcacttcccggcacatctccgtggggacctttgctgtcatgtctgtgatggtgggcagtgtgacagaatccctggccccgcaggccttgaacgactccatgatcaatgagacagccagagatgctgcccgggtacaggtggcctccacactcagtgtcctggttggcctcttccaggtggggctgggcctgatccacttcggcttcgtggtcacctacctgtcagaacctcttgtccgaggctataccacagctgcagctgtgcaggtcttcgtctcacagctcaagtatgtgtttggcctccatctgagcagccactctgggccactgtccctcatctatacagtgctggaggtctgctggaagctgccccagagcaaggttggcaccgtggtcactgcagctgtggctggggtggtgctcgtggtggtgaagctgttgaatgacaagctgcagcagcagctgcccatgccgatacccggggagctgctcacgctcatcggggccacaggcatctcctatggcatgggtctaaagcacagatttgaggtagatgtcgtgggcaacatccctgcagggctggtgcccccagtggcccccaacacccagctgttctcaaagctcgtgggcagcgccttcaccatcgctgtggttgggtttgccattgccatctcactggggaagatcttcgccctgaggcacggctaccgggtggacagcaaccaggagctggtggccctgggcctcagtaaccttatcggaggcatcttccagtgcttccccgtgagttgctctatgtctcggagcctggtacaggagagcaccgggggcaactcgcaggttgctggagccatctcttcccttttcatcctcctcatcattgtcaaacttggggaactcttccatgacctgcccaaggcggtcctggcagccatcatcattgtgaacctgaagggcatgctgaggcagctcagcgacatgcgctccctctggaaggccaatcgggcggatctgcttatctggctggtgaccttcacggccaccatcttgctgaacctggaccttggcttggtggttgcggtcatcttctccctgctgctcgtggtggtccggacacagatgccccactactctgtcctggggcaggtgccagacacggatatttacagagatgtggcagagtactcagaggccaaggaagtccggggggtgaaggtcttccgctcctcggccaccgtgtactttgccaatgctgagttctacagtgatgcgctgaagcagaggtgtggtgtggatgtcgacttcctcatctcccagaagaagaaactgctcaagaagcaggagcagctgaagctgaagcaactgcagaaagaggagaagcttcggaaacaggctgcctcccccaagggcgcctcagtttccattaatgtcaacaccagccttgaagacatgaggagcaacaacgttgaggactgcaagatgatgagcaggtgagctcaggagataagatggaagatgcaacagccaatggtcaagaagactccaaggccccagatgggtccacactgaaggccctgggcctgcctcagccagacttccacagcctcatcctggacctgggtgccctctcctttgtggacactgtgtgcctcaagagcctgaagaatattttccatgacttccgggagattgaggtggaggtgtacatggcggcctgccacagccctgtggtcagccagcttgaggctgggcacttcttcgatgcatccatcaccaagaagcatctctttgcctctgtccatgatgctgtcacctttgccctccaacacccgaggcctgtccccgacagccctgtttcggtcaccagactctgaacatgctacatcctgcccaagactgcacctctggaggtgcagggcacccttgagaagcccctcacccctaggccgcctccaggtgctacccaggagtcccctccatgtacacacacacaactcagggaaggaggtcctgggactccaagttcagcgctccaggtctgggacagggcctgcatgcagtcaggctggcagtggcgcggtacagggagggaactggtgcatattttagcctcaggaataaagatttgtctgctcaaaaaaaaaaaa

SEQ ID NO: 441071 - DNA, 400 bp, Homo sapiens
ccccagtgggcccagtgctttctccgctgtctttggataaagctgttctaggggcgggggttggtctgtgtcctttggaaactgactagagcctcccctcctctgcctgctcgtcaccagactctgaacatgctacatcctgcccaagactgcacctctggaggtgcagggcacccttgagaagcccctcacccctaggccgcctccaggtgctacccaggagtcccctccatgtacacacacacaactcagggaaggaggtcctgggactccaagttcagcgctccaggtctgggacagggcctgcatgcagtcaggctggcagtggcgcggtacagggagggaactggtgcatattttagcctcaggaataaagatttgtctgctcaaaaaaaaaaaa

SEQ ID NO: 441072 - DNA, 2601 bp, Homo sapiens
cggcgccgccttccggagcgtagcggcctctagctcgagcagcaggagcagcccgcaccggacaacttgcgagccatggggctggcggatgcgtcgggaccgagggacacacaggcactgctgtctgcaacacaagcaatggacctgcggaggcgagactaccacatggaacggccgctgctgaaccaggagcatttggaggagctggggcgctggggctcagcacctaggacccaccagtggcggacctggttgcagtgctcccgtgctcgggcctatgcccttctgctccaacacctcccggttttggtctggttaccccggtatcctgtgcgtgactggctcctgggtgacctgttatccggcctgagtgtggccatcatgcagcttccgcagggcttggcctacgccctcctggctggattgccccccgtgtttggcctctatagctccttctaccctgtcttcatctacttcctgtttggcacttcccggcacatctccgtggggacctttgctgtcatgtctgtgatggtgggcagtgtgacagaatccctggccccgcaggccttgaacgactccatgatcaatgagacagccagagatgctgcccgggtacaggtggcctccacactcagtgtcctggttggcctcttccaggtggggctgggcctgatccacttcggcttcgtggtcacctacctgtcagaacctcttgtccgaggctataccacagctgcagctgtgcaggtcttcgtctcacagctcaagtatgtgtttggcctccatctgagcagccactctgggccactgtccctcatctatacagtgctggaggtctgctggaagctgccccagagcaaggttggcaccgtggtcactgcagctgtggctggggtggtgctcgtggtggtgaagctgttgaatgacaagctgcagcagcagctgcccatgccgatacccggggagctgctcacgctcatcggggccacaggcatctcctatggcatgggtctaaagcacagatttgaggctggtgcccccagtggcccccaacacccagctgttctcaaagctcgtgggcagcgccttcaccatcgctgtggttgggtttgccattgccatctcactggggaagatcttcgccctgaggcacggctaccgggtggacagcaaccaggagctggtggccctgggcctcagtaaccttatcggaggcatcttccagtgcttccccgtgagttgctctatgtctcggagcctggtacaggagagcaccgggggcaactcgcaggttgctggagccatctcttcccttttcatcctcctcatcattgtcaaacttggggaactcttccatgacctgcccaaggcggtcctggcagccatcatcattgtgaacctgaagggcatgctgaggcagctcagcgacatgcgctccctctggaaggccaatcgggcggatctgcttatctggctggtgaccttcacggccaccatcttgctgaacctggaccttggcttggtggttgcggtcatcttctccctgctgctcgtggtggtccggacacagatgccccactactctgtcctggggcaggtgccagacacggatatttacagagatgtggcagagtactcagaggccaaggaagtccggggggtgaaggtcttccgctcctcggccaccgtgtactttgccaatgctgagttctacagtgatgcgctgaagcagaggtgtggtgtggatgtcgacttcctcatctcccagaagaagaaactgctcaagaagcaggagcagctgaagctgaagcaactgcagaaagaggagaagcttcggaaacaggctgcctcccccaagggcgcctcagtttccattaatgtcaacaccagccttgaagacatgaggagcaacaacgttgaggactgcaagatgatgagcaggtgagctcaggagataagatggaagatgcaacagccaatggtcaagaagactccaaggccccagatgggtccacactgaaggccctgggcctgcctcagccagacttccacagcctcatcctggacctgggtgccctctcctttgtggacactgtgtgcctcaagagcctgaagaatattttccatgacttccgggagattgaggtggaggtgtacatggcggcctgccacagccctgtggtcagccagcttgaggctgggcacttcttcgatgcatccatcaccaagaagcatctctttgcctctgtccatgatgctgtcacctttgccctccaacacccgaggcctgtccccgacagccctgtttcggtcaccagactctgaacatgctacatcctgcccaagactgcacctctggaggtgcagggcacccttgagaagcccctcacccctaggccgcctccaggtgctacccaggagtcccctccatgtacacacacacaactcagggaaggaggtcctgggactccaagttcagcgctccaggtctgggacagggcctgcatgcagtcaggctggcagtggcgcggtacagggagggaactggtgcatattttagcctcaggaataaagatttgtctgctcaaaaaaaaaaaa

SEQ ID NO: 441073 - DNA, 2567 bp, Homo sapiens
cggcgccgccttccggagcgtagcggcctctagctcgagcagcaggagcagcccgcaccggacaacttgcgagccatggggctggcggatgcgtcgggaccgagggacacacaggcactgctgtctgcaacacaagcaatggacctgcggaggcgagactaccacatggaacggccgctgctgaaccaggagcatttggaggagctggggcgctggggctcagcacctaggacccaccagtggcggacctggttgcagtgctcccgtgctcgggcctatgcccttctgctccaacacctcccggttttggtctggttaccccggtatcctgtgcgtgactggctcctgggtgacctgttatccggcctgagtgtggccatcatgcagcttccgcagggcttggcctacgccctcctggctggattgccccccgtgtttggcctctatagctccttctaccctgtcttcatctacttcctgtttggcacttcccggcacatctccgtggggacctttgctgtcatgtctgtgatggtgggcagtgtgacagaatccctggccccgcaggccttgaacgactccatgatcaatgagacagccagagatgctgcccgggtacaggtggcctccacactcagtgtcctggttggcctcttccaggtggggctgggcctgatccacttcggcttcgtggtcacctacctgtcagaacctcttgtccgaggctataccacagctgcagctgtgcaggtcttcgtctcacagctcaagtatgtgtttggcctccatctgagcagccactctgggccactgtccctcatctatacagtgctggaggtctgctggaagctgccccagagcaaggttggcaccgtggtcactgcagctgtggctggggtggtgctcgtggtggtgaagctgttgaatgacaagctgcagcagcagctgcccatgccgatacccggggagctgctcacgctcatcggggccacaggcatctcctatggcatgggtctaaagcacagatttgaggtagatgtcgtgggcaacatccctgcagggctggtgcccccagtggcccccaacacccagctgttctcaaagctcgtgggcagcgccttcaccatcgctgtggttgggtttgccattgccatctcactggggaagatcttcgccctgaggcacggctaccgggtggacagcaaccaggagctggtggccctgggcctcagtaaccttatcggaggcatcttccagtgcttccccgtgagttgctctatgtctcggagcctggtacaggagagcaccgggggcaactcgcaggttgctggagccatctcttcccttttcatcctcctcatcattgtcaaacttggggaactcttccatgacctgcccaaggcggtcctggcagccatcatcattgtgaacctgaagggcatgctgaggcagctcagcgacatgcgctccctctggaaggccaatcgggcggatctgcttatctggctggtgaccttcacggccaccatcttgctgaacctggaccttggcttggtggttgcggtcatcttctccctgctgctcgtggtggtccggacacagatgccccactactctgtcctggggcaggtgccagacacggatatttacagagatgtggcagagtactcagaggccaaggaagtccggggggtgaaggtcttccgctcctcggccaccgtgtactttgccaatgctgagttctacagtgatgcgctgaagcagaggtgtggtgtggatgtcgacttcctcatctcccagaagaagaaactggctgcctcccccaagggcgcctcagtttccattaatgtcaacaccagccttgaagacatgaggagcaacaacgttgaggactgcaagatgatgagcaggtgagctcaggagataagatggaagatgcaacagccaatggtcaagaagactccaaggccccagatgggtccacactgaaggccctgggcctgcctcagccagacttccacagcctcatcctggacctgggtgccctctcctttgtggacactgtgtgcctcaagagcctgaagaatattttccatgacttccgggagattgaggtggaggtgtacatggcggcctgccacagccctgtggtcagccagcttgaggctgggcacttcttcgatgcatccatcaccaagaagcatctctttgcctctgtccatgatgctgtcacctttgccctccaacacccgaggcctgtccccgacagccctgtttcggtcaccagactctgaacatgctacatcctgcccaagactgcacctctggaggtgcagggcacccttgagaagcccctcacccctaggccgcctccaggtgctacccaggagtcccctccatgtacacacacacaactcagggaaggaggtcctgggactccaagttcagcgctccaggtctgggacagggcctgcatgcagtcaggctggcagtggcgcggtacagggagggaactggtgcatattttagcctcaggaataaagatttgtctgctcaaaaaaaaaaaa

SEQ ID NO: 441074 - DNA, 1797 bp, Homo sapiens
tgacagcatctccccatagccgaaatggtgttgcctgtctctcaccctacgtgactttttcccaccctcgaagaaggttttgcccagtatctccctcctcacctcacagtggtttatgtgtccccctgaccatggtgccagcacctgcctccctgactctgtcctctcccacagctcatcggggccacaggcatctcctatggcatgggtctaaagcacagatttgaggctggtgcccccagtggcccccaacacccagctgttctcaaagctcgtgggcagcgccttcaccatcgctgtggttgggtttgccattgccatctcactggggaagatcttcgccctgaggcacggctaccgggtggacagcaaccaggagctggtggccctgggcctcagtaaccttatcggaggcatcttccagtgcttccccgtgagttgctctatgtctcggagcctggtacaggagagcaccgggggcaactcgcaggttgctggagccatctcttcccttttcatcctcctcatcattgtcaaacttggggaactcttccatgacctgcccaaggcggtcctggcagccatcatcattgtgaacctgaagggcatgctgaggcagctcagcgacatgcgctccctctggaaggccaatcgggcggatctgcttatctggctggtgaccttcacggccaccatcttgctgaacctggaccttggcttggtggttgcggtcatcttctccctgctgctcgtggtggtccggacacagatgccccactactctgtcctggggcaggtgccagacacggatatttacagagatgtggcagagtactcagaggccaaggaagtccggggggtgaaggtcttccgctcctcggccaccgtgtactttgccaatgctgagttctacagtgatgcgctgaagcagaggtgtggtgtggatgtcgacttcctcatctcccagaagaagaaactgctcaagaagcaggagcagctgaagctgaagcaactgcagaaagaggagaagcttcggaaacaggctgcctcccccaagggcgcctcagtttccattaatgtcaacaccagccttgaagacatgaggagcaacaacgttgaggactgcaagatgatgagcaggtgagctcaggagataagatggaagatgcaacagccaatggtcaagaagactccaaggccccagatgggtccacactgaaggccctgggcctgcctcagccagacttccacagcctcatcctggacctgggtgccctctcctttgtggacactgtgtgcctcaagagcctgaagaatattttccatgacttccgggagattgaggtggaggtgtacatggcggcctgccacagccctgtggtcagccagcttgaggctgggcacttcttcgatgcatccatcaccaagaagcatctctttgcctctgtccatgatgctgtcacctttgccctccaacacccgaggcctgtccccgacagccctgtttcggtcaccagactctgaacatgctacatcctgcccaagactgcacctctggaggtgcagggcacccttgagaagcccctcacccctaggccgcctccaggtgctacccaggagtcccctccatgtacacacacacaactcagggaaggaggtcctgggactccaagttcagcgctccaggtctgggacagggcctgcatgcagtcaggctggcagtggcgcggtacagggagggaactggtgcatattttagcctcaggaataaagatttgtctgctcaaaaaaaaaaaa

SEQ ID NO: 441075 - DNA, 2452 bp, Homo sapiens
cggcgccgccttccggagcgtagcggcctctagctcgagcagcaggagcagcccgcaccggacaacttgcgagccatggggctggcggatgcgtcgggaccgagggacacacaggcactgctgtctgcaacacaagcaatggacctgcggaggcgagactaccacatggaacggccgctgctgaaccaggagcatttggaggagctggggcgctggggctcagcacctaggacccaccagtggcggacctggttgcagtgctcccgtgctcgggcctatgcccttctgctccaacacctcccggttttggtctggttaccccggtatcctgtgcgtgactggctcctgggtgacctgttatccggcctgagtgtggccatcatgcagcttccgcagggcttggcctacgccctcctggctggattgccccccgtgtttggcctctatagctccttctaccctgtcttcatctacttcctgtttggcacttcccggcacatctccgtggggacctttgctgtcatgtctgtgatggtgggcagtgtgacagaatccctggccccgcaggccttgaacgactccatgatcaatgagacagccagagatgctgcccgggtacaggtggcctccacactcagtgtcctggttggcctcttccaggtggggctgggcctgatccacttcggcttcgtggtcacctacctgtcagaacctcttgtccgaggctataccacagctgcagctgtgcaggtcttcgtctcacagctcaagtatgtgtttggcctccatctgagcagccactctgggccactgtccctcatctatacagtgctggaggtctgctggaagctgccccagagcaaggttggcaccgtggtcactgcagctgtggctggggtggtgctcgtggtggtgaagctgttgaatgacaagctgcagcagcagctgcccatgccgatacccggggagctgctcacgctcatcggggccacaggcatctcctatggcatgggtctaaagcacagatttgaggtagatgtcgtgggcaacatccctgcagggctggtgcccccagtggcccccaacacccagctgttctcaaagctcgtgggcagcgccttcaccatcgctgtggttgggtttgccattgccatctcactggggaagatcttcgccctgaggcacggctaccgggtggacagcaaccaggagctggtggccctgggcctcagtaaccttatcggaggcatcttccagtgcttccccgtgagttgctctatgtctcggagcctggtacaggagagcaccgggggcaactcgcaggttgctggagccatctcttcccttttcatcctcctcatcattgtcaaacttggggaactcttccatgacctgcccaaggcggtcctggcagccatcatcattgtgaacctgaagggcatgctgaggcagctcagcgacatgcgctccctctggaaggccaatcgggcggatctgcttatctggctggtgaccttcacggccaccatcttgctgaacctggaccttggcttggtggttgcggtcatcttctccctgctgctcgtggtggtccggacacagatgccccactactctgtcctggggcaggtgccagacacggatatttacagagatgtggcagagtactcagaggccaaggaagtccggggggtgaaggtcttccgctcctcggccaccgtgtactttgccaatgctgagttctacagtgatgcgctgaagcagaggtgtggtgtggatgtcgacttcctcatctcccagaagaagaaactgctcaagaagcaggagcagctgaagctgaagcaactgcagaaagaggagaagcttcggaaacaggctgcctcccccaagggcgcctcagtttccattaatgtcaacaccagccttgaagacatgaggagcaacaacgttgaggactgcaagatgatgagcaggtgagctcaggagataagatggaagatgcaacagccaatggtcaagaagactccaaggccccagatgggtccacactgaaggccctgggcctgcctcagccagacttccacagcctcatcctggacctgggtgccctctcctttgtggacactgtgtgcctcaagagcctgaagaatattttccatgacttccgggagattgaggtggaggtgtacatggcggcctgccacagccctgtggtcagccagcttgaggctgggcacttcttcgatgcatccatcaccaagaagcatctctttgcctctctccatgtacacacacacaactcagggaaggaggtcctgggactccaagttcagcgctccaggtctgggacagggcctgcatgcagtcaggctggcagtggcgcggtacagggagggaactggtgcatattttagcctcaggaataaagatttgtctgctcaaaaaaaaaaaa

SEQ ID NO: 441076 - DNA, 2094 bp, Homo sapiens
cggcgccgccttccggagcgtagcggcctctagctcgagcagcaggagcagcccgcaccggacaacttgcgagccatggggctggcggatgcgtcgggaccgagggacacacaggcactgctgtctgcaacacaagcaatggacctgcggaggcgagactaccacatggaacggccgctgctgaaccaggagcatttggaggagctggggcgctggggctcagcacctaggacccaccagtggcggacctggttgcagtgctcccgtgctcgggcctatgcccttctgctccaacacctcccggttttggtctggttaccccggtatcctgtgcgtgactggctcctgggtgacctgttatccggcctgagtgtggccatcatgcagcttccgcagggcttggcctacgccctcctggctggattgccccccgtgtttggcctctatagctccttctaccctgtcttcatctacttcctgtttggcacttcccggcacatctccgtggggacctttgctgtcatgtctgtgatggtgggcagtgtgacagaatccctggccccgcaggccttgaacgactccatgatcaatgagacagccagagatgctgcccgggtacaggtggcctccacactcagtgtcctggttggcctcttccaggtggggctgggcctgatccacttcggcttcgtggtcacctacctgtcagaacctcttgtccgaggctataccacagctgcagctgtgcaggtcttcgtctcacagctcaagtatgtgtttggcctccatctgagcagccactctgggccactgtccctcatctatacagtgctggaggtctgctggaagctgccccagagcaaggttggcaccgtggtcactgcagctgtggctggggtggtgctcgtggtggtgaagctgttgaatgacaagctgcagcagcagctgcccatgccgatacccggggagctgctcacgctcatcggggccacaggcatctcctatggcatgggtctaaagcacagatttgaggtagatgtcgtgggcaacatccctgcagggctggtgcccccagtggcccccaacacccagctgttctcaaagctcgtgggcagcgccttcaccatcgctgtggttgggtttgccattgccatctcactggggaagatcttcgccctgaggcacggctaccgggtggacagcaaccaggagctggtggccctgggcctcagtaaccttatcggaggcatcttccagtgcttccccgtgagttgctctatgtctcggagcctggtacaggagagcaccgggggcaactcgcaggttgctggagccatctcttcccttttcatcctcctcatcattgtcaaacttggggaactcttccatgacctgcccaaggcggtcctggcagccatcatcattgtgaacctgaagggcatgctgaggcagctcagcgacatgcgctccctctggaaggccaatcgggcggatctgcttatctggctggtgaccttcacggccaccatcttgctgaacctggaccttggcttggtggttgcggtcatcttctccctgctgctcgtggtggtccggacacagatgccccactactctgtcctggggcaggtgccagacacggatatttacagagatgtggcagagtactcagaggccaaggaagtccggggggtgaaggtcttccgctcctcggccaccgtgtactttgccaatgctgagttctacagtgatgcgctgaagcagaggtgtggtgtggatgtcgacttcctcatctcccagaagaagaaactgctcaagaagcaggagcagctgaagctgaagcaactgcagaaagaggagaagcttcggaaacaggctgcctcccccaagggcgcctcagtttccattaatgtcaacaccagccttgaagacatgaggagcaacaacgttgaggactgcaagatgatggtgagactggaggtgggaaaggaggtgacagctgtgagctgcagagatgcaggatccacatgtctcatgaggaatgccatggacccagcagctgtgggctcgagggtgttgcgccgatggcaggag

SEQ ID NO: 441077 - DNA, 658 bp, Homo sapiens
cactagggaaggaaaggcaggagaacaggatgcagccaggagagaggagattcagccaccaccagttctgcctcatccccaggccaaggaagtccggggggtgaaggtcttccgctcctcggccaccgtgtactttgccaatgctgagttctacagtgatgcgctgaagcagagggtgagacggagtccccaggatgggtgtcaggccccagctcccagagagctcaccaacccttctctgatgtttgcctccagtgtggtgtggatgtcgacttcctcatctcccagaagaagaaactgctcaagaagcaggagcagctgaagctgaagcaactgcagaaagaggagaagcttcggaaacaggcagggccccttttgtctggtgacccccatctcctgccccctgttccctgccccagcctttctcctggcccccgactcctccctcgtcctcactcctcatcccttcccctttctccctcatgctcccagggaccctgcttcactcccctagcaggtccgggctctaggcagcattttctctcccatcatctgaaccagtgacagtgagaaccgtcacagtcctcttccctttcacggctgttccaggagcttcagcctggctgctgcaggtcccacagcttctggtcctggccca

SEQ ID NO: 441078 - DNA, 1171 bp, Homo sapiens
ggagctcggggctgcagtgcgctctaatggtgcctgtgaataaccactgcattcagcctgggcaatgaagcgagaccccgtctctaaaaaaaaaattgaggggtcaaagaggatgccaaacttaattagagactgagacagggcagggtgccgaggtgtctgcatgcgtttcatgtggatgcccgtgtctattctggcctgctcctgggccccctccccactcagccctggctgatgagaatgggacagggactcccttctcgtgtccctgtgcagcgtcggcccaggaggtagcagagcagtatatgcacatctgggtgtgccctcctgcatgtccccacacatctgtcattcctgtctttgcacacctatgtgactcccgcatgtttgtgtccttatgtgtcccatgcatgctccccatctgaccttgcgtgttctcgcgtgtctgtgtgcggccagtcctgccttcactctctcatgggtggccctggcagcatgtctggctccccagcaggtgagctcaggagataagatggaagatgcaacagccaatggtcaagaagactccaaggccccagatgggtccacactgaaggccctgggcctgcctcagccagacttccacagcctcatcctggacctgggtgccctctcctttgtggacactgtgtgcctcaagagcctgaagaatattttccatgacttccgggagattgaggtggaggtgtacatggcggcctgccacagccctgtggtcagccagcttgaggctgggcacttcttcgatgcatccatcaccaagaagcatctctttgcctctgtccatgatgctgtcacctttgccctccaacacccgaggcctgtccccgacagccctgtttcggtcaccagactctgaacatgctacatcctgcccaagactgcacctctggaggtgcagggcacccttgagaagcccctcacccctaggccgcctccaggtgctacccaggagtcccctccatgtacacacacacaactcagggaaggaggtcctgggactccaagttcagcgctccaggtctgggacagggcctgcatgcagtcaggctggcagtggcgcggtacagggagggaactggtgcatattttagcctcaggaataaagatttgtctgctcaaaaaaaaaaaa

SEQ ID NO: 441079 - DNA, 2556 bp, Homo sapiens
cggcgccgccttccggagcgtagcggcctctagctcgagcagcaggagcagcccgcaccggacaacttgcgagccatggggctggcggatgcgtcgggaccgagggacacacaggcactgctgtctgcaacacaagcaatggacctgcggaggcgagactaccacatggaacggccgctgctgaaccaggagcatttggaggagctggggcgctggggctcagcacctaggacccaccagtggcggacctggttgcagtgctcccgtgctcgggcctatgcccttctgctccaacacctcccggttttggtctggttaccccggtatcctgtgcgtgactggctcctgggtgacctgttatccggcctgagtgtggccatcatgcagcttccgcagggcttggcctacgccctcctggctggattgccccccgtgtttggcctctatagctccttctaccctgtcttcatctacttcctgtttggcacttcccggcacatctccgtggggacctttgctgtcatgtctgtgatggtgggcagtgtgacagaatccctggccccgcaggccttgaacgactccatgatcaatgagacagccagagatgctgcccgggtacaggtggcctccacactcagtgtcctggttggcctcttccaggtggggctgggcctgatccacttcggcttcgtggtcacctacctgtcagaacctcttgtccgaggctataccacagctgcagctgtgcaggtcttcgtctcacagctcaagtatgtgtttggcctccatctgagcagccactctgggccactgtccctcatctatacagtgctggaggtctgctggaagctgccccagagcaaggttggcaccgtggtcactgcagctgtggctggggtggtgctcgtggtggtgaagctgttgaatgacaagctgcagcagcagctgcccatgccgatacccggggagctgctcacgctcatcggggccacaggcatctcctatggcatgggtctaaagcacagatttgaggtagatgtcgtgggcaacatccctgcagggctggtgcccccagtggcccccaacacccagctgttctcaaagctcgtgggcagcgccttcaccatcgctgtggttgggtttgccattgccatctcactggggaagatcttcgccctgaggcacggctaccgggtggacagcaaccaggagctggtggccctgggcctcagtaaccttatcggaggcatcttccagtgcttccccgtgagttgctctatgtctcggagcctggtacaggagagcaccgggggcaactcgcaggttgctggagccatctcttcccttttcatcctcctcatcattgtcaaacttggggaactcttccatgacctgcccaaggcggtcctggcagccatcatcattgtgaacctgaagggcatgctgaggcagctcagcgacatgcgctccctctggaaggccaatcgggcggatctgcttatctggctggtgaccttcacggccaccatcttgctgaacctggaccttggcttggtggttgcggtcatcttctccctgctgctcgtggtggtccggacacagatgccccactactctgtcctggggcaggtgccagacacggatatttacagagatgtggcagagtactcagaggccaaggaagtccggggggtgaaggtcttccgctcctcggccaccgtgtactttgccaatgctgagttctacagtgatgcgctgaagcagaggtgtggtgtggatgtcgacttcctcatctcccagaagaagaaactgctcaagaagcaggagcagctgaagctgaagcaactgcagaaagaggagaagcttcggaaacaggcagggccccttttgtctgagcaggtgagctcaggagataagatggaagatgcaacagccaatggtcaagaagactccaaggccccagatgggtccacactgaaggccctgggcctgcctcagccagacttccacagcctcatcctggacctgggtgccctctcctttgtggacactgtgtgcctcaagagcctgaagaatattttccatgacttccgggagattgaggtggaggtgtacatggcggcctgccacagccctgtggtcagccagcttgaggctgggcacttcttcgatgcatccatcaccaagaagcatctctttgcctctgtccatgatgctgtcacctttgccctccaacacccgaggcctgtccccgacagccctgtttcggtcaccagactctgaacatgctacatcctgcccaagactgcacctctggaggtgcagggcacccttgagaagcccctcacccctaggccgcctccaggtgctacccaggagtcccctccatgtacacacacacaactcagggaaggaggtcctgggactccaagttcagcgctccaggtctgggacagggcctgcatgcagtcaggctggcagtggcgcggtacagggagggaactggtgcatattttagcctcaggaataaagatttgtctgctcaaaaaaaaaaaa

SEQ ID NO: 441080 - DNA, 2761 bp, Homo sapiens
cggcgccgccttccggagcgtagcggcctctagctcgagcagcaggagcagcccgcaccggacaacttgcgagccatggggctggcggatgcgtcgggaccgagggacacacaggcactgctgtctgcaacacaagcaatggacctgcggaggcgagactaccacatggaacggccgctgctgaaccaggagcatttggaggagctggggcgctggggctcagcacctaggacccaccagtggcggacctggttgcagtgctcccgtgctcgggcctatgcccttctgctccaacacctcccggttttggtctggttaccccggtatcctgtgcgtgactggctcctgggtgacctgttatccggcctgagtgtggccatcatgcagcttccgcagggcttggcctacgccctcctggctggattgccccccgtgtttggcctctatagctccttctaccctgtcttcatctacttcctgtttggcacttcccggcacatctccgtggggacctttgctgtcatgtctgtgatggtgggcagtgtgacagaatccctggccccgcaggccttgaacgactccatgatcaatgagacagccagagatgctgcccgggtacaggtggcctccacactcagtgtcctggttggcctcttccaggtggggctgggcctgatccacttcggcttcgtggtcacctacctgtcagaacctcttgtccgaggctataccacagctgcagctgtgcaggtcttcgtctcacagctcaagtatgtgtttggcctccatctgagcagccactctgggccactgtccctcatctatacagtgctggaggtctgctggaagctgccccagagcaaggttggcaccgtggtcactgcagctgtggctggggtggtgctcgtggtggtgaagctgttgaatgacaagctgcagcagcagctgcccatgccgatacccggggagctgctcacgctcatcggggccacaggcatctcctatggcatgggtctaaagcacagatttgaggctggtgcccccagtggcccccaacacccagctgttctcaaagctcgtgggcagcgccttcaccatcgctgtggttgggtttgccattgccatctcactggggaagatcttcgccctgaggcacggctaccgggtggacagcaaccaggagctggtggccctgggcctcagtaaccttatcggaggcatcttccagtgcttccccgtgagttgctctatgtctcggagcctggtacaggagagcaccgggggcaactcgcaggttgctggagccatctcttcccttttcatcctcctcatcattgtcaaacttggggaactcttccatgacctgcccaaggcggtcctggcagccatcatcattgtgaacctgaagggcatgctgaggcagctcagcgacatgcgctccctctggaaggccaatcgggcggatctgcttatctggctggtgaccttcacggccaccatcttgctgaacctggaccttggcttggtggttgcggtcatcttctccctgctgctcgtggtggtccggacacagatgtgagtccgccatgttggtcccctcattccagctagtgagagagtaccacagggctccccgcagctttccccacatctctggggacttcaggctccttcggacccctctgttatcccctttttctgccccctcttcgtgcattctctctctccttcacaggccccactactctgtcctggggcaggtgccagacacggatatttacagagatgtggcagagtactcagaggccaaggaagtccggggggtgaaggtcttccgctcctcggccaccgtgtactttgccaatgctgagttctacagtgatgcgctgaagcagaggtgtggtgtggatgtcgacttcctcatctcccagaagaagaaactgctcaagaagcaggagcagctgaagctgaagcaactgcagaaagaggagaagcttcggaaacaggctgcctcccccaagggcgcctcagtttccattaatgtcaacaccagccttgaagacatgaggagcaacaacgttgaggactgcaagatgatgagcaggtgagctcaggagataagatggaagatgcaacagccaatggtcaagaagactccaaggccccagatgggtccacactgaaggccctgggcctgcctcagccagacttccacagcctcatcctggacctgggtgccctctcctttgtggacactgtgtgcctcaagagcctgaagaatattttccatgacttccgggagattgaggtggaggtgtacatggcggcctgccacagccctgtggtcagccagcttgaggctgggcacttcttcgatgcatccatcaccaagaagcatctctttgcctctgtccatgatgctgtcacctttgccctccaacacccgaggcctgtccccgacagccctgtttcggtcaccagactctgaacatgctacatcctgcccaagactgcacctctggaggtgcagggcacccttgagaagcccctcacccctaggccgcctccaggtgctacccaggagtcccctccatgtacacacacacaactcagggaaggaggtcctgggactccaagttcagcgctccaggtctgggacagggcctgcatgcagtcaggctggcagtggcgcggtacagggagggaactggtgcatattttagcctcaggaataaagatttgtctgctcaaaaaaaaaaaa

SEQ ID NO: 441081 - DNA, 1265 bp, Homo sapiens
cgaagtatcttggggaactcttccatgacctgcccagcggtcctggcagccatcatcattgtgaacctgaagggcatgctgaggcagctcagcgacatgcgctccctctggaaggccaatcgggcggatctgcttatctggctggtgaccttcacggccaccatcttgctgaacctggaccttggcttggtggttgcggtcatcttctccctgctgctcgtggtggtccggacacagatgccccactactctgtcctggggcaggtgccagacacggatatttacagagatgtggcagagtactcagaggccaaggaagtccggggggtgaaggtcttccgctcctcggccaccgtgtactttgccaatgctgagttctacagtgatgcgctgaagcagaggtgtggtgtggatgtcgacttcctcatctcccagaagaagaaactgctcaagaagcaggagcagctgaagctgaagcaactgcagaaagaggagaagcttcggaaacaggctgcctcccccaagggcgcctcagtttccattaatgtcaacaccagccttgaagacatgaggagcaacaacgttgaggactgcaagatgatgagcaggtgagctcaggagataagatggaagatgcaacagccaatggtcaagaagactccaaggccccagatgggtccacactgaaggccctgggcctgcctcagccagacttccacagcctcatcctggacctgggtgccctctcctttgtggacactgtgtgcctcaagagcctgaagaatattttccatgacttccgggagattgaggtggaggtgtacatggcggcctgccacagccctgtggtcagccagcttgaggctgggcacttcttcgatgcatccatcaccaagaagcatctctttgcctctgtccatgatgctgtcacctttgccctccaacacccgaggcctgtccccgacagccctgtttcggtcaccagactctgaacatgctacatcctgcccaagactgcacctctggaggtgcagggcacccttgagaagcccctcacccctaggccgcctccaggtgctacccaggagtcccctccatgtacacacacacaactcagggaaggaggtcctgggactccaagttcagcgctccaggtctgggacagggcctgcatgcagtcaggctggcagtggcgcggtacagggagggaactggtgcatattttagcctcaggaataaagatttgtctgctcaaaaaaaaaaaa

SEQ ID NO: 441082 - DNA, 2613 bp, Homo sapiens
  misc_feature (2377)..(2377): n is a, c, g, or t
  misc_feature (2427)..(2427): n is a, c, g, or t
  misc_feature (2443)..(2443): n is a, c, g, or t
  misc_feature (2445)..(2445): n is a, c, g, or t
  misc_feature (2480)..(2480): n is a, c, g, or t
  misc_feature (2509)..(2509): n is a, c, g, or t
cggcgccgccttccggagcgtagcggcctctagctcgagcagcaggagcagcccgcaccggacaacttgcgagccatggggctggcggatgcgtcgggaccgagggacacacaggcactgctgtctgcaacacaagcaatggacctgcggaggcgagactaccacatggaacggccgctgctgaaccaggagcatttggaggagctggggcgctggggctcagcacctaggacccaccagtggcggacctggttgcagtgctcccgtgctcgggcctatgcccttctgctccaacacctcccggttttggtctggttaccccggtatcctgtgcgtgactggctcctgggtgacctgttatccggcctgagtgtggccatcatgcagcttccgcagggcttggcctacgccctcctggctggattgccccccgtgtttggcctctatagctccttctaccctgtcttcatctacttcctgtttggcacttcccggcacatctccgtggggacctttgctgtcatgtctgtgatggtgggcagtgtgacagaatccctggccccgcaggccttgaacgactccatgatcaatgagacagccagagatgctgcccgggtacaggtggcctccacactcagtgtcctggttggcctcttccaggtggggctgggcctgatccacttcggcttcgtggtcacctacctgtcagaacctcttgtccgaggctataccacagctgcagctgtgcaggtcttcgtctcacagctcaagtatgtgtttggcctccatctgagcagccactctgggccactgtccctcatctatacagtgctggaggtctgctggaagctgccccagagcaaggttggcaccgtggtcactgcagctgtggctggggtggtgctcgtggtggtgaagctgttgaatgacaagctgcagcagcagctgcccatgccgatacccggggagctgctcacgctcatcggggccacaggcatctcctatggcatgggtctaaagcacagatttgaggtagatgtcgtgggcaacatccctgcagggctggtgcccccagtggcccccaacacccagctgttctcaaagctcgtgggcagcgccttcaccatcgctgtggttgggtttgccattgccatctcactggggaagatcttcgccctgaggcacggctaccgggtggacagcaaccaggagctggtggccctgggcctcagtaaccttatcggaggcatcttccagtgcttccccgtgagttgctctatgtctcggagcctggtacaggagagcaccgggggcaactcgcaggttgctggagccatctcttcccttttcatcctcctcatcattgtcaaacttggggaactcttccatgacctgcccaaggcggtcctggcagccatcatcattgtgaacctgaagggcatgctgaggcagctcagcgacatgcgctccctctggaaggccaatcgggcggatctgcttatctggctggtgaccttcacggccaccatcttgctgaacctggaccttggcttggtggttgcggtcatcttctccctgctgctcgtggtggtccggacacagatgccccactactctgtcctggggcaggtgccagacacggatatttacagagatgtggcagagtactcagaggccaaggaagtccggggggtgaaggtcttccgctcctcggccaccgtgtactttgccaatgctgagttctacagtgatgcgctgaagcagaggtgtggtgtggatgtcgacttcctcatctcccagaagaagaaactgctcaagaagcaggagcagctgaagctgaagcaactgcagaaagaggagaagcttcggaaacaggctgcctcccccaagggcgcctcagtttccattaatgtcaacaccagccttgaagacatgaggagcaacaacgttgaggactgcaagatgatgagcaggtgagctcaggagataagatggaagatgcaacagccaatggtcaagaagactccaaggccccagatgggtccacactgaaggccctgggcctgcctcagccagacttccacagcctcatcctggacctgggtgccctctcctttgtggacactgtgtgcctcaagagcctgaagaatattttccatgacttccgggagattgaggtggaggtgtacatggcggcctgccacagccctgtggtcagccagcttgaggctgggcacttcttcgatgcatccatcaccaagaagcatctctttgcctctgtccatgatgctgtcacctttgccctccaacacccgaggcctgtcatggcagccgggctagctgtttgccattccctgtcttccctggtgtaggctgnctcccccaagggcgcctcagtttccattaatgtcaacaccagccttgaanacatgaggagcaacancnttgaggactgcaagatgatggtgagactggaggtnggaaaggaggtgacagctgtgagctgcanagatgcatgatccacatgtctgatgaggaatagcatggacccatctgctgggggctcgaaggtgttgcgcctatagcaggaggagtggaggaggctggctcatc

SEQ ID NO: 441083 - DNA, 796 bp, Homo sapiens
cggcgccgccttccggagcgtagcggcctctagctcgagcagcaggagcagcccgcaccggacaacttgcgagccatggggctggcggatgcgtcgggaccgagggacacacaggcactgctgtctgcaacacaagcaatggacctgcggaggcgagactaccacatggaacggccgctgctgaaccaggagcatttggaggagctggggcgctggggctcagcacctaggacccaccagtggcggacctggttgcagtgctcccgtgctcgggcctatgcccttctgctccaacacctcccggttttggtctggttaccccggtatcctgtgcgtgactggctcctgggtgacctgttatccggcctgagtgtggccatcatgcagcttccgcagggcttggcctacgccctcctggctggattgccccccgtgtttggcctctatagctccttctaccctgtcttcatctacttcctgtttggcacttcccggcacatctccgtgggtcaccagactctgaacatgctacatcctgcccaagactgcacctctggaggtgcagggcacccttgagaagcccctcacccctaggccgcctccaggtgctacccaggagtcccctccatgtacacacacacaactcagggaaggaggtcctgggactccaagttcagcgctccaggtctgggacagggcctgcatgcagtcaggctggcagtggcgcggtacagggagggaactggtgcatattttagcctcaggaataaagatttgtctgctcaaaaaaaaaaaa

SEQ ID NO: 441084 - DNA, 2059 bp, Homo sapiens
cgaactggccctaggagatgagtatccttattacctcatttgacaggtgaggaaacgggggctccaagtggttaagtaatgtgcccaaggccacagagctaggaaatagatgctggatttgaactaagaatgtgtcattccagaaccagggctcattgccttgacaacatacagcgcaaatcctgtactcaggatgtcaccctcttcagaatgttgctgctgtcactcaagctggctgctctgggccatgatatcccaaggacaggtgaatttgggcctcaaaggtatccctttgcatggtccccaggagagcctcattggtgacacctgcagggccctgacgaccaggccagaactagcattcagccctcttgggcaggcccatggggtggaaatggtgccacctgcagaagtcatcgcccctgtgctgggctggcctctgtgccctccatgtctcagatatgccctgacctgttgggctcacaaggccttgtccacataccaggaaggagggcactcccttgccaggcacctgtttgcttttcacagctgggtctctgtccacccctctagggaggcaggactgagggaggctgggcgccccgtccctcctgcacttgctttccttcagtagggccctggcctcagcacaggtaacttcccccctcatttcagctcccagaggtctcttggttagtgcacttgaacccagccacccccaacccagaagctccaaaaagtgccaatgcctgggacccaccctgcagatactgttgtagttggtctgaggcacagcctggacttggggtttttttaaggttctgcatggggttctacctgctgctgtcacctggtctctgcagctctgttccaaagctgcagcctccaggaagccaccctgacttccccccacctaccttcccccttggaggggacaggttctactcagaagtcacacagccctcggatgggtcttctcgtttccaccgccatctgggacctacccgtccatggtttataacccctgtgttctagcagcaaagctttgtagactctgggtttatgggtgtaggggtgagagctgctggcccaggagaggacctcagggaatggatgtgaatgactgaatgagtaggtccacgctgtaccccgtggtccctatctcagagggtgcagggtttcctaggagcagagttggggagaggaacgagagatggccagacagacccagccagagacaggaagggagagaggccgcaggggagctgcttctggccatccatgctgctctgggcctctagcccctagcttgaggcaaaaggctgtactgtgaaaggagtggggaggtgacaggccatgtgtttctgtctcggtcctgtttccacagttatgacgaggaagcgatggtggaggctgtggccctctacaaccctgtgagctttgcctttgaggtgactcaggacttcatgatgtatagaacgggcatctactccagtacttcctgccataaaactccagataaagtaaaccatgcagtactggctgttgggtatggagaaaaaaatgggatcccttactggatcgtgaaaaactcttggggtccccagtggggaatgaacgggtacttcctcatcgagcgcggaaagaacatgtgtggcctggctgcctgcgcctcctaccccatccctctggtgtgagccgtggcagccgcagcgcagactggcggagaaggagaggaacgggcagcctgggcctgggtggaaatcctgccctggaggaagttgtggggagatccactgggacccccaacattctgccctcacctctgtgcccagcctggaaacctacagacaaggaggagttccaccatgagctcacccgtgtctatgacgcaaagatcaccagccatgtgccttagtgtccttcttaacagactcaaaccacatggaccacgaatattctttctgtccagaagggctactttccacatatagagctccagggactgtcttttctgtattcgctgttcaataaacattgagtgagcacctccccagat

SEQ ID NO: 441085 - DNA, 174 bp, Homo sapiens
gcggccgcctactactactactactgctcgaattcaagcttctaacgatgtacggggacatggaccacgaatattctttctgtccagaagggctactttccacatatagagctccagggactgtcttttctgtattcgctgttcaataaacattgagtgagcacctccccagat

SEQ ID NO: 441086 - DNA, 950 bp, Homo sapiens
accagaccctaagctccttgaggacaaggatgctttaattctctctgaaattatcccatcccccaggccctggcacatcttgttttgtttagtaaatgttattgaactgcgtggggaggctgagacttcgggtccataacctgtatttcatgccctttgcatcctcaacaggatggttattgcaagttccaacctggaaaggccatcggctttgtcaaggatgtagccaacatcacaatcgtgagtgccgatccccctctgggatggggaatgtgtcctgatgaggaggcctctctcatgctgtcggatagccagtgggcccagcaaggcagcccttctggcagcacatccctttgacgagttcatattatccctgggtctcagtcgctgtgatggtggcgaggcaggagatgggagggagagcgcaaactggcaggcaggccctctggttctgaactccagatccacacatgccttcattcttttggttctgttttcttgcttgtaaaatgcaagcaattgtccgcatcctgcagaagagggtatgagcacgtgcttgacacagcgtgtgtgaaactgaggagggtgagtgtgtgtcactcaggatgagccaggttctgttgcaataacaaccgtgcccaatctgcatggctgacaacagtcaaagggtgtgtggcactcctgcgcccatgcacagcttagggagggtggtgtgtgctccgtgtcattggcctcacgccaggactagagggaaagaaggtggtaaatgatgccctagctctaaagccaaaacaagccgcccagtcacagttgacctcaagtgaatagggaagtgtggtcttaccctgcttctcccagagagaactggaacgtgaatgaacgccttcgtgactgcagtgtgcatgcatgcaagtgtgggagggtgtgtgaggagtggaggaatatcgctt

SEQ ID NO: 441087 - DNA, 1487 bp, Homo sapiens
acacgaaacgatctagccaattaggctaggtagaggctggggttgaatcggacgaggacgctctgggccgccacctccgcggaccctgagcgcaagagccaagccgccagcgctgctatgtgggccacgctgccgctgctctgcgccggggcctggctcctgggagtccccgtctgcggtgccgccgaactgtccgtgaactccttagagaagtttcacttcaagtcatggatgtctaagcaccgtaagacctacagtacggaggagtaccaccacaggctgcagacgtttgccagcaactggaggaagataaacgcccacaacaatgggaaccacacatttaaaatggcactgaaccaattttcagacatgagctttgctgaaataaaacacaagtatctctggtcagagcctcagaattgctcagccaccaaaagtaactaccttcgaggtactggtccctacccaccttccgtggactggcggaaaaaaggaaattttgtctcacctgtgaaaaatcagggtgcctgcggcagttgctggactttctccaccactggggccctggagtctgcgatcgccatcgcaaccggaaagatgctgtccttggcggaacagcagctggtggactgcgcccaggacttcaataatcacggctgccaagggggtctccccagccaggctttcgagtatatcctgtacaacaaggggatcatgggtgaagacacctacccctaccagggcaaggatggttattgcaagttccaacctggaaaggccatcggctttgtcaaggatgtagccaacatcacaatctatgacgaggaagcgatggtggaggctgtggccctctacaaccctgtgagctttgcctttgaggtgactcaggacttcatgatgtatagaacgggcatctactccagtacttcctgccataaaactccagataaagtaaaccatgcagtactggctgttgggtatggagaaaaaaatgggatcccttactggatcgtgaaaaactcttggggtccccagtggggaatgaacgggtacttcctcatcgagcgcggaaagaacatgtgtggcctggctgcctgcgcctcctaccccatccctctggtgtgagccgtggcagccgcagcgcagactggcggagaaggagaggaacgggcagcctgggcctgggtggaaatcctgccctggaggaagttgtggggagatccactgggacccccaacattctgccctcacctctgtgcccagcctggaaacctacagacaaggaggagttccaccatgagctcacccgtgtctatgacgcaaagatcaccagccatgtgccttagtgtccttcttaacagactcaaaccacatggaccacgaatattctttctgtccagaagggctactttccacatatagagctccagggactgtcttttctgtattcgctgttcaataaacattgagtgagcacctccccagat

SEQ ID NO: 441088 - DNA, 1464 bp, Homo sapiens
agaacattcatgcaggaggcattctgcatgcaggcagtgactgcagattccaggacctgtggttagcggactcctattgatgtttctgggaactctagacctggaagttcagagaagtttcacttcaagtcatggatgtctaaggaaaacaaaaaggtctccctctagggagctgcagcctgtttccatgacttgctactggcgtgttttgttttagcaccgtaagacctacagtacggaggagtaccaccacaggctgcagacgtttgccagcaactggaggaagataaacgcccacaacaatgggaaccacacatttaaaatggcactgaaccaattttcagacatgagctttgctgaaataaaacacaagtatctctggtcagagcctcagaattgctcagccaccaaaagtaactaccttcgaggtactggtccctacccaccttccgtggactggcggaaaaaaggaaattttgtctcacctgtgaaaaatcagggtgcctgcggcagttgctggactttctccaccactggggccctggagtctgcgatcgccatcgcaaccggaaagatgctgtccttggcggaacagcagctggtggactgcgcccaggacttcaataatcacggctgccaagggggtctccccagccaggctttcgagtatatcctgtacaacaaggggatcatgggtgaagacacctacccctaccagggcaaggatggttattgcaagttccaacctggaaaggccatcggctttgtcaaggatgtagccaacatcacaatctatgacgaggaagcgatggtggaggctgtggccctctacaaccctgtgagctttgcctttgaggtgactcaggacttcatgatgtatagaacgggcatctactccagtacttcctgccataaaactccagataaagtaaaccatgcagtactggctgttgggtatggagaaaaaaatgggatcccttactggatcgtgaaaaactcttggggtccccagtggggaatgaacgggtacttcctcatcgagcgcggaaagaacatgtgtggcctggctgcctgcgcctcctaccccatccctctggtgtgagccgtggcagccgcagcgcagactggcggagaaggagaggaacgggcagcctgggcctgggtggaaatcctgccctggaggaagttgtggggagatccactgggacccccaacattctgccctcacctctgtgcccagcctggaaacctacagacaaggaggagttccaccatgagctcacccgtgtctatgacgcaaagatcaccagccatgtgccttagtgtccttcttaacagactcaaaccacatggaccacgaatattctttctgtccagaagggctactttccacatatagagctccagggactgtcttttctgtattcgctgttcaataaacattgagtgagcacctccccagat

SEQ ID NO: 441089 - DNA, 1560 bp, Homo sapiens
acacgaaacgatctagccaattaggctaggtagaggctggggttgaatcggacgaggacgctctgggccgccacctccgcggaccctgagcgcaagagccaagccgccagcgctgctatgtgggccacgctgccgctgctctgcgccggggcctggctcctgggagtccccgtctgcggtgccgccgaactgtccgtgaactccttagagaagtttcacttcaagtcatggatgtctaaggaaaacaaaaaggtctccctctagggagctgcagcctgtttccatgacttgctactggcgtgttttgttttagcaccgtaagacctacagtacggaggagtaccaccacaggctgcagacgtttgccagcaactggaggaagataaacgcccacaacaatgggaaccacacatttaaaatggcactgaaccaattttcagacatgagctttgctgaaataaaacacaagtatctctggtcagagcctcagaattgctcagccaccaaaagtaactaccttcgaggtactggtccctacccaccttccgtggactggcggaaaaaaggaaattttgtctcacctgtgaaaaatcagggtgcctgcggcagttgctggactttctccaccactggggccctggagtctgcgatcgccatcgcaaccggaaagatgctgtccttggcggaacagcagctggtggactgcgcccaggacttcaataatcacggctgccaagggggtctccccagccaggctttcgagtatatcctgtacaacaaggggatcatgggtgaagacacctacccctaccagggcaaggatggttattgcaagttccaacctggaaaggccatcggctttgtcaaggatgtagccaacatcacaatctatgacgaggaagcgatggtggaggctgtggccctctacaaccctgtgagctttgcctttgaggtgactcaggacttcatgatgtatagaacgggcatctactccagtacttcctgccataaaactccagataaagtaaaccatgcagtactggctgttgggtatggagaaaaaaatgggatcccttactggatcgtgaaaaactcttggggtccccagtggggaatgaacgggtacttcctcatcgagcgcggaaagaacatgtgtggcctggctgcctgcgcctcctaccccatccctctggtgtgagccgtggcagccgcagcgcagactggcggagaaggagaggaacgggcagcctgggcctgggtggaaatcctgccctggaggaagttgtggggagatccactgggacccccaacattctgccctcacctctgtgcccagcctggaaacctacagacaaggaggagttccaccatgagctcacccgtgtctatgacgcaaagatcaccagccatgtgccttagtgtccttcttaacagactcaaaccacatggaccacgaatattctttctgtccagaagggctactttccacatatagagctccagggactgtcttttctgtattcgctgttcaataaacattgagtgagcacctccccagat

SEQ ID NO: 441090 - DNA, 1342 bp, Homo sapiens
gtggagggagcagaagcccaggctctgaagctgtgtttggctgacctcagattgtggctccgctgttactctctgtgtaatgtgggatcgtaaatttgggacaaagccggtacccctctgggtggttgtgaagtttacaagagactctgtagaagcccctgccccattcctgccatctgagggtccagcctggaagccaagtggcactgaaccaattttcagacatgagctttgctgaaataaaacacaagtatctctggtcagagcctcagaattgctcagccaccaaaagtaactaccttcgaggtactggtccctacccaccttccgtggactggcggaaaaaaggaaattttgtctcacctgtgaaaaatcagggtgcctgcggcagttgctggactttctccaccactggggccctggagtctgcgatcgccatcgcaaccggaaagatgctgtccttggcggaacagcagctggtggactgcgcccaggacttcaataatcacggctgccaagggggtctccccagccaggctttcgagtatatcctgtacaacaaggggatcatgggtgaagacacctacccctaccagggcaaggatggttattgcaagttccaacctggaaaggccatcggctttgtcaaggatgtagccaacatcacaatctatgacgaggaagcgatggtggaggctgtggccctctacaaccctgtgagctttgcctttgaggtgactcaggacttcatgatgtatagaacgggcatctactccagtacttcctgccataaaactccagataaagtaaaccatgcagtactggctgttgggtatggagaaaaaaatgggatcccttactggatcgtgaaaaactcttggggtccccagtggggaatgaacgggtacttcctcatcgagcgcggaaagaacatgtgtggcctggctgcctgcgcctcctaccccatccctctggtgtgagccgtggcagccgcagcgcagactggcggagaaggagaggaacgggcagcctgggcctgggtggaaatcctgccctggaggaagttgtggggagatccactgggacccccaacattctgccctcacctctgtgcccagcctggaaacctacagacaaggaggagttccaccatgagctcacccgtgtctatgacgcaaagatcaccagccatgtgccttagtgtccttcttaacagactcaaaccacatggaccacgaatattctttctgtccagaagggctactttccacatatagagctccagggactgtcttttctgtattcgctgttcaataaacattgagtgagcacctccccagat

SEQ ID NO: 441091 - DNA, 1442 bp, Homo sapiens
acacgaaacgatctagccaattaggctaggtagaggctggggttgaatcggacgaggacgctctgggccgccacctccgcggaccctgagcgcaagagccaagccgccagcgctgctatgtgggccacgctgccgctgctctgcgccggggcctggctcctgggagtccccgtctgcggtgccgccgaactgtccgtgaactccttagagaagtttcacttcaagtcatggatgtctaagcaccgtaagacctacagtacggaggagtaccaccacaggctgcagacgtttgccagcaactggaggaagataaacgcccacaacaatgggaaccacacatttaaaatggcactgaaccaattttcagacatgagctttgctgaaataaaacacaagtatctctggtcagagcctcagaattgctcagccaccaaaagtaactaccttcgaggtactggtccctacccaccttccgtggactggcggaaaaaaggaaattttgtctcacctgtgaaaaatcaggagtctgcgatcgccatcgcaaccggaaagatgctgtccttggcggaacagcagctggtggactgcgcccaggacttcaataatcacggctgccaagggggtctccccagccaggctttcgagtatatcctgtacaacaaggggatcatgggtgaagacacctacccctaccagggcaaggatggttattgcaagttccaacctggaaaggccatcggctttgtcaaggatgtagccaacatcacaatctatgacgaggaagcgatggtggaggctgtggccctctacaaccctgtgagctttgcctttgaggtgactcaggacttcatgatgtatagaacgggcatctactccagtacttcctgccataaaactccagataaagtaaaccatgcagtactggctgttgggtatggagaaaaaaatgggatcccttactggatcgtgaaaaactcttggggtccccagtggggaatgaacgggtacttcctcatcgagcgcggaaagaacatgtgtggcctggctgcctgcgcctcctaccccatccctctggtgtgagccgtggcagccgcagcgcagactggcggagaaggagaggaacgggcagcctgggcctgggtggaaatcctgccctggaggaagttgtggggagatccactgggacccccaacattctgccctcacctctgtgcccagcctggaaacctacagacaaggaggagttccaccatgagctcacccgtgtctatgacgcaaagatcaccagccatgtgccttagtgtccttcttaacagactcaaaccacatggaccacgaatattctttctgtccagaagggctactttccacatatagagctccagggactgtcttttctgtattcgctgttcaataaacattgagtgagcacctccccagat

SEQ ID NO: 441092 - DNA, 1978 bp, Homo sapiens
  misc_feature (1553)..(1553): n is a, c, g, or t
cgctcccgccgctcctccacgctcgtgccgccccccccgcgctcccagttgacgctctgggccgccacctccgcggaccctgagcgcaagagccaagccgccagcgctgctatgtgggccacgctgccgctgctctgcgccggggcctggctcctgggagtccccgtctgcggtgccgccgaactgtccgtgaactccttagagaagtttcacttcaagtcatggatgtctaagcaccgtaagacctacagtacggaggagtaccaccacaggctgcagacgtttgccagcaactggaggaagataaacgcccacaacaatgggaaccacacatttaaaatggcactgaaccaattttcagacatgagctttgctgaaataaaacacaagtatctctggtcagagcctcagaattgctcagccaccaaaagtaactaccttcgaggtactggtccctacccaccttccgtggactggcggaaaaaaggaaattttgtctcacctgtgaaaaatcagggtgcctgcggcagttgctggactttctccaccactggggccctggagtctgcgatcgccatcgcaaccggaaagatgctgtccttggcggaacagcagctggtggactgcgcccaggacttcaataatcacggctgccaagggggtctccccagccaggctttcgagtatatcctgtacaacaaggggatcatgggtgaagacacctacccctaccagggcaaggatggttattgcaagttccaacctggaaaggccatcggctttgtcaaggatgtagccaacatcacaatctatgacgaggaagcgatggtggaggctgtggccctctacaaccctgtgagctttgcctttgaggtgactcaggacttcatgatgtatagaacgggcatctactccagtacttcctgccataaaactccagataaagtaaaccatgcagtactggctgttgggtatggagaaaaaaatgggatcccttactggatcgtgaaaaactcttggggtccccagtggggaatgaacgggtacttcctcatcgagcgcggaaagaacatgtgtggcctggctgcctgcgcctcctaccccatccctctggtgtgagccgtggcagccgcagcgcagactggcggagaaggagaggaacgggcagcctgggcctgggtggaaatcctgccctggaggaagttgtggggagatccactgggacccccaacattctgccctcacctctgtgcccagcctggaaacctacagacaaggaggagttccaccatgagctcacccgtgtctatgacgcaaagatcaccagccatgtgccttagtgtccttcttaacagactcaaaccacatggaccacgaatattctttctgtccagaagggctactttccacatatagagctccagggactgtcttttctgtattcgctgttcaataaacattgagtgagcacctccccagataaaaaaaaaaaaaaaaaaaaaaaaaaaaaaaaaaaaaaaaaaaaaaaaaaaaaaaaaaaaaaaaaaaaaaanaaaaaaaaaaaaaaaaaaaaaagaaaaaaaaaaaggggggggagggtaaaaaaataacccacgagaggggacacaaaggaagcgcacgcccagattgtagtacacagagcgggcccaaaaagaggcgcgataaaaaaagagagaaggggacacaataaaaaaagcggcgggggagaaaaacagaaaagagggacacagtgggagagcagcaccacaaatctgtctgggggggcggcacaaaatatcggtggggagaaccaacctcactccgaaagaggattttatcccggcaagtggaggagaacaatagtaagaactatagaggttaataattatgggtggtaacacaaggggaaaagataagcacgggatggaacaaaagattgtgcaatgcaagggaataatgtaaggaaagaatttttacg

SEQ ID NO: 441093 - DNA, 2483 bp, Homo sapiens
cgctcccgccgctcctccacgctcgtgccgccccccccgcgctcccagttgacgctctgggccgccacctccgcggaccctgagcgcaagagccaagccgccagcgctgctatgtgggccacgctgccgctgctctgcgccggggcctggctcctgggagtccccgtctgcggtgccgccgaactgtccgtgaactccttagagaagtttcacttcaagtcatggatgtctaagcaccgtaagacctacagtacggaggagtaccaccacaggctgcagacgtttgccagcaactggaggaagataaacgcccacaacaatgggaaccacacatttaaaatggcactgaaccaattttcagacatgagctttgctgaaataaaacacaagtatctctggtcagagcctcagaattgctcagccaccaaaagtaactaccttcgaggtactggtccctacccaccttccgtggactggcggaaaaaaggaaattttgtctcacctgtgaaaaatcagggtgcctgcggcagttgctggactttctccaccactggggccctggagtctgcgatcgccatcgcaaccggaaagatgctgtccttggcggaacagcagctggtggactgcgcccaggacttcaataatcacggctgccaagggggtctccccagccaggctttcgagtatatcctgtacaacaaggggatcatgggtgaagacacctacccctaccagggcaaggatggttattgcaagttccaacctggaaaggccatcggctttgtcaaggatgtagccaacatcacaatctatgacgaggaagcgatggtggaggctgtggccctctacaaccctgtgagctttgcctttgaggtgactcaggacttcatgatgtatagaacgggcatctactccagtacttcctgccataaaactccagataaagtaaaccatgcagtactggctgttgggtatggagaaaaaaatgggatcccttactggatcgtgaaaaactcttggggtccccagtggggaatgaacgggtacttcctcatcgagcgcggaaagaacatgtgtggcctggctgcctgcgcctcctaccccatccctctggtgtgagccgtggcagccgcagcgcagactggcggagaaggagaggaacgggcagcctgggcctgggtggaaatcctgccctggaggaagttgtggggagatccactgggacccccaacattctgccctcacctctgtgcccagcctggaaacctacagacaaggaggagttccaccatgagctcacccgtgtctatgacgcaaagatcaccagccatgtgccttagtgtccttcttaacagactcaaaccacatggaccacgaatattctttctgtccagaagggctactttccacatatagagctccagggactgtcttttctgtattcgctgttcaataaacattgagtgagcacctccccagatccagatggtaacaaccacaaaaagaacaaaaaaaaacaacacatcaaaataggataacaatcgagaaacatgagaacaaacaatacgaaacaaggctcgcaacgcacacgagagcacaaccagactaccaaacacttaagatcgaaggcgtgcggggcgacctctgtgttgtcattcacatggacgatcaggcatcgatctattgacactgattattcatcttacaccggtgtactcgctctcttctcacttttgtactgtgtgactacgtatccagttctctcatgacgtgcttttatctctcttcatttgacactatttttatatttctctcgtgcccctatctacatcttatcgtttcatatttttgtctactctagatcattactacctatttactatactgcatttgttctcatctatctttcttgttcacatcgcgtaatctcttcactcatcgtactgcgagagatgaagtaacacttcgttaccaagatgtggagatcgcgactacgctcgtcaccactactgctatgaatagatctgtgaagtacgtgcagaagtatctccactcgtaatccacttatatcactgctcgtcgtatcagttctctatattgttcttgctcctgcttcgctctactacttatacgcacagtcttatacattacgttcgatgtcgtggtcgatgttagtgtggagatgcgatctttctgtcatcagtgtcgggagcatcgatgctgtgctcttacttttcctagaagtcatctcgaaatcgatctctcggcagtagcgacgtgacgatgttagagtctcatatacaattgatctatgctgtcttcatcgtttcgagttgttgcttctgttgcgtctcgtattcctgcgtctcagctgggcagcgtatgacttcaactatggaatgctgatttgatgtcgatggttctctgtgacatgttgtaagtcacgattgacgatcttttcgcatgagttaaagtatctgtgt

SEQ ID NO: 441094 - DNA, 1245 bp, Homo sapiens
  misc_feature (396)..(396): n is a, c, g, or t
cctcacagacgcgcccgcacacaatacagagtgagcatgaacctcggcaggacctcagtctgcctgagggaaccaggttggcacctccaccagtgtccgggcagggcggtgctatccctggggacatgaatgccagccctgtcatcagctcctccccactcaggtctgaagctcagggccaagcctccctctctggatctgtcagcagctctggcaccaggcaggaagacgaccttccctggagatgcccctgggccacggcccacagagctcaggagcctcagccagccacgtgggcatccactccttttcctgcaagagatgatggttccattgctcttggcttcatggtgttcctggaaggcagatgagctggtcatttacagactgcgcccnggacttcaataatcacggctgccaagggggtctccccagccaggctttcgagtatatcctgtacaacaaggggatcatgggtgaagacacctacccctaccagggcaaggatggttattgcaagttccaacctggaaaggccatcggctttgtcaaggatgtagccaacatcacaatctatgacgaggaagcgatggtggaggctgtggccctctacaaccctgtgagctttgcctttgaggtgactcaggacttcatgatgtatagaacgggcatctactccagtacttcctgccataaaactccagataaagtaaaccatgcagtactggctgttgggtatggagaaaaaaatgggatcccttactggatcgtgaaaaactcttggggtccccagtggggaatgaacgggtacttcctcatcgagcgcggaaagaacatgtgtggcctggctgcctgcgcctcctaccccatccctctggtgtgagccgtggcagccgcagcgcagactggcggagaaggagaggaacgggcagcctgggcctgggtggaaatcctgccctggaggaagttgtggggagatccactgggacccccaacattctgccctcacctctgtgcccagcctggaaacctacagacaaggaggagttccaccatgagctcacccgtgtctatgacgcaaagatcaccagccatgtgccttagtgtccttcttaacagactcaaaccacatggaccacgaatattctttctgtccagaagggctactttccacatatagagctccagggactgtcttttctgtattcgctgttcaataaacattgagtgagcacctccccagat

SEQ ID NO: 441095 - DNA, 1444 bp, Homo sapiens
cgctcccgccgctcctccacgctcgtgccgccccccccgcgctcccagttgacgctctgggccgccacctccgcggaccctgagcgcaagagccaagccgccagcgctgctatgtgggccacgctgccgctgctctgcgccggggcctggctcctgggagtccccgtctgcggtgccgccgaactgtccgtgaactccttagagaagtttcacttcaagtcatggatgtctaagcaccgtaagacctacagtacggaggagtaccaccacaggctgcagacgtttgccagcaactggaggaagataaacgcccacaacaatgggaaccacacatttaaaatggcactgaaccaattttcagacatgagctttgctgaaataaaacacaagtatctctggtcagagcctcagaattgctcagccaccaaaagtaactaccttcgaggtactggtccctacccaccttccgtggactggcggaaaaaaggaaattttgtctcacctgtgaaaaatcagggtgcctgcggcagttgctggactttctccaccactggggccctggagtctgcgatcgccatcgcaaccggaaagatgctgtccttggcggaacagcagctggtggactgcgcccaggacttcaataatcacggctgccaagggggtctccccagccaggctttcgagtatatcctgtacaacaaggggatcatgggtgaagacacctacccctaccagggcaaggatggttattgcaagttccaacctggaaaggccatcggctttgtcaaggatgtagccaacatcacaatctatgacgaggaagcgatggtggaggctgtggccctctacaaccctgtgagctttgcctttgaggtgactcaggacttcatgatgtatagaacgggcatctactccagtacttcctgccataaaactccagataaagtaaaccatgcagtactggctgttgggtatggagaaaaaaatgggatcccttactggatcgtgaaaaactcttggggtccccagtggggaatgaacgggtacttcctcatcgagcgcggaaagaacatgtgtggcctggctgcctgcgcctcctaccccatccctctggtgtgagccgtggcagccgcagcgcagactggcggagaaggagaggaacgggcagcctgggcctgggtggaaatcctgccctggaggaagttgtggggagatccactgggacccccaacattctgccctcacctctgtgcccagcctggaaacctacagacaaggaggagttccaccatgagctcacccgtgtctatgacgcaaagatcaccagccatgtgccttagtgtccttcttaacagactcaaaccacatggaccacgaatattctttctgtccagaagggctactttccacacttctaaggtaaggggccgagctcgattgatca

SEQ ID NO: 441096 - DNA, 1311 bp, Homo sapiens
acacgaaacgatctagccaattaggctaggtagaggctggggttgaatcggacgaggacgctctgggccgccacctccgcggaccctgagcgcaagagccaagccgccagcgctgctatgtgggccacgctgccgctgctctgcgccggggcctggctcctgggagtccccgtctgcggtgccgccgaactgtccgtgaactccttagagaagtttcacttcaagtcatggatgtctaaggaaaacaaaaaggtctccctctagggagctgcagcctgtttccatgacttgctactggcgtgttttgttttagcaccgtaagacctacagtacggaggagtaccaccacaggctgcagacgtttgccagcaactggaggaagataaacgcccacaacaatgggaaccacacatttaaaatggcactgaaccaattttcagacatgagctttgctgaaataaaacacaagtatctctggtcagagcctcagaattgctcagccaccaaaagtaactaccttcgaggtactggtccctacccaccttccgtggactggcggaaaaaaggaaattttgtctcacctgtgaaaaatcagggtgcctgcggcagttgctggactttctccaccactggggccctgtatgacgaggaagcgatggtggaggctgtggccctctacaaccctgtgagctttgcctttgaggtgactcaggacttcatgatgtatagaacgggcatctactccagtacttcctgccataaaactccagataaagtaaaccatgcagtactggctgttgggtatggagaaaaaaatgggatcccttactggatcgtgaaaaactcttggggtccccagtggggaatgaacgggtacttcctcatcgagcgcggaaagaacatgtgtggcctggctgcctgcgcctcctaccccatccctctggtgtgagccgtggcagccgcagcgcagactggcggagaaggagaggaacgggcagcctgggcctgggtggaaatcctgccctggaggaagttgtggggagatccactgggacccccaacattctgccctcacctctgtgcccagcctggaaacctacagacaaggaggagttccaccatgagctcacccgtgtctatgacgcaaagatcaccagccatgtgccttagtgtccttcttaacagactcaaaccacatggaccacgaatattctttctgtccagaagggctactttccacatatagagctccagggactgtcttttctgtattcgctgttcaataaacattgagtgagcacctccccagat

SEQ ID NO: 441097 - DNA, 1520 bp, Homo sapiens
cgctcccgccgctcctccacgctcgtgccgccccccccgcgctcccagttgacgctctgggccgccacctccgcggaccctgagcgcaagagccaagccgccagcgctgctatgtgggccacgctgccgctgctctgcgccggggcctggctcctgggagtccccgtctgcggtgccgccgaactgtccgtgaactccttagagaagtttcacttcaagtcatggatgtctaagcaccgtaagacctacagtacggaggagtaccaccacaggctgcagacgtttgccagcaactggaggaagataaacgcccacaacaatgggaaccacacatttaaaatggcactgaaccaattttcagacatgagctttgctgaaataaaacacaagtatctctggtcagagcctcagaattgctcagccaccaaaagtaactaccttcgaggtactggtccctacccaccttccgtggactggcggaaaaaaggaaattttgtctcacctgtgaaaaatcagggtgcctgcggcagttgctggactttctccaccactggggccctggagtctgcgatcgccatcgcaaccggaaagatgctgtccttggcggaacagcagctggtggactgcgcccaggacttcaataatcacggctgccaagggggtctccccagccaggctttcgagtatatcctgtacaacaaggggatcatgggtgaagacacctacccctaccagggcaaggatggttattgcaagttccaacctggaaaggccatcggctttgtcaaggatgtagccaacatcacaatcgtgagtgccgatccccctctgggatggggaatgtgtcctgatgaggaggcctctctcatgctgtcggatagccagtgggcccagcaaggcagcccttctggcagcacatccctttgacgagttcatattatccctgggtctcagtcgctgtgatggtggcgaggcaggagatgggagggagagcgcaaactggcaggcaggccctctggttctgaactccagatccacacatgccttcattcttttggttctgttttcttgcttgtaaaatgcaagcaattgtccgcatcctgcagaagagggtatgagcacgtgcttgacacagcgtgtgtgaaactgaggagggtgagtgtgtgtcactcaggatgagccaggttctgttgcaataacaaccgtgcccaatctgcatggctgacaacagtcaaagggtgtgtggcactcctgcgcccatgcacagcttagggagggtggtgtgtgctccgtgtcattggcctcacgccaggactagagggaaagaaggtggtaaatgatgccctagctctaaagccaaaacaagccgcccagtcacagttgacctcaagtgaatagggaagtgtggtcttaccctgcttctcccagagagaactggaacgtgaatgaacgccttcgtgactgcagtgtgcatgcatgcaagtgtgggagggtgtgtgaggagtggaggaatatcgctt

SEQ ID NO: 441098 - DNA, 861 bp, Homo sapiens
  misc_feature (830)..(830): n is a, c, g, or t
  misc_feature (855)..(855): n is a, c, g, or t
  misc_feature (860)..(860): n is a, c, g, or t
cgctcccgccgctcctccacgctcgtgccgccccccccgcgctcccagttgacgctctgggccgccacctccgcggaccctgagcgcaagagccaagccgccagcgctgctatgtgggccacgctgccgctgctctgcgccggggcctggctcctgggagtccccgtctgcggtgccgccgaactgtccgtgaactccttagagaagtttcacttcaagtcatggatgtctaagcaccgtaagacctacagtacggaggagtaccaccacaggctgcagacgtttgccagcaactggaggaagataaacgcccacaacaatgggaaccacacatttaaaatggcactgaaccaattttcagacatgagctttgctgaaataaaacacaagtatctctggtcagagcctcagaattgctcagccaccaaaagtaactaccttcgaggtactggtccctacccaccttccgtggactggcggaaaaaaggaaattttgtctcacctgtgaaaaatcagggtgcctgcggcagttgctggactttctccaccactggggccctggagtctgcgatcgccatcgcaaccggaaagatgctgtccttggcggaacagcagctggtggactgcgcccaggacttcaataatcacggctgccaagggggtctccccagccaggctttcgagtatatcctgtacaacaaggggatcatgggtgaagacacctacccctaccagggcaaggatggttattgcaagttccaacctggaaaggccatcggctttgtcaaggatgtagccaacatcacaatctaatggacgaagggaaaaangcccccccgaaaattttgggggggntttgng

SEQ ID NO: 441099 - DNA, 1011 bp, Homo sapiens
  misc_feature (396)..(396): n is a, c, g, or t
cctcacagacgcgcccgcacacaatacagagtgagcatgaacctcggcaggacctcagtctgcctgagggaaccaggttggcacctccaccagtgtccgggcagggcggtgctatccctggggacatgaatgccagccctgtcatcagctcctccccactcaggtctgaagctcagggccaagcctccctctctggatctgtcagcagctctggcaccaggcaggaagacgaccttccctggagatgcccctgggccacggcccacagagctcaggagcctcagccagccacgtgggcatccactccttttcctgcaagagatgatggttccattgctcttggcttcatggtgttcctggaaggcagatgagctggtcatttacagactgcgcccnggacttcaataatcacggctgccaagggggtctccccagccaggctttcgagtatatcctgtacaacaaggggatcatgggtgaagacacctacccctaccagggcaaggatggttattgcaagttccaacctggaaaggccatcggctttgtcaaggatgtagccaacatcacaatctatgacgaggaagcgatggtggaggctgtggccctctacaaccctgtgagctttgcctttgaggtgactcaggacttcatgatgtatagaacgggcatctactccagtacttcctgccataaaactccagataaagtaaaccatgcagtactggctgttgggtatggagatccactgggacccccaacattctgccctcacctctgtgcccagcctggaaacctacagacaaggaggagttccaccatgagctcacccgtgtctatgacgcaaagatcaccagccatgtgccttagtgtccttcttaacagactcaaaccacatggaccacgaatattctttctgtccagaagggctactttccacatatagagctccagggactgtcttttctgtattcgctgttcaataaacattgagtgagcacctccccagat

SEQ ID NO: 441100 - DNA, 454 bp, Homo sapiens
aatgtcagcccagaagcctgtacttctctgtgtggcctccccagtctcagctgcctactcctactcagactctgccccccacctccacatgagactgcccaccccttcctcaccaaccccttatttatttcaaacgtgcccagatgctcctgtcgtttccacaccatcccttcccttatcttgccttttgagaaatcttgatctctgtttagagggcggccatgaagttgctgctgcttcctgaagcctccgggctctgggatgtctgtagaacaagctggagtccaccagctctttgtcctatggctcacagactttcttaatgataaaagctgtcatcttatttgggcttcctgaaaagctaaaggcttgagaatatttgaaaaatatatatgttcatgataaggcttatttagataatgcaaatatagtttaatttattagaaaattctag

SEQ ID NO: 441101 - DNA, 141 bp, Homo sapiens
aggctgtggccctctacaaccctgtgagctttgcctttgaggtgactcaggacttcatgatgtatagaacgggcatctactccaggtgagtcagggtcccaggagccaggagggacagtggggaggggcttggtgggcctc

SEQ ID NO: 441102 - DNA, 625 bp, Homo sapiens
ccccgcctctatcaggacagccccaggtgggctcacctgtgtgtacttcttgcaggggtctccccagccaggctttcgagtatatcctgtacaacaaggggatcatgggtgaagacacctacccctaccagggcaaggtaactccaacagcctccactctgtcttcttggcgtacagcatgcctagcttcactccctccccagccttggaagacatcccttctccccccacctccctcccgccggaattctcacaattgtctgttctctccaaattcttccttcccctcctccacccacctgagcccactgctctcaccagtccaggggcctctttatcattctcaccccatacccgctctgcggcaccatctctttccttcccgagccagacttctcaggacccctccttccccccacctgccccatcttcctggctcctctccctcctgccacgagcgccatcctctcgcctctgtccatgcagttggcctcttgtgccaaggaccctttgggggcccacccccacccctaccctatcaaggctgctgggcctcccaccatcacctccgcccagcctggccacagccaagtgccttgtctttccccaagacctgttgctcctc

SEQ ID NO: 441103 - DNA, 1481 bp, Homo sapiens
cgctcccgccgctcctccacgctcgtgccgccccccccgcgctcccagttgacgctctgggccgccacctccgcggaccctgagcgcaagagccaagccgccagcgctgctatgtgggccacgctgccgctgctctgcgccggggcctggctcctgggagtccccgtctgcggtgccgccgaactgtccgtgaactccttagagaagtttcacttcaagtcatggatgtctaagcaccgtaagacctacagtacggaggagtaccaccacaggctgcagacgtttgccagcaactggaggaagataaacgcccacaacaatgggaaccacacatttaaaatggcactgaaccaattttcagacatgagctttgctgaaataaaacacaagtatctctggtcagagcctcagaattgctcagccaccaaaagtaactaccttcgaggtactggtccctacccaccttccgtggactggcggaaaaaaggaaattttgtctcacctgtgaaaaatcagggtgcctgcggcagttgctggactttctccaccactggggccctggagtctgcgatcgccatcgcaaccggaaagatgctgtccttggcggaacagcagctggtggactgcgcccaggacttcaataatcacggctgccaagggggtctccccagccaggctttcgagtatatcctgtacaacaaggggatcatgggtgaagacacctacccctaccagggcaaggatggttattgcaagttccaacctggaaaggccatcggctttgtcaaggatgtagccaacatcacaatctatgacgaggaagcgatggtggaggctgtggccctctacaaccctgtgagctttgcctttgaggtgactcaggacttcatgatgtatagaacgggcatctactccagtacttcctgccataaaactccagataaagtaaaccatgcagtactggctgttgggtatggagaaaaaaatgggatcccttactggatcgtgaaaaactcttggggtccccagtggggaatgaacgggtacttcctcatcgagcgcggaaagaacatgtgtggcctggctgcctgcgcctcctaccccatccctctggtgtgagccgtggcagccgcagcgcagactggcggagaaggagaggaacgggcagcctgggcctgggtggaaatcctgccctggaggaagttgtggggagatccactgggacccccaacattctgccctcacctctgtgcccagcctggaaacctacagacaaggaggagttccaccatgagctcacccgtgtctatgacgcaaagatcaccagccatgtgccttagtgtccttcttaacagactcaaaccacatggaccacgaatattctttctgtccagaagggctactttccacatatagagctccagggactgtcttttctgtattcgctgttcaataaacattgagtgagcacctccccagat

SEQ ID NO: 441104 - DNA, 1593 bp, Homo sapiens
cgctcccgccgctcctccacgctcgtgccgccccccccgcgctcccagttgacgctctgggccgccacctccgcggaccctgagcgcaagagccaagccgccagcgctgctatgtgggccacgctgccgctgctctgcgccggggcctggctcctgggagtccccgtctgcggtgccgccgaactgtccgtgaactccttaggtacgcagagggcgcgccgcccgagagggtgctagcaggccctagagtggacgctgggagaacttggccagggcgcactgggctccggaggaacggggcagagctttccccgagaagtttcacttcaagtcatggatgtctaagcaccgtaagacctacagtacggaggagtaccaccacaggctgcagacgtttgccagcaactggaggaagataaacgcccacaacaatgggaaccacacatttaaaatggcactgaaccaattttcagacatgagctttgctgaaataaaacacaagtatctctggtcagagcctcagaattgctcagccaccaaaagtaactaccttcgaggtactggtccctacccaccttccgtggactggcggaaaaaaggaaattttgtctcacctgtgaaaaatcagggtgcctgcggcagttgctggactttctccaccactggggccctggagtctgcgatcgccatcgcaaccggaaagatgctgtccttggcggaacagcagctggtggactgcgcccaggacttcaataatcacggctgccaagggggtctccccagccaggctttcgagtatatcctgtacaacaaggggatcatgggtgaagacacctacccctaccagggcaaggatggttattgcaagttccaacctggaaaggccatcggctttgtcaaggatgtagccaacatcacaatctatgacgaggaagcgatggtggaggctgtggccctctacaaccctgtgagctttgcctttgaggtgactcaggacttcatgatgtatagaacgggcatctactccagtacttcctgccataaaactccagataaagtaaaccatgcagtactggctgttgggtatggagaaaaaaatgggatcccttactggatcgtgaaaaactcttggggtccccagtggggaatgaacgggtacttcctcatcgagcgcggaaagaacatgtgtggcctggctgcctgcgcctcctaccccatccctctggtgtgagccgtggcagccgcagcgcagactggcggagaaggagaggaacgggcagcctgggcctgggtggaaatcctgccctggaggaagttgtggggagatccactgggacccccaacattctgccctcacctctgtgcccagcctggaaacctacagacaaggaggagttccaccatgagctcacccgtgtctatgacgcaaagatcaccagccatgtgccttagtgtccttcttaacagactcaaaccacatggaccacgaatattctttctgtccagaagggctactttccacatatagagctccagggactgtcttttctgtattcgctgttcaataaacattgagtgagcacctccccagat

SEQ ID NO: 441105 - DNA, 1839 bp, Homo sapiens
acacgaaacgatctagccaattaggctaggtagaggctggggttgaatcggacgaggacgctctgggccgccacctccgcggaccctgagcgcaagagccaagccgccagcgctgctatgtgggccacgctgccgctgctctgcgccggggcctggctcctgggagtccccgtctgcggtgccgccgaactgtccgtgaactccttaggtacgcagagggcgcgccgcccgagagggtgctagcaggccctagagtggacgctgggagaacttggccagggcgcactgggctccggaggaacggggcagagctttccccggtgagaggccaggaactctgcgtgctggcacggggaggggtaaactgcattataggcgggggttctcggagggtgggcggcttgtaggaccagaggagcagatgggctgagtgtccagggtcccacctagccaggtggctctccagcctagaataccaaaggagcccgcagctccttccgccttcctcaactggggacacagagtgtcacacagaggactctgatctgtccctgccagagagaagtttcacttcaagtcatggatgtctaagcaccgtaagacctacagtacggaggagtaccaccacaggctgcagacgtttgccagcaactggaggaagataaacgcccacaacaatgggaaccacacatttaaaatggcactgaaccaattttcagacatgagctttgctgaaataaaacacaagtatctctggtcagagcctcagaattgctcagccaccaaaagtaactaccttcgaggtactggtccctacccaccttccgtggactggcggaaaaaaggaaattttgtctcacctgtgaaaaatcagggtgcctgcggcagttgctggactttctccaccactggggccctggagtctgcgatcgccatcgcaaccggaaagatgctgtccttggcggaacagcagctggtggactgcgcccaggacttcaataatcacggctgccaagggggtctccccagccaggctttcgagtatatcctgtacaacaaggggatcatgggtgaagacacctacccctaccagggcaaggatggttattgcaagttccaacctggaaaggccatcggctttgtcaaggatgtagccaacatcacaatctatgacgaggaagcgatggtggaggctgtggccctctacaaccctgtgagctttgcctttgaggtgactcaggacttcatgatgtatagaacgggcatctactccagtacttcctgccataaaactccagataaagtaaaccatgcagtactggctgttgggtatggagaaaaaaatgggatcccttactggatcgtgaaaaactcttggggtccccagtggggaatgaacgggtacttcctcatcgagcgcggaaagaacatgtgtggcctggctgcctgcgcctcctaccccatccctctggtgtgagccgtggcagccgcagcgcagactggcggagaaggagaggaacgggcagcctgggcctgggtggaaatcctgccctggaggaagttgtggggagatccactgggacccccaacattctgccctcacctctgtgcccagcctggaaacctacagacaaggaggagttccaccatgagctcacccgtgtctatgacgcaaagatcaccagccatgtgccttagtgtccttcttaacagactcaaaccacatggaccacgaatattctttctgtccagaagggctactttccacatatagagctccagggactgtcttttctgtattcgctgttcaataaacattgagtgagcacctccccagat

SEQ ID NO: 441106 - DNA, 1869 bp, Homo sapiens
cgctcccgccgctcctccacgctcgtgccgccccccccgcgctcccagttgacgctctgggccgccacctccgcggaccctgagcgcaagagccaagccgccagcgctgctatgtgggccacgctgccgctgctctgcgccggggcctggctcctgggagtccccgtctgcggtgccgccgaactgtccgtgaactccttagagaagtttcacttcaagtcatggatgtctaagcaccgtaagacctacagtacggaggagtaccaccacaggctgcagacgtttgccagcaactggaggaagataaacgcccacaacaatgggaaccacacatttaaaatggcactgaaccaattttcagacatgagctttgctgaaataaaacacaagtatctctggtcagagcctcagaattgctcagccaccaaaagtaactaccttcgaggtactggtccctacccaccttccgtggactggcggaaaaaaggaaattttgtctcacctgtgaaaaatcagggtgcctgcggcagttgctggactttctccaccactggggccctggagtctgcgatcgccatcgcaaccggaaagatgctgtccttggcggaacagcagctggtggactgcgcccaggacttcaataatcacggctgccaagggggtctccccagccaggctttcgagtatatcctgtacaacaaggggatcatgggtgaagacacctacccctaccagggcaaggatggttattgcaagttccaacctggaaaggccatcggctttgtcaaggatgtagccaacatcacaatctatgacgaggaagcgatggtggaggctgtggccctctacaaccctgtgagctttgcctttgaggtgactcaggacttcatgatgtatagaacgggcatctactccagtacttcctgccataaaactccagataaagtaaaccatgcagtactggctgttgggtatggagaaaaaaatgggatcccttactggatcgtgaaaaactcttggggtccccagtggggaatgaacgggtacttcctcatcgagcgcggaaagaacatgtgtggcctggctgcctgcgcctcctaccccatccctctggtgtgagccgtggcagccgcagcgcagactggcggagaaggagaggaacgggcagcctgggcctgggtggaaatcctgccctggaggaagttgtggggagatccactgggacccccaacattctgccctcacctctgtgcccagcctggaaacctacagacaaggaggagttccaccatgagctcacccgtgtctatgacgcaaagatcaccagccatgtgccttagtgtccttcttaacagactcaaaccacatggaccacgaatattctttctgtccagaagggctactttccacatatagagctccagggactgtcttttctgtattcgctgttcaataaacattgagtgagcacctccccagatggagcatgctggtcctgggccatgactcaaaccaggtctgtcctcgccactcagtctcccaggagggaggcatcagggggtgtccaggctctggctgggaggatggtgggggtgctggcggtattatccaccagatggggtatccaggatgaagagcaggcttaatttgagatcttgactatttgtcccaaaccttttgagaaatcttgatctctgtttagagggcggccatgaagttgctgctgcttcctgaagcctccgggctctgggatgtctgtagaacaagctggagtccaccagctctttgtcctatggctcacagactttcttaatgataaaagctgtcatcttatttgggcttcctgaaaagctaaaggcttgagaatat

SEQ ID NO: 441107 - DNA, 2238 bp, Homo sapiens
  misc_feature (2238)..(2238): n is a, c, g, or t
cgctcccgccgctcctccacgctcgtgccgccccccccgcgctcccagttgacgctctgggccgccacctccgcggaccctgagcgcaagagccaagccgccagcgctgctatgtgggccacgctgccgctgctctgcgccggggcctggctcctgggagtccccgtctgcggtgccgccgaactgtccgtgaactccttagagaagtttcacttcaagtcatggatgtctaagcaccgtaagacctacagtacggaggagtaccaccacaggctgcagacgtttgccagcaactggaggaagataaacgcccacaacaatgggaaccacacatttaaaatggcactgaaccaattttcagacatgagctttgctgaaataaaacacaagtatctctggtcagagcctcagaattgctcagccaccaaaagtaactaccttcgaggtactggtccctacccaccttccgtggactggcggaaaaaaggaaattttgtctcacctgtgaaaaatcagggtgcctgcggcagttgctggactttctccaccactggggccctggagtctgcgatcgccatcgcaaccggaaagatgctgtccttggcggaacagcagctggtggactgcgcccaggacttcaataatcacggctgccaagggggtctccccagccaggctttcgagtatatcctgtacaacaaggggatcatgggtgaagacacctacccctaccagggcaaggatggttattgcaagttccaacctggaaaggccatcggctttgtcaaggatgtagccaacatcacaatctatgacgaggaagcgatggtggaggctgtggccctctacaaccctgtgagctttgcctttgaggtgactcaggacttcatgatgtatagaacgggcatctactccagtacttcctgccataaaactccagataaagtaaaccatgcagtactggctgttgggtatggagaaaaaaatgggatcccttactggatcgtgaaaaactcttggggtccccagtggggaatgaacgggtacttcctcatcgagcgcggaaagaacatgtgtggcctggctgcctgcgcctcctaccccatccctctggtgtgagccgtggcagccgcagcgcagactggcggagaaggagaggaacgggcagcctgggcctgggtggaaatcctgccctggaggaagttgtggggagatccactgggacccccaacattctgccctcacctctgtgcccagcctggaaacctacagacaaggaggagttccaccatgagctcacccgtgtctatgacgcaaagatcaccagccatgtgccttagtgtccttcttaacagactcaaaccacatggaccacgaatattctttctgtccagaagggctactttccacatatagagctccagggactgtcttttctgtattcgctgttcaataaacattgagtgagcacctccccagataaaaaaaaaaaaaaaaaaaaaaaaaaaaaaaaaagggggggccctctcaaaagtttctcccccggggggcccaggtttccggcgtaccccagcctttcgtgtcaccaagggggcccccatatagggagctcgccactcatctacagcctacggccacgggcccgacgcgattaacaacgcgccgggacacggggaaaacacggcacacccgggggaactctgggcaagggacccttaccccgcgagcggggcgggcaccacaagatgggggacacaacccacaccccaagacagaagaactctcacacgcgccccctaaggggcacaactactaacacctcccacacccgcggccacaacagggcgctcaaacccctcagccgcgcccaaacgcgcctggcccgccccccgacacacgtccggcgcccccacccggactctctgacatcgccacggcaacgacgctcttgtactcaccccggggacccaccggccgcacaaaacgccccccgcccccacccccaccccgccgcccccccccccccaccccccccgccccccccgagcaccccaccgtggcgcggcagacgcaccccccccccacagctgccacaaacacacgcccgcgaagacacagaccaccacccgcccccgccaacgaccccaacgccacaggcacccgctgccgccaacggccacacgacggccgacccgccccccctgcccccccccgcacgcccacagcccccaccccccn

SEQ ID NO: 441108 - DNA, 1944 bp, Homo sapiens
  misc_feature (1519)..(1519): n is a, c, g, or t
cgctcccgccgctcctccacgctcgtgccgccccccccgcgctcccagttgacgctctgggccgccacctccgcggaccctgagcgcaagagccaagccgccagcgctgctatgtgggccacgctgccgctgctctgcgccggggcctggctcctgggagtccccgtctgcggtgccgccgaactgtccgtgaactccttagagaagtttcacttcaagtcatggatgtctaagcaccgtaagacctacagtacggaggagtaccaccacaggctgcagacgtttgccagcaactggaggaagataaacgcccacaacaatgggaaccacacatttaaaatggcactgaaccaattttcagacatgagctttgctgaaataaaacacaagtatctctggtcagagcctcagaattgctcagccaccaaaagtaactaccttcgaggtactggtccctacccaccttccgtggactggcggaaaaaaggaaattttgtctcacctgtgaaaaatcagggtgcctgcggcagttgctggactttctccaccactggggccctggagtctgcgatcgccatcgcaaccggaaagatgctgtccttggcggaacagcagctggtggactgcgcccaggacttcaataatcacggctgccaagggggtctccccagccaggctttcgagtatatcctgtacaacaaggggatcatgggtgaagacacctacccctaccagggcaaggatggttattgcaagttccaacctggaaaggccatcggctttgtcaaggatgtagccaacatcacaatctatgacgaggaagcgatggtggaggctgtggccctctacaaccctgtgagctttgcctttgaggtgactcaggacttcatgatgtatagaacgggcatctactccagtacttcctgccataaaactccagataaagtaaaccatgcagtactggctgttgggtatggagaaaaaaatgggatcccttactggatcgtgaaaaactcttggggtccccagtggggaatgaacgggtacttcctcatcgagcgcggaaagaacatgtgtggcctggctgcctgcgcctcctaccccatccctctggtgtgagccgtggcagccgcagcgcagactggcggagaaggagaggaacgggcagcctgggcctgggtggaaatcctgccctggaggaagttgtggggagatccactgggacccccaacattctgccctcacctctgtgcccagcctggaaacctacagacaaggaggagttccaccatgagctcacccgtgtctatgacgcaaagatcaccagccatgtgccttagtgtccttcttaacagactcaaaccacatggaccacgaatattctttctgtccagaagggctactttccacatatagagctccagggactgtcttttctgtattcgctgttcaataaacattgagtgagcacctccccagataaaaaaaaaaaaaaaaaaaaaaaaaaaaaaaaaaaaanaaaaaaaaaaaaaaaaaaaaaagaaaaaaaaaaaggggggggagggtaaaaaaataacccacgagaggggacacaaaggaagcgcacgcccagattgtagtacacagagcgggcccaaaaagaggcgcgataaaaaaagagagaaggggacacaataaaaaaagcggcgggggagaaaaacagaaaagagggacacagtgggagagcagcaccacaaatctgtctgggggggcggcacaaaatatcggtggggagaaccaacctcactccgaaagaggattttatcccggcaagtggaggagaacaatagtaagaactatagaggttaataattatgggtggtaacacaaggggaaaagataagcacgggatggaacaaaagattgtgcaatgcaagggaataatgtaaggaaagaatttttacg

SEQ ID NO: 441109 - DNA, 1568 bp, Homo sapiens
cgctcccgccgctcctccacgctcgtgccgccccccccgcgctcccagttgacgctctgggccgccacctccgcggaccctgagcgcaagagccaagccgccagcgctgctatgtgggccacgctgccgctgctctgcgccggggcctggctcctgggagtccccgtctgcggtgccgccgaactgtccgtgaactccttagagaagtttcacttcaagtcatggatgtctaagcaccgtaagacctacagtacggaggagtaccaccacaggctgcagacgtttgccagcaactggaggaagataaacgcccacaacaatgggaaccacacatttaaaatggcactgaaccaattttcagacatgagctttgctgaaataaaacacaagtatctctggtcagagcctcagaattgctcagccaccaaaagtaactaccttcgaggtactggtccctacccaccttccgtggactggcggaaaaaaggaaattttgtctcacctgtgaaaaatcagggtgcctgcggcagttgctggactttctccaccactggggccctggagtctgcgatcgccatcgcaaccggaaagatgctgtccttggcggaacagcagctggtggactgcgcccaggacttcaataatcacggctgccaagggggtctccccagccaggctttcgagtatatcctgtacaacaaggggatcatgggtgaagacacctacccctaccagggcaaggatggttattgcaagttccaacctggaaaggccatcggctttgtcaaggatgtagccaacatcacaatctatgacgaggaagcgatggtggaggctgtggccctctacaaccctgtgagctttgcctttgaggtgactcaggacttcatgatgtatagaacgggcatctactccagtacttcctgccataaaactccagataaagtaaaccatgcagtactggctgttgggtatggagaaaaaaatgggatcccttactggatcgtgaaaaactcttggggtccccagtggggaatgaacgggtacttcctcatcgagcgcggaaagaacatgtgtggcctggctgcctgcgcctcctaccccatccctctggtgtgagccgtggcagccgcagcgcagactggcggagaaggagaggaacgggcagcctgggcctgggtggaaatcctgccctggaggaagttgtggggagatccactgggacccccaacattctgccctcacctctgtgcccagcctggaaacctacagacaaggaggagttccaccatgagctcacccgtgtctatgacgcaaagatcaccagccatgtgccttagtgtccttcttaacagactcaaaccacatggaccacgaatattctttctgtccagaagggctactttccacaacttctaaggttaagcttaaccttagaagttgtggtgatagcattgctttcgtgtaaattatgtaatgcaaaatgtttttaatcttcgccttaatacttgttttattttgttttattttgaatgatgagccttcgtgcccccccttccccctgttgt

SEQ ID NO: 441110 - DNA, 1392 bp, Homo sapiens
cgctcccgccgctcctccacgctcgtgccgccccccccgcgctcccagttgacgctctgggccgccacctccgcggaccctgagcgcaagagccaagccgccagcgctgctatgtgggccacgctgccgctgctctgcgccggggcctggctcctgggagtccccgtctgcggtgccgccgaactgtccgtgaactccttagagaagtttcacttcaagtcatggatgtctaagcaccgtaagacctacagtacggaggagtaccaccacaggctgcagacgtttgccagcaactggaggaagataaacgcccacaacaatgggaaccacacatttaaaatggcactgaaccaattttcagacatgagctttgctgaaataaaacacaagtatctctggtcagagcctcagaattgctcagccaccaaaagtaactaccttcgaggtactggtccctacccaccttccgtggactggcggaaaaaaggaaattttgtctcacctgtgaaaaatcagggtgcctgcggcagttgctggactttctccaccactggggccctggagtctgcgatcgccatcgcaaccggaaagatgctgtccttggcggaacagcagctggtggactgcgcccaggacttcaataatcacggctgccaagggggtctccccagccaggctttcgagtatatcctgtacaacaaggggatcatgggtgaagacacctacccctaccagggcaaggatggttattgcaagttccaacctggaaaggccatcggctttgtcaaggatgtagccaacatcacaatctatgacgaggaagcgatggtggaggctgtggccctctacaaccctgtgagctttgcctttgaggtgactcaggacttcatgatgtatagaacgggcatctactccagtacttcctgccataaaactccagataaagtaaaccatgcagtactggctgttgggtatggagaaaaaaatgggatcccttactggatcgtgaaaaactcttggggtccccagtggggaatgaacgggtacttcctcatcgagcgcggaaagaacatgggcagcctgggcctgggtggaaatcctgccctggaggaagttgtggggagatccactgggacccccaacattctgccctcacctctgtgcccagcctggaaacctacagacaaggaggagttccaccatgagctcacccgtgtctatgacgcaaagatcaccagccatgtgccttagtgtccttcttaacagactcaaaccacatggaccacgaatattctttctgtccagaagggctactttccacatatagagctccagggactgtcttttctgtattcgctgttcaataaacattgagtgagcacctccccagat

SEQ ID NO: 441111 - DNA, 1185 bp, Homo sapiens
  misc_feature (396)..(396): n is a, c, g, or t
cctcacagacgcgcccgcacacaatacagagtgagcatgaacctcggcaggacctcagtctgcctgagggaaccaggttggcacctccaccagtgtccgggcagggcggtgctatccctggggacatgaatgccagccctgtcatcagctcctccccactcaggtctgaagctcagggccaagcctccctctctggatctgtcagcagctctggcaccaggcaggaagacgaccttccctggagatgcccctgggccacggcccacagagctcaggagcctcagccagccacgtgggcatccactccttttcctgcaagagatgatggttccattgctcttggcttcatggtgttcctggaaggcagatgagctggtcatttacagactgcgcccnggacttcaataatcacggctgccaagggggtctccccagccagggcaaggatggttattgcaagttccaacctggaaaggccatcggctttgtcaaggatgtagccaacatcacaatctatgacgaggaagcgatggtggaggctgtggccctctacaaccctgtgagctttgcctttgaggtgactcaggacttcatgatgtatagaacgggcatctactccagtacttcctgccataaaactccagataaagtaaaccatgcagtactggctgttgggtatggagaaaaaaatgggatcccttactggatcgtgaaaaactcttggggtccccagtggggaatgaacgggtacttcctcatcgagcgcggaaagaacatgtgtggcctggctgcctgcgcctcctaccccatccctctggtgtgagccgtggcagccgcagcgcagactggcggagaaggagaggaacgggcagcctgggcctgggtggaaatcctgccctggaggaagttgtggggagatccactgggacccccaacattctgccctcacctctgtgcccagcctggaaacctacagacaaggaggagttccaccatgagctcacccgtgtctatgacgcaaagatcaccagccatgtgccttagtgtccttcttaacagactcaaaccacatggaccacgaatattctttctgtccagaagggctactttccacatatagagctccagggactgtcttttctgtattcgctgttcaataaacattgagtgagcacctccccagat

SEQ ID NO: 441112 - DNA, 1148 bp, Homo sapiens
acacgaaacgatctagccaattaggctaggtagaggctggggttgaatcggacgaggacgctctgggccgccacctccgcggaccctgagcgcaagagccaagccgccagcgctgctatgtgggccacgctgccgctgctctgcgccggggcctggctcctgggagtccccgtctgcggtgccgccgaactgtccgtgaactccttagagaagtttcacttcaagtcatggatgtctaagcaccgtaagacctacagtacggaggagtaccaccacaggctgcagacgtttgccagcaactggaggaagataaacgcccacaacaatgggaaccacacatttaaaatggcactgaaccaattttcagacatgagctttgctgaaataaaacacaagtatctctggtcagagcctcaggtaggtataattcattgcaaccaaatctgaatccttttactgaaacctttggaataaatttggagcctgctctgcttctaggcagattcagtcccatccccagatgcagctgagggtatccccagattctttgggggaaccagaagagtcagctctcagcagttcctcagtccaggcccatggccttagcattgtggacccttaacttagggctaccagattaaaatatagatactcagttaaaaatgaatttcagatacacaacaagtaattctttagcataagtatattctaaatattgcacaggatatacttacactacaaagttatttgttgtttacctgaaattcaaatttaactaggtgagctgtatttttatttgctacatctgtctaccctatcctaatgctctggactctcaaggggacatgtcatttagcacttgggaccagtagacaggagagggaaggttctgagagctgcagcctttcttattctctcttggtgattccatgtttatacatttcttcttcttgttgtcagaaaggtttttggttttgtttattttcctgaaaataatgtgtttggttgttccagaattgctcagccaccaaaagtaactaccttcgaggtactggtccctacccaccttccgtggactggcggaaaaaaggaaattttgtctcacctgtgaaaaatcagggtatgcctggcaatctccatcctctccc

SEQ ID NO: 441113 - DNA, 911 bp, Homo sapiens
acacgaaacgatctagccaattaggctaggtagaggctggggttgaatcggacgaggacgctctgggccgccacctccgcggaccctgagcgcaagagccaagccgccagcgctgctatgtgggccacgctgccgctgctctgcgccggggcctggctcctgggagtccccgtctgcggtgccgccgaactgtccgtgaactccttaggtacgcagagggcgcgccgcccgagagggtgctagcaggccctagagtggacgctgggagaacttggccagggcgcactgggctccggaggaacggggcagagctttccccggtgagaggccaggaactctgcgtgctggcacggggaggggtaaactgcattataggcgggggttctcggagggtgggcggcttgtaggaccagaggagcagatgggctgagtgtccagggtcccacctagccaggtggctctccagcctagaataccaaaggagcccgcagctccttccgccttcctcaactggggacacagagtgtcacacagaggactctgatctgtccctgccagagagaagtttcacttcaagtcatggatgtctaaggtcagtgcccaacttcttctttttgaagtttttcatttcacaaagtttcctgttatcaaaccaaactgtcccagatttgagacaatgaaaaagggaatttccaactttgcctagtggggtctttccagaagttgaactggccaaacactgggaaagatgcagttaagtaaattccttccaaatagtggtcccaagtgattaacttggctgacagccttccaagccctgggattcatttctgtattttgttttcaaagcacattgtggagaatgtaaatgagtacaaccattgtaaaaaaaacagtatggaggttccatc

SEQ ID NO: 441114 - DNA, 4409 bp, Homo sapiens
tgtggcaggagatgtagaataccggtggacagacttatacttgcgaatctgcttggcaccagtaaggatccaaatgattgtttttttgttttttgttttgttttgttttgttttgttttgttttaaattgcattgggattaggcaacagaagggtctaatgcggccgggatgagacaggagagtttttaggagggtagctgcattctaagtaagggactctgcggggggaaaagaggcgcaagcgttgcaagaagggagtgcagggggttgagcaggcacctctacaggaaatggatgctgtccaggtgctggtgggcgccccagggctacgtggcgaagcagctcagccggtccaatcagagtgcgtccagggctcgggtttcgcgatctttaagtgactgaggcagatccccacgcggcacctggccatgctctcagctctcccgccgcgggatggtgccttgagtgaatgacccccttggagaacattcttccgcatccctcgcctcaagccagcctcagacagaaaactgaagattcagcagatccagtgcttcctgctcctcttctgcccaggaacacgcttgccttccccaaggcttccagaagctctgaggcaggaggcaccaagttctacctcatgtttggaggatcttgctagctatggccctcgtactcggctccctgttgctgctggggctgtgcgggaactccttttcaggagggcagccttcatccacagatgctcctaaggcttggaattatgaattgcctgcaacaaattatgagacccaagactcccataaagctggacccattggcattctctttgaactagtgcatatctttctctatgtggtacagccgcgtgatttcccagaagatactttgagaaaattcttacagaaggcatatgaatccaaaattgattatgacaagattgtctactatgaagcagggattattctatgctgtgtcctggggctgctgtttattattctgatgcctctggtggggtatttcttttgtatgtgtcgttgctgtaacaaatgtggtggagaaatgcaccagcgacagaaggaaaatgggcccttcctgaggaaatgctttgcaatctccctgttggtgatttgtataataataagcattggcatcttctatggttttgtggcaaatcaccaggtaagaacccggatcaaaaggagtcggaaactggcagatagcaatttcaaggacttgcgaactctcttgaatgaaactccagagcaaatcaaatatatattggcccagtacaacactaccaaggacaaggcgttcacagatctgaacagtatcaattcagtgctaggaggcggaattcttgaccgactgagacccaacatcatccctgttcttgatgagattaagtccatggcaacagcgatcaaggagaccaaagaggcgttggagaacatgaacagcaccttgaagagcttgcaccaacaaagtacacagcttagcagcagtctgaccagcgtgaaaactagcctgcggtcatctctcaatgaccctctgtgcttggtgcatccatcaagtgaaacctgcaacagcatcagattgtctctaagccagctgaatagcaaccctgaactgaggcagcttccacccgtggatgcagaacttgacaacgttaataacgttcttaggacagatttggatggcctggtccaacagggctatcaatcccttaatgatatacctgacagagtacaacgccaaaccacgactgtcgtagcaggtatcaaaagggtcttgaattccattggttcagatatcgacaatgtaactcagcgtcttcctattcaggatatactctcagcattctctgtttatgttaataacactgaaagttacatccacagaaatttacctacattggaagagtatgattcatactggtggctgggtggcctggtcatctgctctctgctgaccctcatcgtgattttttactacctgggcttactgtgtggcgtgtgcggctatgacaggcatgccaccccgaccacccgaggctgtgtctccaacaccggaggcgtcttcctcatggttggagttggattaagtttcctcttttgctggatattgatgatcattgtggttcttacctttgtctttggtgcaaatgtggaaaaactgatctgtgaaccttacacgagcaaggaattattccgggttttggatacaccctacttactaaatgaagactgggaatactatctctctgggaagctatttaataaatcaaaaatgaagctcacttttgaacaagtttacagtgactgcaaaaaaaatagaggcacttacggcactcttcacctgcagaacagcttcaatatcagtgaacatctcaacattaatgagcatactggaagcataagcagtgaattggaaagtctgaaggtaaatcttaatatctttctgttgggtgcagcaggaagaaaaaaccttcaggattttgctgcttgtggaatagacagaatgaattatgacagctacttggctcagactggtaaatcccccgcaggagtgaatcttttatcatttgcatatgatctagaagcaaaagcaaacagtttgcccccaggaaatttgaggaactccctgaaaagagatgcacaaactattaaaacaattcaccagcaacgagtccttcctatagaacaatcactgagcactctataccaaagcgtcaagatacttcaacgcacagggaatggattgttggagagagtaactaggattctagcttctctggattttgctcagaacttcatcacaaacaatacttcctctgttattattgaggaaactaagaagtatgggagaacaataataggatattttgaacattatctgcagtggatcgagttctctatcagtgagaaagtggcatcgtgcaaacctgtggccaccgctctagatactgctgttgatgtctttctgtgtagctacattatcgaccccttgaatttgttttggtttggcataggaaaagctactgtatttttacttccggctctaatttttgcggtaaaactggctaagtactatcgtcgaatggattcggaggacgtgtacgatgatgttgaaactatacccatgaaaaatatggaaaatggtaataatggttatcataaagatcatgtatatggtattcacaatcctgttatgacaagcccatcacaacattgatagctgatgttgaaactgcttgagcatcaggatactcaaagtggaaaggatcacagatttttggtagtttctgggtctacaaggactttccaaatccaggagcaacgccagtggcaacgtagtgactcaggcgggcaccaaggcaacggcaccattggtctctgggtagtgctttaagaatgaacacaatcacgttatagtccatggtccatcactattcaaggatgactccctcccttcctgtctatttttgttttttacttttttacactgagtttctatttagacactacaacatatggggtgtttgttcccattggatgcatttctatcaaaactctatcaaatgtgatggctagattctaacatattgccatgtgtggagtgtgctgaacacacaccagtttacaggaaagatgcattttgtgtacagtaaacggtgtatataccttttgttaccacagagttttttaaacaaatgagtattataggactttcttctaaatgagctaaataagtcaccattgacttcttggtgctgttgaaaataatccattttcactaaaagtgtgtgaaacctacagcatattcttcacgcagagattttcatctattatactttatcaaagattggccatgttccacttggaaatggcatgcaaaagccatcatagagaaacctgcgtaactccatctgacaaattcaaaagagagagagagatcttgagagagaaatgctgttcgttcaaaagtggagttgttttaacagatgccaattacggtgtacagtttaacagagttttctgttgcattaggataaacattaattggagtgcagctaacatgagtatcatcagactagtatcaagtgttctaaaatgaaatatgagaagatcctgtcacaattcttagatctggtgtccagcatggatgaaacctttgagtttggtccctaaatttgcatgaaagcacaaggtaaatattcatttgcttcaggagtttcatgttggatctgtcattatcaaaagtgatcagcaatgaagaactggtcggacaaaatttaacgttgatgtaatggaattccagatgtaggcattccccccaggtcttttcatgtgcagattgcagttctgattcatttgaataaaaaggaacttggaaaaaaaaaaaaaaa

SEQ ID NO: 441115 - DNA, 4436 bp, Homo sapiens
tgtggcaggagatgtagaataccggtggacagacttatacttgcgaatctgcttggcaccagtaaggatccaaatgattgtttttttgttttttgttttgttttgttttgttttgttttgttttaaattgcattgggattaggcaacagaagggtctaatgcggccgggatgagacaggagagtttttaggagggtagctgcattctaagtaagggactctgcggggggaaaagaggcgcaagcgttgcaagaagggagtgcagggggttgagcaggcacctctacaggaaatggatgctgtccaggtgctggtgggcgccccagggctacgtggcgaagcagctcagccggtccaatcagagtgcgtccagggctcgggtttcgcgatctttaagtgactgaggcagatccccacgcggcacctggccatgctctcagctctcccgccgcgggatggtgccttgagtgaatgacccccttggagaacattcttccgcatccctcgcctcaagccagcctcagacagaaaactgaagattcagcagatccagtgcttcctgctcctcttctgcccaggaacacgcttgccttccccaaggcttccagaagctctgaggcaggaggcaccaagttctacctcatgtttggaggatcttgctagctatggccctcgtactcggctccctgttgctgctggggctgtgcgggaactccttttcaggagggcagccttcatccacagatgctcctaaggcttggaattatgaattgcctgcaacaaattatgagacccaagactcccataaagctggacccattggcattctctttgaactagtgcatatctttctctatgtggtacagccgcgtgatttcccagaagatactttgagaaaattcttacagaaggcatatgaatccaaaattgattatgacaagccagaaactgtaatcttaggtctaaagattgtctactatgaagcagggattattctatgctgtgtcctggggctgctgtttattattctgatgcctctggtggggtatttcttttgtatgtgtcgttgctgtaacaaatgtggtggagaaatgcaccagcgacagaaggaaaatgggcccttcctgaggaaatgctttgcaatctccctgttggtgatttgtataataataagcattggcatcttctatggttttgtggcaaatcaccaggtaagaacccggatcaaaaggagtcggaaactggcagatagcaatttcaaggacttgcgaactctcttgaatgaaactccagagcaaatcaaatatatattggcccagtacaacactaccaaggacaaggcgttcacagatctgaacagtatcaattcagtgctaggaggcggaattcttgaccgactgagacccaacatcatccctgttcttgatgagattaagtccatggcaacagcgatcaaggagaccaaagaggcgttggagaacatgaacagcaccttgaagagcttgcaccaacaaagtacacagcttagcagcagtctgaccagcgtgaaaactagcctgcggtcatctctcaatgaccctctgtgcttggtgcatccatcaagtgaaacctgcaacagcatcagattgtctctaagccagctgaatagcaaccctgaactgaggcagcttccacccgtggatgcagaacttgacaacgttaataacgttcttaggacagatttggatggcctggtccaacagggctatcaatcccttaatgatatacctgacagagtacaacgccaaaccacgactgtcgtagcaggtatcaaaagggtcttgaattccattggttcagatatcgacaatgtaactcagcgtcttcctattcaggatatactctcagcattctctgtttatgttaataacactgaaagttacatccacagaaatttacctacattggaagagtatgattcatactggtggctgggtggcctggtcatctgctctctgctgaccctcatcgtgattttttactacctgggcttactgtgtggcgtgtgcggctatgacaggcatgccaccccgaccacccgaggctgtgtctccaacaccggaggcgtcttcctcatggttggagttggattaagtttcctcttttgctggatattgatgatcattgtggttcttacctttgtctttggtgcaaatgtggaaaaactgatctgtgaaccttacacgagcaaggaattattccgggttttggatacaccctacttactaaatgaagactgggaatactatctctctgggaagctatttaataaatcaaaaatgaagctcacttttgaacaagtttacagtgactgcaaaaaaaatagaggcacttacggcactcttcacctgcagaacagcttcaatatcagtgaacatctcaacattaatgagcatactggaagcataagcagtgaattggaaagtctgaaggtaaatcttaatatctttctgttgggtgcagcaggaagaaaaaaccttcaggattttgctgcttgtggaatagacagaatgaattatgacagctacttggctcagactggtaaatcccccgcaggagtgaatcttttatcatttgcatatgatctagaagcaaaagcaaacagtttgcccccaggaaatttgaggaactccctgaaaagagatgcacaaactattaaaacaattcaccagcaacgagtccttcctatagaacaatcactgagcactctataccaaagcgtcaagatacttcaacgcacagggaatggattgttggagagagtaactaggattctagcttctctggattttgctcagaacttcatcacaaacaatacttcctctgttattattgaggaaactaagaagtatgggagaacaataataggatattttgaacattatctgcagtggatcgagttctctatcagtgagaaagtggcatcgtgcaaacctgtggccaccgctctagatactgctgttgatgtctttctgtgtagctacattatcgaccccttgaatttgttttggtttggcataggaaaagctactgtatttttacttccggctctaatttttgcggtaaaactggctaagtactatcgtcgaatggattcggaggacgtgtacgatgatgttgaaactatacccatgaaaaatatggaaaatggtaataatggttatcataaagatcatgtatatggtattcacaatcctgttatgacaagcccatcacaacattgatagctgatgttgaaactgcttgagcatcaggatactcaaagtggaaaggatcacagatttttggtagtttctgggtctacaaggactttccaaatccaggagcaacgccagtggcaacgtagtgactcaggcgggcaccaaggcaacggcaccattggtctctgggtagtgctttaagaatgaacacaatcacgttatagtccatggtccatcactattcaaggatgactccctcccttcctgtctatttttgttttttacttttttacactgagtttctatttagacactacaacatatggggtgtttgttcccattggatgcatttctatcaaaactctatcaaatgtgatggctagattctaacatattgccatgtgtggagtgtgctgaacacacaccagtttacaggaaagatgcattttgtgtacagtaaacggtgtatataccttttgttaccacagagttttttaaacaaatgagtattataggactttcttctaaatgagctaaataagtcaccattgacttcttggtgctgttgaaaataatccattttcactaaaagtgtgtgaaacctacagcatattcttcacgcagagattttcatctattatactttatcaaagattggccatgttccacttggaaatggcatgcaaaagccatcatagagaaacctgcgtaactccatctgacaaattcaaaagagagagagagatcttgagagagaaatgctgttcgttcaaaagtggagttgttttaacagatgccaattacggtgtacagtttaacagagttttctgttgcattaggataaacattaattggagtgcagctaacatgagtatcatcagactagtatcaagtgttctaaaatgaaatatgagaagatcctgtcacaattcttagatctggtgtccagcatggatgaaacctttgagtttggtccctaaatttgcatgaaagcacaaggtaaatattcatttgcttcaggagtttcatgttggatctgtcattatcaaaagtgatcagcaatgaagaactggtcggacaaaatttaacgttgatgtaatggaattccagatgtaggcattccccccaggtcttttcatgtgcagattgcagttctgattcatttgaataaaaaggaacttggaaaaaaaaaaaaaaa

SEQ ID NO: 441116 - DNA, 3517 bp, Homo sapiens
tgtggcaggagatgtagaataccggtggacagacttatacttgcgaatctgcttggcaccagtaaggatccaaatgattgtttttttgttttttgttttgttttgttttgttttgttttgttttaaattgcattgggattaggcaacagaagggtctaatgcggccgggatgagacaggagagtttttaggagggtagctgcattctaagtaagggactctgcggggggaaaagaggcgcaagcgttgcaagaagggagtgcagggggttgagcaggcacctctacaggaaatggatgctgtccaggtgctggtgggcgccccagggctacgtggcgaagcagctcagccggtccaatcagagtgcgtccagggctcgggtttcgcgatctttaagtgactgaggcagatccccacgcggcacctggccatgctctcagctctcccgccgcgggatggtgccttgagtgaatgacccccttggagaacattcttccgcatccctcgcctcaagccagcctcagacagaaaactgaagattcagcagatccagtgcttcctgctcctcttctgcccaggaacacgcttgccttccccaaggcttccagaagctctgaggcaggaggcaccaagttctacctcatgtttggaggatcttgctagctatggccctcgtactcggctccctgttgctgctggggctgtgcgggaactccttttcaggagggcagccttcatccacagatgctcctaaggcttggaattatgaattgcctgcaacaaattatgagacccaagactcccataaagctggacccattggcattctctttgaactagtgcatatctttctctatgtggtacagccgcgtgatttcccagaagatactttgagaaaattcttacagaaggcatatgaatccaaaattgattatgacaagattgtctactatgaagcagggattattctatgctgtgtcctggggctgctgtttattattctgatgcctctggtggggtatttcttttgtatgtgtcgttgctgtaacaaatgtggtggagaaatgcaccagcgacagaaggaaaatgggcccttcctgaggaaatgctttgcaatctccctgttggtgatttgtataataataagcattggcatcttctatggttttgtggcaaatcaccaggtaagaacccggatcaaaaggagtcggaaactggcagatagcaatttcaaggacttgcgaactctcttgaatgaaactccagagcaaatcaaatatatattggcccagtacaacactaccaaggacaaggcgttcacagatctgaacagtatcaattcagtgctaggaggcggaattcttgaccgactgagacccaacatcatccctgttcttgatgagattaagtccatggcaacagcgatcaaggagaccaaagaggcgttggagaacatgaacagcaccttgaagagcttgcaccaacaaagtacacagcttagcagcagtctgaccagcgtgaaaactagcctgcggtcatctctcaatgaccctctgtgcttggtgcatccatcaagtgaaacctgcaacagcatcagattgtctctaagccagctgaatagcaaccctgaactgaggcagcttccacccgtggatgcagaacttgacaacgttaataacgttcttaggacagatttggatggcctggtccaacagggctatcaatcccttaatgatatacctgacagagtacaacgccaaaccacgactgtcgtagcaggtatcaaaagggtcttgaattccattggttcagatatcgacaatgtaactcagcgtcttcctattcaggatatactctcagcattctctgtttatgttaataacactgaaagttacatccacagaaatttacctacattggaagagtatgattcatactggtggctgggtggcctggtcatctgctctctgctgaccctcatcgtgattttttactacctgggcttactgtgtggcgtgtgcggctatgacaggcatgccaccccgaccacccgaggctgtgtctccaacaccggaggcgtcttcctcatggttggagttggattaagtttcctcttttgctggatattgatgatcattgtggttcttacctttgtctttggtgcaaatgtggaaaaactgatctgtgaaccttacacgagcaaggaattattccgggttttggatacaccctacttactaaatgaagactgggaatactatctctctgggaagctatttaataaatcaaaaatgaagctcacttttgaacaagtttacagtgactgcaaaaaaaatagaggcacttacggcactcttcacctgcagaacagcttcaatatcagtgaacatctcaacattaatgagcatactggaagcataagcagtgaattggaaagtctgaaggtaaatcttaatatctttctgttgggtgcagcaggaagaaaaaaccttcaggattttgctgcttgtggaatagacagaatgaattatgacagctacttggctcagactggtaaatcccccgcaggagtgaatcttttatcatttgcatatgatctagaagcaaaagcaaacagtttgcccccaggaaatttgaggaactccctgaaaagagatgcacaaactattaaaacaattcaccagcaacgagtccttcctatagaacaatcactgagcactctataccaaagcgtcaagatacttcaacgcacagggaatggattgttggagagagtaactaggattctagcttctctggattttgctcagaacttcatcacaaacaatacttcctctgttattattgaggaaactaagaagtatgggagaacaataataggatattttgaacattatctgcagtggatcgagttctctatcagtgagaaagtggcatcgtgcaaacctgtggccaccgctctagatactgctgttgatgtctttctgtgtagctacattatcgaccccttgaatttgttttggtttggcataggaaaagctactgtatttttacttccggctctaatttttgcggtaaaactggctaagtactatcgtcgaatggattcggaggacgtgtacgatgatgttgaaactatacccatgaaaaatatggaaaatggtaataatggttatcataaagatcatgtatatggtattcacaatcctgttatgacaagcccatcacaacattgatagctgatgttgaaactgcttgagcatcaggatactcaaagtggaaaggatcacagatttttggtagtttctgggagattaataagtatttagtttaagaaaacatttagtaagcctgtcctgtgttcccacacaaagggtataacagcaatatattccataagagtaaagcaaagtaagtaaagttattccaagtaaactaaattagaaggctttccatgaactgggcaactgttgagaccaagctgatatggggttgctagctgttgcagtgtgcttccg

SEQ ID NO: 441117 - DNA, 295 bp, Homo sapiens
gcctgggtgacagagcgagactccatctcaaaaaaaaaaaaaaaaagaaagtacacattgttaattgtgttggttattttttctagaatgaaaccattacagtgtaaagacagatttgatggctatcttgtgggaagggaggacacaaggtatgtgatcttgctgcttcatgtaataattttggaaatattatctgtttcttgccagagcactctataccaaagcgtcaagatacttcaacgcacagggaatggattgttggtaagggtttactttgttttctgtcatggggttt

SEQ ID NO: 441118 - DNA, 1913 bp, Homo sapiens
cctccgtgcatgtcctcccccaacctcatgtgtctgatgcagcactgcagtgaggcacggtggatcctgcaggttcagaggggttgtgatccacctgaagtcacagtcgggcagggtgtgccagagttgaaactgccgaccttccagatggagttcactagtctccccctggcgtatacctttttggttgtcaaggccattatcacagagtcactttagaggacactagggctactgttgatggttcacccagagagccacttagaggccgtgtgcactgcctgatcttacacccaggaatttgtagttgtaacaaggtccctgcggaacttccatttgcttctgtcttctgtcctagaagtggactttagaaagactcttgtggtagacatgtgtactgctgtgttgctgctggtctaatgtcttcaacacgtattcttagtgactcttaacacttttaaccttagattgtgaatattcacaattcttacttgtcatagtctgtttatcctctttatcttctatgctgtttttaaaagcaatacaaacagaagctagagtaaccagtgttttgtctgacacattcttcttgataaactttatgaggtgtggtttatattcgtctgtacctttagtcacatgcctgcttcttagcacagaggtgatgaaaccacccacagctttgttgggggtattatatttctttatttttttgttttttagcccatcacaacattgatagctgatgttgaaactgcttgagcatcaggatactcaaagtggaaaggatcacagatttttggtagtttctgggtctacaaggactttccaaatccaggagcaacgccagtggcaacgtagtgactcaggcgggcaccaaggcaacggcaccattggtctctgggtagtgctttaagaatgaacacaatcacgttatagtccatggtccatcactattcaaggatgactccctcccttcctgtctatttttgttttttacttttttacactgagtttctatttagacactacaacatatggggtgtttgttcccattggatgcatttctatcaaaactctatcaaatgtgatggctagattctaacatattgccatgtgtggagtgtgctgaacacacaccagtttacaggaaagatgcattttgtgtacagtaaacggtgtatataccttttgttaccacagagttttttaaacaaatgagtattataggactttcttctaaatgagctaaataagtcaccattgacttcttggtgctgttgaaaataatccattttcactaaaagtgtgtgaaacctacagcatattcttcacgcagagattttcatctattatactttatcaaagattggccatgttccacttggaaatggcatgcaaaagccatcatagagaaacctgcgtaactccatctgacaaattcaaaagagagagagagatcttgagagagaaatgctgttcgttcaaaagtggagttgttttaacagatgccaattacggtgtacagtttaacagagttttctgttgcattaggataaacattaattggagtgcagctaacatgagtatcatcagactagtatcaagtgttctaaaatgaaatatgagaagatcctgtcacaattcttagatctggtgtccagcatggatgaaacctttgagtttggtccctaaatttgcatgaaagcacaaggtaaatattcatttgcttcaggagtttcatgttggatctgtcattatcaaaagtgatcagcaatgaagaactggtcggacaaaatttaacgttgatgtaatggaattccagatgtaggcattccccccaggtcttttcatgtgcagattgcagttctgattcatttgaataaaaaggaacttggaaaaaaaaaaaaaaa

SEQ ID NO: 441119 - DNA, 1561 bp, Homo sapiens
cccgctgtcgcggctactgcggaacattttcccgtgcgtcgagcagacaaactgctctgagcgcgatgcagagcgtgtccgcagtacacacttgttgccaccggactatatactgctgtggctgccttaccgtggtgtctacgttatcggccgccgtctagatgactggccggtcgtgtcataggaaaagctactgtatttttacttccggctctaatttttgcggtaaaactggctaagtactatcgtcgaatggattcggaggacgtgtacgatgatgttgaaactatacccatgaaaaatatggaaaatggtaataatggttatcataaagatcatgtatatggtattcacaatcctgttatgacaagcccatcacaacattgatagctgatgttgaaactgcttgagcatcaggatactcaaagtggaaaggatcacagatttttggtagtttctgggtctacaaggactttccaaatccaggagcaacgccagtggcaacgtagtgactcaggcgggcaccaaggcaacggcaccattggtctctgggtagtgctttaagaatgaacacaatcacgttatagtccatggtccatcactattcaaggatgactccctcccttcctgtctatttttgttttttacttttttacactgagtttctatttagacactacaacatatggggtgtttgttcccattggatgcatttctatcaaaactctatcaaatgtgatggctagattctaacatattgccatgtgtggagtgtgctgaacacacaccagtttacaggaaagatgcattttgtgtacagtaaacggtgtatataccttttgttaccacagagttttttaaacaaatgagtattataggactttcttctaaatgagctaaataagtcaccattgacttcttggtgctgttgaaaataatccattttcactaaaagtgtgtgaaacctacagcatattcttcacgcagagattttcatctattatactttatcaaagattggccatgttccacttggaaatggcatgcaaaagccatcatagagaaacctgcgtaactccatctgacaaattcaaaagagagagagagatcttgagagagaaatgctgttcgttcaaaagtggagttgttttaacagatgccaattacggtgtacagtttaacagagttttctgttgcattaggataaacattaattggagtgcagctaacatgagtatcatcagactagtatcaagtgttctaaaatgaaatatgagaagatcctgtcacaattcttagatctggtgtccagcatggatgaaacctttgagtttggtccctaaatttgcatgaaagcacaaggtaaatattcatttgcttcaggagtttcatgttggatctgtcattatcaaaagtgatcagcaatgaagaactggtcggacaaaatttaacgttgatgtaatggaattccagatgtaggcattccccccaggtcttttcatgtgcagattgcagttctgattcatttgaataaaaaggaacttggaaaaaaaaaaaaaaa

SEQ ID NO: 441120 - DNA, 3078 bp, Homo sapiens
tgtggcaggagatgtagaataccggtggacagacttatacttgcgaatctgcttggcaccagtaaggatccaaatgattgtttttttgttttttgttttgttttgttttgttttgttttgttttaaattgcattgggattaggcaacagaagggtctaatgcggccgggatgagacaggagagtttttaggagggtagctgcattctaagtaagggactctgcggggggaaaagaggcgcaagcgttgcaagaagggagtgcagggggttgagcaggcacctctacaggaaatggatgctgtccaggtgctggtgggcgccccagggctacgtggcgaagcagctcagccggtccaatcagagtgcgtccagggctcgggtttcgcgatctttaagtgactgaggcagatccccacgcggcacctggccatgctctcagctctcccgccgcgggatggtgccttgagtgaatgacccccttggagaacattcttccgcatccctcgcctcaagccagcctcagacagaaaactgaagattcagcagatccagtgcttcctgctcctcttctgcccaggaacacgcttgccttccccaaggcttccagaagctctgaggcaggaggcaccaagttctacctcatgtttggaggatcttgctagctatggccctcgtactcggctccctgttgctgctggggctgtgcgggaactccttttcaggagggcagccttcatccacagatgctcctaaggcttggaattatgaattgcctgcaacaaattatgagacccaagactcccataaagctggacccattggcattctctttgaactagtgcatatctttctctatgtggtacagccgcgtgatttcccagaagatactttgagaaaattcttacagaaggcatatgaatccaaaattgattatgacaagattgtctactatgaagcagggattattctatgctgtgtcctggggctgctgtttattattctgatgcctctggtggggtatttcttttgtatgtgtcgttgctgtaacaaatgtggtggagaaatgcaccagcgacagaaggaaaatgggcccttcctgaggaaatgctttgcaatctccctgttggtgatttgtataataataagcattggcatcttctatggttttgtggcaaatcaccaggtaagaacccggatcaaaaggagtcggaaactggcagatagcaatttcaaggacttgcgaactctcttgaatgaaactccagagcaaatcaaatatatattggcccagtacaacactaccaaggacaaggcgttcacagatctgaacagtatcaattcagtgctaggaggcggaattcttgaccgactgagacccaacatcatccctgttcttgatgagattaagtccatggcaacagcgatcaaggagaccaaagaggcgttggagaacatgaacagcaccttgaagagcttgcaccaacaaagtacacagcttagcagcagtctgaccagcgtgaaaactagcctgcggtcatctctcaatgaccctctgtgcttggtgcatccatcaagtgaaacctgcaacagcatcagattgtctctaagccagctgaatagcaaccctgaactgaggcagcttccacccgtggatgcagaacttgacaacgttaataacgttcttaggacagatttggatggcctggtccaacagggctatcaatcccttaatgatatacctgacagagtacaacgccaaaccacgactgtcgtagcaggtatcaaaagggtcttgaattccattggttcagatatcgacaatgtaactcagcgtcttcctattcaggatatactctcagcattctctgtttatgttaataacactgaaagttacatccacagaaatttacctacattggaagagtatgattcatactggtggctgggtggcctggtcatctgctctctgctgaccctcatcgtgattttttactacctgggcttactgtgtggcgtgtgcggctatgacaggcatgccaccccgaccacccgaggctgtgtctccaacaccggaggcgtcttcctcatggttggagttggattaagtttcctcttttgctggatattgatgatcattgtggttcttacctttgtctttggtgcaaatgtggaaaaactgatctgtgaaccttacacgagcaaggaattattccgggttttggatacaccctacttactaaatgaagactgggaatactatctctctgggaagctatttaataaatcaaaaatgaagctcacttttgaacaagtttacagtgactgcaaaaaaaatagaggcacttacggcactcttcacctgcagaacagcttcaatatcagtgaacatctcaacattaatgagcatactggaagcataagcagtgaattggaaagtctgaaggtaaatcttaatatctttctgttgggtgcagcaggaagaaaaaaccttcaggattttgctgcttgtggaatagacagaatgaattatgacagctacttggctcagactggtaaatcccccgcaggagtgaatcttttatcatttgcatatgatctagaagcaaaagcaaacagtttgcccccaggaaatttgaggaactccctgaaaagagatgcacaaactattaaaacaattcaccagcaacgagtccttcctatagaacaatcactgagcactctataccaaagcgtcaagatacttcaacgcacagggaatggattgttggagagagtaactaggattctagcttctctggattttgctcagaacttcatcacaaacaatacttcctctgttattattgaggaaactaagaagtatgggagaacaataataggatattttgaacattatctgcagtggatcgagttctctgaagtaagtgaaaggacattgatgtgcaggaccaagacttctggggcttcccaccaggtcagaggacagccacctcctggtcccctttgctcacctttgccatatgcagttcttccatttgcttcccaccccctttttcaggtaacaaaggggccaggtaa

SEQ ID NO: 441121 - DNA, 3964 bp, Homo sapiens
  misc_feature (1395)..(1395): n is a, c, g, or t
atatctggcagctggctatgccatcattgccgaaaacaaactcctataatccaatgctctctcatcacatatcacctcacaacaagcggaactatttgccctaaccaagaccctcactctagcaaagggaaagagggtcaacatttacaccaattccaaatatgcataccatgtcctacagtctcacactgtaatctggcaggaaaggggtttttctaactacaaaaagaaccgccataataaatggcaaactcatacacaagccgctggaggcagctaaactaccactagaggccgtcattatccattgcaagggacaccaaaaggctacagatgccataaccaagggaaacttcttagcagattcggcagcctggcaggcagcccttagaacactattgttattgcccattttccctagcatacacccaagaagaaaaaggtgccttgctggctccagggctgttcataacgaaagctgaatttacttagactacaaactcatcctacccaagacccaaaaactttctgttctcacccacatccataaccaattccatgcgggttatctcccgttgctccaatttctaaaaacctgtatacattcccttaccatggccatcagcttggaccgcctcactaaaggttgctctgcctgcagtcagacttcccctcaggggcccttagaccacctccttttccctcccttcaggcccaaaggccagttgccgggacaggattggcaaattgacttcactcatacgttcccccataaagaaagtctgatatctcctcacgatggtagataccttttcaggtggatagaagcctttcttactaccactgaaaaggcacacaccattgcctctaccttcctcacacacatcatcctttgattcagcctcccctcatctatacaactggacaattgaccagcatttatctcccaagtcactcaacaggtttctaagtctttaaacatcatatgggtttttcacattctctatcacccccaatcctcgggtaaatttgaacaggcgaatgccctcttaaaacaacagttaaccaaactttccctagagatcaaaatgaaaactgaatatcacttcttcccttggcccttatgtgcctcagggccctcccccgaaaacctctaaatctaagtccttttgaacttttgtatggacgttctttcgtcctacagaactttgctccatcccctcccttacaggacacctggccagcactgcacctcactcaacacttagtccgacagtacactgacactcacctccccaaacctgaggattcttcccaattcactttcttacccttacagccaggagactgggtctgggtagcacacccctcctcccctttccaacaaaatggaanggtccctatcaggttatattcaccatccccgctgctgcaaagttaacatcctttccctattgtatacaccattccaaatttaaaaaggcacccggcccacaccccgaagtctcctcaccccggaaatattcttcctttcccacaggaccaacctcgctgtgcctaacaagaattccagaagtcacccatccgaaaggcactggcccatgacactctccacttccaatcttaaatcttttacttcataccttgtctcagatctctcctggtaccccttccccacgcccttagataatccatctcaattcctcatgctaattgaggagctatggctgcaaggcaccttccaggatttcacacctacacaaatctcctttttctccttttgccttctctgcttatgggatattctgagtccccacccccaatcactgacagctgggcccccttcatcagcctcacacaccacgtattaagtcagtcacaatctcccctctcctctaactgctggatttgtctttctacacacacccaatgattcacggctcttccggctgacctacttacatggacacagtccaacgtgagcttacacatttcttacttggctataccattcttggctgattcattcctgaaaccggttcataacctggaaactcagctaaacacctttccttcaaactcagctctctcagcatggtttcaggtagggctgttgccctccttcacctaatagcttctggactaacatccatacaaaccaacacagcatcatctaaaccaccaatatgggggtaccatttctactcaaacttccttcatatccccaccccccttatgtctcagccgaacctaccctaatccagcccacgccacaatggtgggacaggttccccagtccctatgtggtcttatttttacccttgcactccctgtagaccatcaattctacaccctaattacaaaatcatatccacctctgcctggcagaaggtgttatgcttttctggctcgcctaccatccacacatccctacacctcaccaccggatcctcttttctttccttccatccaattcctggcttccccgctgccaactctgctctctatgtctccagtttaaaggtgccccctggaaaaaatgtaacaattccctcacctgtgactggtacctgacagccaccacaccggggcagcaatggctaacggttgacaaagacaatttctttctctctccaaaaccaaacagccttcatcaactccctagccaagactccctatcaggcccttacaggtgccgctctggctggcagttacccaatttgggaaaacgaaaataccctatcatggctacctaccttcacctacaacttctgcctgtccacccccagtctcttctttttgtgtgatacaaactgatatctttgcctaccagccaactggtcaggaacttgcaccctggtctttcaggctccaaccatcaacatcctaccccctaaccaaactattctaatttctgtagaagcctctatctcctcttcacccataagaaataaatgggctctacatctcatcaccctgctaacaggattaggcatcactgctgcacttggcactggaatagcaggcataaccacctcaatcacctcataccaaacactattcacaaccctttctaacaccgtagaagatatgcacacttccattaccagtctccaacgacaattagacttcctcgtgggagtcatccttcaaaactggagagtcctggacctcctaaccactgagaaagggggtacctgcatatacctccaggaagaatgctgtttctgtgttaatgaatctggcattgttcatatcgcagttcgtaggcttcatgacagggctgcagagctttgacatcaagtcgctgactcctggtggcaaggatcatcccttctaagatggataccctgggttgcccccttcctaggacccctgatcttcctcttcctgttactaatgattgggccatgcatatttaaccttgtatcccgcttcatttcccaaaggctgaattgttttatccaggcaagcatgcaaaaacacattgataatatatttcacctttgccacgtctaataccagagcctacgaggaaaccattcggaagctccagaacccaggccctaatcacaacgcccctatccagcaggaagcagccagatgatcaacgacgccctttttcctttttatactaaagtaagaaataagaatgttagcccaaactgcactattttgcagacccctaccattttacaaactggtcagagtggaaaattccaccagggcctgagctgtgagaaacatcctgtcaggcaggtcccaggcctaacccctggctgcactaaattccttcattatcagcagccaaacacaccgcccccaccccattttcacaacaatcccagacctctcctgcccgggactgtaactggtccagcctgtaagcgggaagggggctctggcactagctggtaccccctctccgcaggtctttctcccaataaatctgtgttgccattga

SEQ ID NO: 441122 - DNA, 686 bp, Homo sapiens
agttttgtccttactgcccagtctggagtgcaatggcacaatcttggctcaccacaacctccgcctcctgggttcaagcgattctcctgcctcagcatcctgagtcactgggattacaggtcctgcaaccctggttccagtctggcaagcattgtagacctggctgctgaagactgacggggcccagggtccgctgcccccaccgccatcaccacctcggaacccagggtaacgctgtcagtctttgagcctacgaggaaaccattcggaagctccagaacccaggccctaatcacaacgcccctatccagcaggaagcagccagatgatcaacgacgccctttttcctttttatactaaagtaagaaataagaatgttagcccaaactgcactattttgcagacccctaccattttacaaactggtcagagtggaaaattccaccagggcctgagctgtgagaaacatcctgtcaggcaggtcccaggcctaacccctggctgcactaaattccttcattatcagcagccaaacacaccgcccccaccccattttcacaacaatcccagacctctcctgcccgggactgtaactggtccagcctgtaagcgggaagggggctctggcactagctggtaccccctctccgcaggtctttctcccaataaatctgtgttgccattga

SEQ ID NO: 441123 - DNA, 2818 bp, Homo sapiens
ctagtgacgaggctcgtgttaatcggccgaggctggggacgctaggttccggaacctgacctgagctggggcctgtgcttccagcgggtggtggggggcctggtgtgctggcatcaagtaagccgactacctcggcaaaggcttagggacaagagaccagcagcctgaactggctggggcatccggaaggcttagatcttgtggccaagagttcagaccgtggcgaagtggagagtgacatgcagttggatggcggtgactgcgtggtcctgcaaccctggttccagtctggcaagcattgtagacctggctgctgaagactgacggggcccagggtccgctgcccccaccgccatcaccacctcggaacccagggtaacgctgtcagtctttggaccaacctcgctgtgcctaacaagaattccagaagtcacccatccgaaaggcactggcccatgacactctccacttccaatcttaaatcttttacttcataccttgtctcagatctctcctggtaccccttccccacgcccttagataatccatctcaattcctcatgctaattgaggagctatggctgcaaggcaccttccaggatttcacacctacacaaatctcctttttctccttttgccttctctgcttatgggatattctgagtccccacccccaatcactgacagctgggcccccttcatcagcctcacacaccacgtattaagtcagtcacaatctcccctctcctctaactgctggatttgtctttctacacacacccaatgattcacggctcttccggctgacctacttacatggacacagtccaacgtgagcttacacatttcttacttggctataccattcttggctgattcattcctgaaaccggttcataacctggaaactcagctaaacacctttccttcaaactcagctctctcagcatggtttcaggtagggctgttgccctccttcacctaatagcttctggactaacatccatacaaaccaacacagcatcatctaaaccaccaatatgggggtaccatttctactcaaacttccttcatatccccaccccccttatgtctcagccgaacctaccctaatccagcccacgccacaatggtgggacaggttccccagtccctatgtggtcttatttttacccttgcactccctgtagaccatcaattctacaccctaattacaaaatcatatccacctctgcctggcagaaggtgttatgcttttctggctcgcctaccatccacacatccctacacctcaccaccggatcctcttttctttccttccatccaattcctggcttccccgctgccaactctgctctctatgtctccagtttaaaggtgccccctggaaaaaatgtaacaattccctcacctgtgactggtacctgacagccaccacaccggggcagcaatggctaacggttgacaaagacaatttctttctctctccaaaaccaaacagccttcatcaactccctagccaagactccctatcaggcccttacaggtgccgctctggctggcagttacccaatttgggaaaacgaaaataccctatcatggctacctaccttcacctacaacttctgcctgtccacccccagtctcttctttttgtgtgatacaaactgatatctttgcctaccagccaactggtcaggaacttgcaccctggtctttcaggctccaaccatcaacatcctaccccctaaccaaactattctaatttctgtagaagcctctatctcctcttcacccataagaaataaatgggctctacatctcatcaccctgctaacaggattaggcatcactgctgcacttggcactggaatagcaggcataaccacctcaatcacctcataccaaacactattcacaaccctttctaacaccgtagaagatatgcacacttccattaccagtctccaacgacaattagacttcctcgtgggagtcatccttcaaaactggagagtcctggacctcctaaccactgagaaagggggtacctgcatatacctccaggaagaatgctgtttctgtgttaatgaatctggcattgttcatatcgcagttcgtaggcttcatgacagggctgcagagctttgacatcaagtcgctgactcctggtggcaaggatcatcccttctaagatggataccctgggttgcccccttcctaggacccctgatcttcctcttcctgttactaatgattgggccatgcatatttaaccttgtatcccgcttcatttcccaaaggctgaattgttttatccaggcaagcatgcaaaaacacattgataatatatttcacctttgccacgtctaataccagagcctacgaggaaaccattcggaagctccagaacccaggccctaatcacaacgcccctatccagcaggaagcagccagatgatcaacgacgccctttttcctttttatactaaagtaagaaataagaatgttagcccaaactgcactattttgcagacccctaccattttacaaactggtcagagtggaaaattccaccagggcctgagctgtgagaaacatcctgtcaggcaggtcccaggcctaacccctggctgcactaaattccttcattatcagcagccaaacacaccgcccccaccccattttcacaacaatcccagacctctcctgcccgggactgtaactggtccagcctgtaagcgggaagggggctctggcactagctggtaccccctctccgcaggtctttctcccaataaatctgtgttgccattga

SEQ ID NO: 441124 - DNA, 2954 bp, Homo sapiens
ctagtgacgaggctcgtgttaatcggccgaggctggggacgctaggttccggaacctgacctgagctggggcctgtgcttccagcgggtggtggggggcctggtgtgctggcatcaagtaagccgactacctcggcaaaggcttagggacaagagaccagcagcctgaactggctggggcatccggaaggcttagatcttgtggccaagagttcagaccgtggcgaagtggagagtgacatgcagttggatggcggtgactgcgtgcattccacaatcacgggctacttcaattctgcctgctgagctgatttaataatctggaagaggattattctcccccatctggaagaggattattctctataatcccagttagagacacaatgacataaacatcgctgtcctgcaaccctggttccagtctggcaagcattgtagacctggctgctgaagactgacggggcccagggtccgctgcccccaccgccatcaccacctcggaacccagggtaacgctgtcagtctttggaccaacctcgctgtgcctaacaagaattccagaagtcacccatccgaaaggcactggcccatgacactctccacttccaatcttaaatcttttacttcataccttgtctcagatctctcctggtaccccttccccacgcccttagataatccatctcaattcctcatgctaattgaggagctatggctgcaaggcaccttccaggatttcacacctacacaaatctcctttttctccttttgccttctctgcttatgggatattctgagtccccacccccaatcactgacagctgggcccccttcatcagcctcacacaccacgtattaagtcagtcacaatctcccctctcctctaactgctggatttgtctttctacacacacccaatgattcacggctcttccggctgacctacttacatggacacagtccaacgtgagcttacacatttcttacttggctataccattcttggctgattcattcctgaaaccggttcataacctggaaactcagctaaacacctttccttcaaactcagctctctcagcatggtttcaggtagggctgttgccctccttcacctaatagcttctggactaacatccatacaaaccaacacagcatcatctaaaccaccaatatgggggtaccatttctactcaaacttccttcatatccccaccccccttatgtctcagccgaacctaccctaatccagcccacgccacaatggtgggacaggttccccagtccctatgtggtcttatttttacccttgcactccctgtagaccatcaattctacaccctaattacaaaatcatatccacctctgcctggcagaaggtgttatgcttttctggctcgcctaccatccacacatccctacacctcaccaccggatcctcttttctttccttccatccaattcctggcttccccgctgccaactctgctctctatgtctccagtttaaaggtgccccctggaaaaaatgtaacaattccctcacctgtgactggtacctgacagccaccacaccggggcagcaatggctaacggttgacaaagacaatttctttctctctccaaaaccaaacagccttcatcaactccctagccaagactccctatcaggcccttacaggtgccgctctggctggcagttacccaatttgggaaaacgaaaataccctatcatggctacctaccttcacctacaacttctgcctgtccacccccagtctcttctttttgtgtgatacaaactgatatctttgcctaccagccaactggtcaggaacttgcaccctggtctttcaggctccaaccatcaacatcctaccccctaaccaaactattctaatttctgtagaagcctctatctcctcttcacccataagaaataaatgggctctacatctcatcaccctgctaacaggattaggcatcactgctgcacttggcactggaatagcaggcataaccacctcaatcacctcataccaaacactattcacaaccctttctaacaccgtagaagatatgcacacttccattaccagtctccaacgacaattagacttcctcgtgggagtcatccttcaaaactggagagtcctggacctcctaaccactgagaaagggggtacctgcatatacctccaggaagaatgctgtttctgtgttaatgaatctggcattgttcatatcgcagttcgtaggcttcatgacagggctgcagagctttgacatcaagtcgctgactcctggtggcaaggatcatcccttctaagatggataccctgggttgcccccttcctaggacccctgatcttcctcttcctgttactaatgattgggccatgcatatttaaccttgtatcccgcttcatttcccaaaggctgaattgttttatccaggcaagcatgcaaaaacacattgataatatatttcacctttgccacgtctaataccagagcctacgaggaaaccattcggaagctccagaacccaggccctaatcacaacgcccctatccagcaggaagcagccagatgatcaacgacgccctttttcctttttatactaaagtaagaaataagaatgttagcccaaactgcactattttgcagacccctaccattttacaaactggtcagagtggaaaattccaccagggcctgagctgtgagaaacatcctgtcaggcaggtcccaggcctaacccctggctgcactaaattccttcattatcagcagccaaacacaccgcccccaccccattttcacaacaatcccagacctctcctgcccgggactgtaactggtccagcctgtaagcgggaagggggctctggcactagctggtaccccctctccgcaggtctttctcccaataaatctgtgttgccattga

SEQ ID NO: 441125 - DNA, 3290 bp, Homo sapiens
  misc_feature (2996)..(2996): n is a, c, g, or t
  misc_feature (2999)..(3000): n is a, c, g, or t
ctagtgacgaggctcgtgttaatcggccgaggctggggacgctaggttccggaacctgacctgagctggggcctgtgcttccagcgggtggtggggggcctggtgtgctggcatcaagtaagccgactacctcggcaaaggcttagggacaagagaccagcagcctgaactggctggggcatccggaaggcttagatcttgtggccaagagttcagaccgtggcgaagtggagagtgacatgcagttggatggcggtgactgcgtggtatggaagaaaattcagctgaaatttgctagaaaatgagttgttttggaaagagactgtagagaaaggcaaatggaagaagaaagcttctgtgcccccacagataccgactgaaaagtgttagcatgagcaaaagttcctatctaatattatatgctttcctttgctcccaggtcctgcaaccctggttccagtctggcaagcattgtagacctggctgctgaagactgacggggcccagggtccgctgcccccaccgccatcaccacctcggaacccagggtaacgctgtcagtctttggaccaacctcgctgtgcctaacaagaattccagaagtcacccatccgaaaggcactggcccatgacactctccacttccaatcttaaatcttttacttcataccttgtctcagatctctcctggtaccccttccccacgcccttagataatccatctcaattcctcatgctaattgaggagctatggctgcaaggcaccttccaggatttcacacctacacaaatctcctttttctccttttgccttctctgcttatgggatattctgagtccccacccccaatcactgacagctgggcccccttcatcagcctcacacaccacgtattaagtcagtcacaatctcccctctcctctaactgctggatttgtctttctacacacacccaatgattcacggctcttccggctgacctacttacatggacacagtccaacgtgagcttacacatttcttacttggctataccattcttggctgattcattcctgaaaccggttcataacctggaaactcagctaaacacctttccttcaaactcagctctctcagcatggtttcaggtagggctgttgccctccttcacctaatagcttctggactaacatccatacaaaccaacacagcatcatctaaaccaccaatatgggggtaccatttctactcaaacttccttcatatccccaccccccttatgtctcagccgaacctaccctaatccagcccacgccacaatggtgggacaggttccccagtccctatgtggtcttatttttacccttgcactccctgtagaccatcaattctacaccctaattacaaaatcatatccacctctgcctggcagaaggtgttatgcttttctggctcgcctaccatccacacatccctacacctcaccaccggatcctcttttctttccttccatccaattcctggcttccccgctgccaactctgctctctatgtctccagtttaaaggtgccccctggaaaaaatgtaacaattccctcacctgtgactggtacctgacagccaccacaccggggcagcaatggctaacggttgacaaagacaatttctttctctctccaaaaccaaacagccttcatcaactccctagccaagactccctatcaggcccttacaggtgccgctctggctggcagttacccaatttgggaaaacgaaaataccctatcatggctacctaccttcacctacaacttctgcctgtccacccccagtctcttctttttgtgtgatacaaactgatatctttgcctaccagccaactggtcaggaacttgcaccctggtctttcaggctccaaccatcaacatcctaccccctaaccaaactattctaatttctgtagaagcctctatctcctcttcacccataagaaataaatgggctctacatctcatcaccctgctaacaggattaggcatcactgctgcacttggcactggaatagcaggcataaccacctcaatcacctcataccaaacactattcacaaccctttctaacaccgtagaagatatgcacacttccattaccagtctccaacgacaattagacttcctcgtgggagtcatccttcaaaactggagagtcctggacctcctaaccactgagaaagggggtacctgcatatacctccaggaagaatgctgtttctgtgttaatgaatctggcattgttcatatcgcagttcgtaggcttcatgacagggctgcagagctttgacatcaagtcgctgactcctggtggcaaggatcatcccttctaagatggataccctgggttgcccccttcctaggacccctgatcttcctcttcctgttactaatgattgggccatgcatatttaaccttgtatcccgcttcatttcccaaaggctgaattgttttatccaggcaagcatgcaaaaacacattgataatatatttcacctttgccacgtctaataccagagcctacgaggaaaccattcggaagctccagaacccaggccctaatcacaacgcccctatccagcaggaagcagccagatgatcaacgacgccctttttcctttttatactaaagtaagaaataagaatgttagcccaaactgcactattttgcagacccctaccattttacaaactggtcagagtggaaaattccaccagggcctgagctgtgagaaacatcctgtcaggcaggtcccaggcctaacccctggctgcactaaattccttcattatcagcagccaaacacaccgcccccaccccattttcacaacaatcccagacctctcctgcccgggactgtaactggtccagcctgtaagcgggaagggggctctggcactagctggtaccccctctccgcaggtctttctcccaataaatctgtgttgccattgaaaaanaannaaaaaaaaaaagagaaaaaaaagaaaaaaaaaacaaaaagaagacaagctgctacaaaacacgaaagacaagatcaaacgataccagaaacgacagcacaaagaacagcaatcaggaacacaaaacaagaaaaaggcgaggggggagcaaaggagaactcgccgagagaggccacaacgatccgagacccccgcacgtgtagtgagagacacagagtcaaaagaaagtcgaacatacaactgcgcaccgaccacgaacacaaacaaacaccggggagagaacacactgag

SEQ ID NO: 441126 - DNA, 1006 bp, Homo sapiens
ctagtgacgaggctcgtgttaatcggccgaggctggggacgctaggttccggaacctgacctgagctggggcctgtgcttccagcgggtggtggggggcctggtgtgctggcatcaagtaagccgactacctcggcaaaggcttagggacaagagaccagcagcctgaactggctggggcatccggaaggcttagatcttgtggccaagagttcagaccgtggcgaagtggagagtgacatgcagttggatggcggtgactgcgtggtatggaagaaaattcagctgaaatttgctagaaaatgagttgttttggaaagagactgtagagaaaggcaaatggaagaagaaagcttctgtgcccccacagataccgactgaaaagtgttagcatgagcaaaagttcctatctaatattatatgctttcctttgctcccaggtcctgcaaccctggttccagtctggcaagcattgtagacctggctgctgaagactgacggggcccagggtccgctgcccccaccgccatcaccacctcggaacccagggtaacgctgtcagtctttgagcctacgaggaaaccattcggaagctccagaacccaggccctaatcacaacgcccctatccagcaggaagcagccagatgatcaacgacgccctttttcctttttatactaaagtaagaaataagaatgttagcccaaactgcactattttgcagacccctaccattttacaaactggtcagagtggaaaattccaccagggcctgagctgtgagaaacatcctgtcaggcaggtcccaggcctaacccctggctgcactaaattccttcattatcagcagccaaacacaccgcccccaccccattttcacaacaatcccagacctctcctgcccgggactgtaactggtccagcctgtaagcgggaagggggctctggcactagctggtaccccctctccgcaggtctttctcccaataaatctgtgttgccattga

SEQ ID NO: 441127 - DNA, 2140 bp, Homo sapiens
ctagtgacgaggctcgtgttaatcggccgaggctggggacgctaggttccggaacctgacctgagctggggcctgtgcttccagcgggtggtggggggcctggtgtgctggcatcaagtaagccgactacctcggcaaaggcttagggacaagagaccagcagcctgaactggctggggcatccggaaggcttagatcttgtggccaagagttcagaccgtggcgaagtggagagtgacatgcagttggatggcggtgactgcgtggtatggaagaaaattcagctgaaatttgctagaaaatgagttgttttggaaagagactgtagagaaaggcaaatggaagaagaaagcttctgtgcccccacagataccgactgaaaagtgttagcatgagcaaaagttcctatctaatattatatgctttcctttgctcccagaagtgctgggattacaggcgtgagccaccatgctcagccaaagctgttatttttttaagtatgtattcctagatgttttatacttttatagttattgtgaatggaatgatttttttcctagataacttttaatgaatagaaacagttcctgctttatctccaaattctagaacagtcactggcacacaagtgctcagtgtttaagtgacattgttttcctgcacccaaaagtagaatgctgctcctcattggaagcatgttactttagcaaagtgccactaaaatgaccatagtccatgtgctctgatcacttgtcacagatggtgataaaattcattcacagcttcctttctaggcctgcagcatttgggagacaaaactctgctaaacctttggaagaaaaaagagaccagaggccattggtcccgaaaagtggatggaagatagggaggtagaaggaatgttacaggctgagagggcagctcacactcagctccagccacttcacctcgtgcacacactggctgagggttgccagatgtttgagaaaagctaggaatccagaccattgttaaccattggcaactatagggaacatacagaaagcatctgaactggatgtggtagagctcccagatcatgatctgattgagaatgtccatgaacttctgtcctgattgctcagtgcagactgctgcttcttctggcaagactcctctcttcgcattgacctggagttgtcacaaaatctgtttttctcttgctactcccctgagcatggcaccttctgccagagcgctcccttaactgtgtgggcaggctctgcttcacagctccccgcccactctgcccaagcagaagtgagcccctcctgggcagaaagtgcccgcaatgagggctgaaatgtttctattccctgagtaaccaacctttctctgtttccttgtccaggaaacggaggtggagctgtacaacgaatttcctgaacctatcaaactggacaagaatgaccgggccaaggcctcggcagaaagctgcagttgctgagggggcagtgagagttgagcacagagtccttcacaaaccaagaacacacgtaggccttcaacacaattcccctctcctcttccaaacaaaacatacattgatctctcacatccagctgccaaaagaaaaccccatcaaacacagttacaccccacatatctctcacacacacacacacacacagatctgacgtaatcaaactccagcccttgcccgtgatggctccttggggtctgcctgcccacccacatgagcccgcgagtatggcagcaggacaagccagcggtggaagtcattctgatatggagttggcattggaagcttattctttttgttcactggagagagagagaactgtttacagttaatctgtgtctaattatctgattttttttattggtcttgtggtctttttaccccccctttcccctccctccttgaaggctaccccttgggaaggctggtgccccatgccccattacaggctcacacccagtctgatcaggctgagttttgtatgtatctatctgttaatgcttgttacttttaactaatcagatctttttacagtatccatttattatgtaatgcttcttagaaaagaatcttatagtacatgttaatatatgcaaccaattaaaatgtataaattag

SEQ ID NO: 441128 - DNA, 894 bp, Homo sapiens
ctagtgacgaggctcgtgttaatcggccgaggctggggacgctaggttccggaacctgacctgagctggggcctgtgcttccagcgggtggtggggggcctggtgtgctggcatcaagtaagccgactacctcggcaaaggcttagggacaagagaccagcagcctgaactggctggggcatccggaaggcttagatcttgtggccaagagttcagaccgtggcgaagtggagagtgacatgcagttggatggcggtgactgcgtggtcctgcaaccctggttccagtctggcaagcattgtagacctggctgctgaagactgacggggcccagggtccgctgcccccaccgccatcaccacctcggaacccagggtaacgctgtcagtctttgatgatgtcagaagtgggatccaaagtagagcttataatgacacctaggagtgctgagtgaccaagcaaggtacccaccaggccgattatgtccattgttctcttggagcagctggtcatcatggtaagttctctctcagattcagaagctccgcatatttgtgttttgagctctccaagtttctatgagcccatttctaatccaaactgcgtttggaagtcatgccaaaaactgaactgggtccagaatcaaattagatctggtaattaagtggcttggatccagttagaggcctcttacatctgactgggtcagaagaaaaccagtagtaaatggcaataatgcaaggataaaatttggctttcactcttgaacaagattttcatgtaatattaaagaataatgaatgttttttttcaactttgaataaactacaggaaaaaaaaagaaagatacaacaaaagattgtttggaaagctaagtcttccctctattaatga

SEQ ID NO: 441129 - DNA, 546 bp, Homo sapiens
ctagtgacgaggctcgtgttaatcggccgaggctggggacgctaggttccggaacctgacctgagctggggcctgtgcttccagcgggtggtggggggcctggtgtgctggcatcaagtaagccgactacctcggcaaaggcttagggacaagagaccagcagcctgaactggctggggcatccggaaggcttagatcttgtggccaagagttcagaccgtggcgaagtggagagtgacatgcagttggatggcggtgactgcgtggtcctgcaaccctggttccagtctggcaagcattgtagacctggctgctgaagactgacggggcccagggtccgctgcccccaccgccatcaccacctcggaacccagggtaacgctgtcagtctttggtaagcccatgctcttccttttagatctggggactagttactcagttttatcagaatattcttgaccctcctcagttcttctatctctattgtgagagtcaatggaatcccctctaggcacatactggtcccctattatgcaacctattcaa

SEQ ID NO: 441130 - DNA, 2991 bp, Homo sapiens
ctagtgacgaggctcgtgttaatcggccgaggctggggacgctaggttccggaacctgacctgagctggggcctgtgcttccagcgggtggtggggggcctggtgtgctggcatcaagtaagccgactacctcggcaaaggcttagggacaagagaccagcagcctgaactggctggggcatccggaaggcttagatcttgtggccaagagttcagaccgtggcgaagtggagagtgacatgcagttggatggcggtgactgcgtggtatggaagaaaattcagctgaaatttgctagaaaatgagttgttttggaaagagactgtagagaaaggcaaatggaagaagaaagcttctgtgcccccacagataccgactgaaaagtgttagcatgagcaaaagttcctatctaatattatatgctttcctttgctcccaggtcctgcaaccctggttccagtctggcaagcattgtagacctggctgctgaagactgacggggcccagggtccgctgcccccaccgccatcaccacctcggaacccagggtaacgctgtcagtctttggaccaacctcgctgtgcctaacaagaattccagaagtcacccatccgaaaggcactggcccatgacactctccacttccaatcttaaatcttttacttcataccttgtctcagatctctcctggtaccccttccccacgcccttagataatccatctcaattcctcatgctaattgaggagctatggctgcaaggcaccttccaggatttcacacctacacaaatctcctttttctccttttgccttctctgcttatgggatattctgagtccccacccccaatcactgacagctgggcccccttcatcagcctcacacaccacgtattaagtcagtcacaatctcccctctcctctaactgctggatttgtctttctacacacacccaatgattcacggctcttccggctgacctacttacatggacacagtccaacgtgagcttacacatttcttacttggctataccattcttggctgattcattcctgaaaccggttcataacctggaaactcagctaaacacctttccttcaaactcagctctctcagcatggtttcaggtagggctgttgccctccttcacctaatagcttctggactaacatccatacaaaccaacacagcatcatctaaaccaccaatatgggggtaccatttctactcaaacttccttcatatccccaccccccttatgtctcagccgaacctaccctaatccagcccacgccacaatggtgggacaggttccccagtccctatgtggtcttatttttacccttgcactccctgtagaccatcaattctacaccctaattacaaaatcatatccacctctgcctggcagaaggtgttatgcttttctggctcgcctaccatccacacatccctacacctcaccaccggatcctcttttctttccttccatccaattcctggcttccccgctgccaactctgctctctatgtctccagtttaaaggtgccccctggaaaaaatgtaacaattccctcacctgtgactggtacctgacagccaccacaccggggcagcaatggctaacggttgacaaagacaatttctttctctctccaaaaccaaacagccttcatcaactccctagccaagactccctatcaggcccttacaggtgccgctctggctggcagttacccaatttgggaaaacgaaaataccctatcatggctacctaccttcacctacaacttctgcctgtccacccccagtctcttctttttgtgtgatacaaactgatatctttgcctaccagccaactggtcaggaacttgcaccctggtctttcaggctccaaccatcaacatcctaccccctaaccaaactattctaatttctgtagaagcctctatctcctcttcacccataagaaataaatgggctctacatctcatcaccctgctaacaggattaggcatcactgctgcacttggcactggaatagcaggcataaccacctcaatcacctcataccaaacactattcacaaccctttctaacaccgtagaagatatgcacacttccattaccagtctccaacgacaattagacttcctcgtgggagtcatccttcaaaactggagagtcctggacctcctaaccactgagaaagggggtacctgcatatacctccaggaagaatgctgtttctgtgttaatgaatctggcattgttcatatcgcagttcgtaggcttcatgacagggctgcagagctttgacatcaagtcgctgactcctggtggcaaggatcatcccttctaagatggataccctgggttgcccccttcctaggacccctgatcttcctcttcctgttactaatgattgggccatgcatatttaaccttgtatcccgcttcatttcccaaaggctgaattgttttatccaggcaagcatgcaaaaacacattgataatatatttcacctttgccacgtctaataccagagcctacgaggaaaccattcggaagctccagaacccaggccctaatcacaacgcccctatccagcaggaagcagccagatgatcaacgacgccctttttcctttttatactaaagtaagaaataagaatgttagcccaaactgcactattttgcagacccctaccattttacaaactggtcagagtggaaaattccaccagggcctgagctgtgagaaacatcctgtcaggcaggtcccaggcctaacccctggctgcactaaattccttcattatcagcagccaaacacaccgcccccaccccattttcacaacaatcccagacctctcctgcccgggactgtaactggtccagcctgtaagcgggaagggggctctggcactagctggtaccccctctccgcaggtctttctcccaataaatctgtgttgccattga

SEQ ID NO: 441131 - DNA, 1911 bp, Homo sapiens
aaaaaccttacggctaggtacgaggcctgggtggtgtcagcatggtttcaggtagggctgttgccctccttcacctaatagcttctggactaacatccatacaaaccaacacagcatcatctaaaccaccaatatgggggtaccatttctactcaaacttccttcatatccccaccccccttatgtctcagccgaacctaccctaatccagcccacgccacaatggtgggacaggttccccagtccctatgtggtcttatttttacccttgcactccctgtagaccatcaattctacaccctaattacaaaatcatatccacctctgcctggcagaaggtgttatgcttttctggctcgcctaccatccacacatccctacacctcaccaccggatcctcttttctttccttccatccaattcctggcttccccgctgccaactctgctctctatgtctccagtttaaaggtgccccctggaaaaaatgtaacaattccctcacctgtgactggtacctgacagccaccacaccggggcagcaatggctaacggttgacaaagacaatttctttctctctccaaaaccaaacagccttcatcaactccctagccaagactccctatcaggcccttacaggtgccgctctggctggcagttacccaatttgggaaaacgaaaataccctatcatggctacctaccttcacctacaacttctgcctgtccacccccagtctcttctttttgtgtgatacaaactgatatctttgcctaccagccaactggtcaggaacttgcaccctggtctttcaggctccaaccatcaacatcctaccccctaaccaaactattctaatttctgtagaagcctctatctcctcttcacccataagaaataaatgggctctacatctcatcaccctgctaacaggattaggcatcactgctgcacttggcactggaatagcaggcataaccacctcaatcacctcataccaaacactattcacaaccctttctaacaccgtagaagatatgcacacttccattaccagtctccaacgacaattagacttcctcgtgggagtcatccttcaaaactggagagtcctggacctcctaaccactgagaaagggggtacctgcatatacctccaggaagaatgctgtttctgtgttaatgaatctggcattgttcatatcgcagttcgtaggcttcatgacagggctgcagagctttgacatcaagtcgctgactcctggtggcaaggatcatcccttctaagatggataccctgggttgcccccttcctaggacccctgatcttcctcttcctgttactaatgattgggccatgcatatttaaccttgtatcccgcttcatttcccaaaggctgaattgttttatccaggcaagcatgcaaaaacacattgataatatatttcacctttgccacgtctaataccagagcctacgaggaaaccattcggaagctccagaacccaggccctaatcacaacgcccctatccagcaggaagcagccagatgatcaacgacgccctttttcctttttatactaaagtaagaaataagaatgttagcccaaactgcactattttgcagacccctaccattttacaaactggtcagagtggaaaattccaccagggcctgagctgtgagaaacatcctgtcaggcaggtcccaggcctaacccctggctgcactaaattccttcattatcagcagccaaacacaccgcccccaccccattttcacaacaatcccagacctctcctgcccgggactgtaactggtccagcctgtaagcgggaagggggctctggcactagctggtaccccctctccgcaggtctttctcccaataaatctgtgttgccattga

SEQ ID NO: 441132 - DNA, 3048 bp, Homo sapiens
  misc_feature (3012)..(3012): n is a, c, g, or t
ctagtgacgaggctcgtgttaatcggccgaggctggggacgctaggttccggaacctgacctgagctggggcctgtgcttccagcgggtggtggggggcctggtgtgctggcatcaagtaagccgactacctcggcaaaggcttagggacaagagaccagcagcctgaactggctggggcatccggaaggcttagatcttgtggccaagagttcagaccgtggcgaagtggagagtgacatgcagttggatggcggtgactgcgtggtatggaagaaaattcagctgaaatttgctagaaaatgagttgttttggaaagagactgtagagaaaggcaaatggaagaagaaagcttctgtgcccccacagataccgactgaaaagtgttagcatgagcaaaagttcctatctaatattatatgctttcctttgctcccaggtcctgcaaccctggttccagtctggcaagcattgtagacctggctgctgaagactgacggggcccagggtccgctgcccccaccgccatcaccacctcggaacccagggtaacgctgtcagtctttggaccaacctcgctgtgcctaacaagaattccagaagtcacccatccgaaaggcactggcccatgacactctccacttccaatcttaaatcttttacttcataccttgtctcagatctctcctggtaccccttccccacgcccttagataatccatctcaattcctcatgctaattgaggagctatggctgcaaggcaccttccaggatttcacacctacacaaatctcctttttctccttttgccttctctgcttatgggatattctgagtccccacccccaatcactgacagctgggcccccttcatcagcctcacacaccacgtattaagtcagtcacaatctcccctctcctctaactgctggatttgtctttctacacacacccaatgattcacggctcttccggctgacctacttacatggacacagtccaacgtgagcttacacatttcttacttggctataccattcttggctgattcattcctgaaaccggttcataacctggaaactcagctaaacacctttccttcaaactcagctctctcagcatggtttcaggtagggctgttgccctccttcacctaatagcttctggactaacatccatacaaaccaacacagcatcatctaaaccaccaatatgggggtaccatttctactcaaacttccttcatatccccaccccccttatgtctcagccgaacctaccctaatccagcccacgccacaatggtgggacaggttccccagtccctatgtggtcttatttttacccttgcactccctgtagaccatcaattctacaccctaattacaaaatcatatccacctctgcctggcagaaggtgttatgcttttctggctcgcctaccatccacacatccctacacctcaccaccggatcctcttttctttccttccatccaattcctggcttccccgctgccaactctgctctctatgtctccagtttaaaggtgccccctggaaaaaatgtaacaattccctcacctgtgactggtacctgacagccaccacaccggggcagcaatggctaacggttgacaaagacaatttctttctctctccaaaaccaaacagccttcatcaactccctagccaagactccctatcaggcccttacaggtgccgctctggctggcagttacccaatttgggaaaacgaaaataccctatcatggctacctaccttcacctacaacttctgcctgtccacccccagtctcttctttttgtgtgatacaaactgatatctttgcctaccagccaactggtcaggaacttgcaccctggtctttcaggctccaaccatcaacatcctaccccctaaccaaactattctaatttctgtagaagcctctatctcctcttcacccataagaaataaatgggctctacatctcatcaccctgctaacaggattaggcatcactgctgcacttggcactggaatagcaggcataaccacctcaatcacctcataccaaacactattcacaaccctttctaacaccgtagaagatatgcacacttccattaccagtctccaacgacaattagacttcctcgtgggagtcatccttcaaaactggagagtcctggacctcctaaccactgagaaagggggtacctgcatatacctccaggaagaatgctgtttctgtgttaatgaatctggcattgttcatatcgcagttcgtaggcttcatgacagggctgcagagctttgacatcaagtcgctgactcctggtggcaaggatcatcccttctaagatggataccctgggttgcccccttcctaggacccctgatcttcctcttcctgttactaatgattgggccatgcatatttaaccttgtatcccgcttcatttcccaaaggctgaattgttttatccaggcaagcatgcaaaaacacattgataatatatttcacctttgccacgtctaataccagagcctacgaggaaaccattcggaagctccagaacccaggccctaatcacaacgcccctatccagcaggaagcagccagatgatcaacgacgccctttttcctttttatactaaagtaagaaataagaatgttagcccaaactgcactattttgcagacccctaccattttacaaactggtcagagtggaaaattccaccagggcctgagctgtgagaaacatcctgtcaggcaggtcccaggcctaacccctggctgcactaaattccttcattatcagcagccaaacacaccgcccccaccccattttcacaacaatcccagacctctcctgcccgggactgtaactggtccagcctgtaagcgggaagggggctctggcactagctggtaccccctctccgcaggtctttctcccaataaatctgtgttgccattgatgctggtcgcccgaagccggncccccttgtcccgcccaccccccccgcgcgactatt

SEQ ID NO: 441133 - DNA, 552 bp, Homo sapiens
atctgataaattctattattttcccatatcagtagttgagctagtactgatatgggtaatatttatattatggataataaagcttgtacttatgaaatgtaagggaacaagcaaattttatatagaaattgaaaaattagagtttcagtgtattttactcctaacttaaaaaaacccagatatcctcttgaaccactctcagcagctcttctcaagttgcacagccaagtttgcagatggacagcagtgctctgtgccagtttttgacattacacatcagacacctctgtgtgaagaacatgccaaaaaaatggtaagttctgcaacagaggctttcaaactttttgtagctatccactgtaggaagtattttataacttagcacaaactatgtatgtatataaatcactgaaacaagttttgagagaggatttttattcccttaagatacattttattaccttaagatatgtatcttatacatagcagaatttctaaatactctctttgttcctatgtctctaagtttttgctttcttatatacaattcta

SEQ ID NO: 441134 - DNA, 2594 bp, Homo sapiens
ggcacgaggcaatctgcttcatcctgattctgcggcattccaaactgtggtatccttgggggttctcttaacattgctatggtgcagaagatttaaaatcagctgatgttcacaaggaatagagtcacgtgatgtatgaagggaaacatatacacttctctgaggttgacaataagcccttgtgctcatatagccccaaactgtgcaagcagaggcgactcaacggctacgccttctgtatcagacacgttctggaggacaagactgcccccttcaagcaatgtgaatatgtggccaagtataacagccaacgctgcaccaaccccatccccaaatcagaggatcgtaggtactgcaacagccacttgcaggtacttggctttatcccgaaaaaagagaggaagaaaaagaatgatcctatagatgaggtgaaggtcaggcaccagatggataccatggcctttagcctgacagtgcccacgttggccttgaagatgcccaacggactggatggaatgtccctctctccacctggggcaagggtccctctccactacctggaaactgaattggaagacccatttgctttcaatgaggaagatgatgacctaaagaaaggggcaactgtgagaaagaagttgcagagcaagttggcccagaatcggcagcgccagagagagacagagattttaaaagttcgacaagagcactttagtccccctcctgcaccttcacagcagcagcctccgcagcagcactcccacctgtcacctttatctacttctttaaaacctccagcgccaccgcagggttcagtctgcaagtcacctcaacctcagaacaccagcctaccaatgcagggagtggcacccaccacacacactatagcacaagcacggcagttgtctcacaagaggcctctgcccctcctgccatccagtagggctcccactgtggacccacccaggactgaccggatcctcatgaaagccacagccttctctccacacttctcatgtataagccgactgcagagactggtgaaactgtgcacccagaaacatcagttggacactgatctgtttccccatttaggtttggactggtctgaagagagcggagaggaaccagaggactcagagcaggcctcgccctaccaggttgcatggtccatccgggaaaccctcagatatcaaagacatgcgtcagatgatgatgatgcggagagtaggagctccagggtgactcaactttgcacttactttcagcagaaatataagcacctctgccgcctggagcgggcagaatctcgtcaaaagaaatgccggcatacgtttaggaaagctttgctgcaggcggccagtaaagaaccagaatgcactggtcagttaatacaagaactgcggagagctgcatgcagtcgaaccagcataagccggaccaagctgagggaggtggaaccagcagcatgcagtggaaccgtgaagggtgaacagtgcgctaacaaagcccttccattcaccagacattgtttccaacatatcctcttgaaccactctcagcagctcttctcaagttgcacagccaagtttgcagatggacagcagtgctctgtgccagtttttgacattacacatcagacacctctgtgtgaagaacatgccaaaaaaatggataatttcttgagaggagataactcccgtaaagttcagcaccagcagcagaggaaacccaggaaaaaaaccaagcctcctgcactaaccaaaaaacacaagaagaagagaaggcgtggacctcgtcgaccccaaaaacccattccacctgcagtcccccaagggaacctcagcatgcctgccagcgtctcactgccagtggaggcctctcacatccggagcccatccacgccagagctgagtgctgatgagttgccggatgacattgccaatgagatcactgacattccacatgacttggaattgaaccaggaggacttttcagatgtcctgccacggctacctgatgacttacaagattttgatttttttgaagggaagaatggagacctcctcccaactaccgaagaggctgaggagcttgaacgggccttgcaggctgtaacttctctcgagtgcctgagtaccattggggtccttgcccagtcagatggtgtgccagtccaggagttgtcagatagaggaataggggtgttctccacaggtactggagcttcaggaatacaatccttgagccgagaggtgaacacagacctaggggagctattgaatgggcgtatagtacatgataatttttctagtctagagctggatgagaacctgctccgttctgctaccttgtcaaacccacctacacccctggcagggcagatccaggggcagttctctgccccagccaacgttggccttacttctgccactctgatcagccagagtgcacttggggagagagccttcccaggacagtttcatggacttcatgacggcagccatgcctcccagaggccacatcctgcccagctgctgagcaaggcagatgacctaatcacctcacgacagcaatacagcagtgatcactca

SEQ ID NO: 441135 - DNA, 2569 bp, Homo sapiens
tgccttacagggaaaaaaaaaaaaagaattgtggtcggttcttcagtaatgaatatgtgctccactaatattaattttatgccctgctgctctttgtgcctttctacattcacaaaaaattttcctccacacgtagtaccaacagtgtacaaaccttaattcagaaacgatgccagtacaaagaactggaaccgtgtgtgtgcgtgtgtgtgtgtgtgtgtgtgtgtagacagtgtcaactataatgaccatcagcaggctgaccgcaatggtaaaatgccaccaatttaaaatgcttcccaattgcagagatattaaaatgtagatcttggaattgatgaagtttgatgtcttcattattgttatacatagttttgggcatccagtatgttttaggcattatatagaatattaagggatgtaagtattttttaggtagctgtcaggtttatcccagataatctcaatttaaaagcctatttattcattccaaaggataatttcttgagaggagataactcccgtaaagttcagcaccagcagcagaggaaacccaggaaaaaaaccaagcctcctgcactaaccaaaaaacacaagaagaagagaaggcgtggacctcgtcgaccccaaaaacccattccacctgcagtcccccaagggaacctcagcatgcctgccagcgtctcactgccagtggaggcctctcacatccggagcccatccacgccagagctgagtgctgatgagttgccggatgacattgccaatgagatcactgacattccacatgacttggaattgaaccaggaggacttttcagatgtcctgccacggctacctgatgacttacaagattttgatttttttgaagggaagaatggagacctcctcccaactaccgaagaggctgaggagcttgaacgggccttgcaggctgtaacttctctcgagtgcctgagtaccattggggtccttgcccagtcagatggtgtgccagtccaggagttgtcagatagaggaataggggtgttctccacaggtactggagcttcaggaatacaatccttgagccgagaggtgaacacagacctaggggagctattgaatgggcgtatagtacatgataatttttctagtctagagctggatgagaacctgctccgttctgctaccttgtcaaacccacctacacccctggcagggcagatccaggggcagttctctgccccagccaacgttggccttacttctgccactctgatcagccagagtgcacttggggagagagccttcccaggacagtttcatggacttcatgacggcagccatgcctcccagaggccacatcctgcccagctgctgagcaaggcagatgacctaatcacctcacgacagcaatacagcagtgatcactcacactcctcaccccatggaagccattatgatagtgagcatgtgccgtctccctacagtgaccatatcacctctccccacacaacatcgtactctggtgataatatggcagctaccttttcagcagagatgcccatcatggcgcagcacttgctcccaacccaacttgaggtgccacttggaggcgtggtaaaccccagaactcactggggcaatctccctgtcaaccttggagacccctctccatttagcaaccttctcggcgcagatggacatcttctttccacttccctatccacgccacccaccacttcgaactcagagaccacacagcctgccttcgccaccgtgacccccagcagctccagtgtgcttccggggttaccacagaccagcttcagtggcatggggccttctgctgaactaatggcctccacctctcccaagcagcaactccctcagttcagcgcagcctttggccaccagctgagttctcacagtggcattcctaaggacctgcagcccagccacagctctatagcccctcctacaggcttcacagtaacaggtgccacagctacaagtaccaataatgcatcttctccctttccctcccctaactgagggtgtctgtgtgtttgcaggcaggtggggaacccagtgttttctatctttgtttcctctttagcacccctctccccttttcctaaagaagatataacagatggggatcagaggggcaccccccttcccagttcaatgagtggccctgcagtggacctcgctacagtgttcacatgtgctccttagcactggtgctcattccctcctggcaggcccactccgccccagtggtttccttagtggttcagcacagtgactggataggattgatttttagcagcaagtcctagaagtggaagatacctcagaataccagtgccctttactatttcctagtattcagatcagtgctttccattctgttgccaggtttttacataggtggttctagatagaatgatcttattaattgagttcctgtataagagacagcaaatggtgtgtggcaggtcaagattctgacctagcaccaactgctaaacaccacagtgaggccaggattccattcgtaattgtgatcatgtttaactaa

SEQ ID NO: 441136 - DNA, 842 bp, Homo sapiens
gtaagggctaatcatgagaatcaatccttgatttcattaacaggcttggaattttttcttttcttgttttttcttctcttttcttctgtccttcatttctccctccctcccttcctccacctatataaatgttgaattctgggggtaatctaagtaatctatggaatacttttaaagatgaaatatggcaattttttaaaatagagtaataaatttggggaattacttaaagtatgtttgagtgtcttctatttaattgatttcatggacttctagaatttttaaaagattttttttccctcaaagttgctgcttgaagtcttgaaacggatttgtttggtttatggccttataaagtaattcctgacttttctacctagttttctcatttgcctaaatgagagaaatttaaataactaattaggtgttataattaatgatagcaattttggagtttaaaatctatgcctagaagttagtaaaggatatatacttactgaagaaaattttaaaaaactacttgaatcagttagatttatttcctatcagacttctcaccagtgtttggcatgttttataaccttaccttttttggttaaaaagtgttccaaatagagtatgtttgccataatttggaaacactattttcacattaagggtcggttttgccactagaatgatgagtttatgcttcgctaaatttagaaaagagtggaattgtttttaaaggagtcttatactggttattcatctttcatattgttaggaaaattcacactatctttcatatataatctcttctctgtgcttctttttcttcaattctccagaaactatataga

SEQ ID NO: 441137 - DNA, 121 bp, Homo sapiens
gattctgcggcattccaaactgtggtatccttgggggttctcttaacattgctatggtgcagaagatttaaaatcaggtatggctgtggggccagaagtccctcagtgaaattctcaactt

SEQ ID NO: 441138 - DNA, 3747 bp, Homo sapiens
ggcacgaggcaatctgcttcatcctgattctgcggcattccaaactgtggtatccttgggggttctcttaacattgctatggtgcagaagatttaaaatcagctgatgttcacaaggaatagagtcacgtgatgtatgaagggaaacatatacacttctctgaggttgacaataagcccttgtgctcatatagccccaaactgtgcaagcagaggcgactcaacggctacgccttctgtatcagacacgttctggaggacaagactgcccccttcaagcaatgtgaatatgtggccaagtataacagccaacgctgcaccaaccccatccccaaatcagaggatcgtaggtactgcaacagccacttgcaggtacttggctttatcccgaaaaaagagaggaagaaaaagaatgatcctatagatgaggtgaaggtcaggcaccagatggataccatggcctttagcctgacagtgcccacgttggccttgaagatgcccaacggactggatggaatgtccctctctccacctggggcaagggtccctctccactacctggaaactgaattggaagacccatttgctttcaatgaggaagatgatgacctaaagaaaggggcaactgtgagaaagaagttgcagagcaagttggcccagaatcggcagcgccagagagagacagagattttaaaagttcgacaagagcactttagtccccctcctgcaccttcacagcagcagcctccgcagcagcactcccacctgtcacctttatctacttctttaaaacctccagcgccaccgcagggttcagtctgcaagtcacctcaacctcagaacaccagcctaccaatgcagggagtggcacccaccacacacactatagcacaagcacggcagttgtctcacaagaggcctctgcccctcctgccatccagtagggctcccactgtggacccacccaggactgaccggatcctcatgaaagccacagccttctctccacacttctcatgtataagccgactgcagagactggtgaaactgtgcacccagaaacatcagttggacactgatctgtttccccatttaggtttggactggtctgaagagagcggagaggaaccagaggactcagagcaggcctcgccctaccaggttgcatggtccatccgggaaaccctcagatatcaaagacatgcgtcagatgatgatgatgcggagagtaggagctccagggtgactcaactttgcacttactttcagcagaaatataagcacctctgccgcctggagcgggcagaatctcgtcaaaagaaatgccggcatacgtttaggaaagctttgctgcaggcggccagtaaagaaccagaatgcactggtcagttaatacaagaactgcggagagctgcatgcagtcgaaccagcataagccggaccaagctgagggaggtggaaccagcagcatgcagtggaaccgtgaagggtgaacagtgcgctaacaaagcccttccattcaccagacattgtttccaacatatcctcttgaaccactctcagcagctcttctcaagttgcacagccaagtttgcagatggacagcagtgctctgtgccagtttttgacattacacatcagacacctctgtgtgaagaacatgccaaaaaaatggataatttcttgagaggagataactcccgtaaagttcagcaccagcagcagaggaaacccaggaaaaaaaccaagcctcctgcactaaccaaaaaacacaagaagaagagaaggcgtggacctcgtcgaccccaaaaacccattccacctgcagtcccccaagggaacctcagcatgcctgccagcgtctcactgccagtggaggcctctcacatccggagcccatccacgccagagctgagtgctgatgagttgccggatgacattgccaatgagatcactgacattccacatgacttggaattgaaccaggaggacttttcagatgtcctgccacggctacctgatgacttacaagattttgatttttttgaagggaagaatggagacctcctcccaactaccgaagaggctgaggagcttgaacgggccttgcaggctgtaacttctctcgagtgcctgagtaccattggggtccttgcccagtcagatggtgtgccagtccaggagttgtcagatagaggaataggggtgttctccacaggtactggagcttcaggaatacaatccttgagccgagaggtgaacacagacctaggggagctattgaatgggcgtatagtacatgataatttttctagtctagagctggatgagaacctgctccgttctgctaccttgtcaaacccacctacacccctggcagggcagatccaggggcagttctctgccccagccaacgttggccttacttctgccactctgatcagccagagtgcacttggggagagagccttcccaggacagtttcatggacttcatgacggcagccatgcctcccagaggccacatcctgcccagctgctgagcaaggcagatgacctaatcacctcacgacagcaatacagcagtgatcactcacactcctcaccccatggaagccattatgatagtgagcatgtgccgtctccctacagtgaccatatcacctctccccacacaacatcgtactctggtgataatatggcagctaccttttcagcagagatgcccatcatggcgcagcacttgctcccaacccaacttgaggtgccacttggaggcgtggtaaaccccagaactcactggggcaatctccctgtcaaccttggagacccctctccatttagcaaccttctcggcgcagatggacatcttctttccacttccctatccacgccacccaccacttcgaactcagagaccacacagcctgccttcgccaccgtgacccccagcagctccagtgtgcttccggggttaccacagaccagcttcagtggcatggggccttctgctgaactaatggcctccacctctcccaagcagcaactccctcagttcagcgcagcctttggccaccagctgagttctcacagtggcattcctaaggacctgcagcccagccacagctctatagcccctcctacaggcttcacagtaacaggtgccacagctacaagtaccaataatgcatcttctccctttccctcccctaactgagggtgtctgtgtgtttgcaggcaggtggggaacccagtgttttctatctttgtttcctctttagcacccctctccccttttcctaaagaagatataacagatggggatcagaggggcaccccccttcccagttcaatgagtggccctgcagtggacctcgctacagtgttcacatgtgctccttagcactggtgctcattccctcctggcaggcccactccgccccagtggtttccttagtggttcagcacagtgactggataggattgatttttagcagcaagtcctagaagtggaagatacctcagaataccagtgccctttactatttcctagtattcagatcagtgctttccattctgttgccaggtttttacataggtggttctagatagaatgatcttattaattgagttcctgtataagagacagcaaatggtgtgtggcaggtcaagattctgacctagcaccaactgctaaacaccacagtgaggccaggattccattcgtaattgtgatcatgtttaactaa

SEQ ID NO: 441139 - DNA, 8080 bp, Homo sapiens
aaggcgcacgatggcgcgtccctgcagccctcgcccggcgctccagtagcaggacccggtctcgggaccagccggtaatatgcacgtgtcactagctgaggccctggaggttcggggtggaccacttcaggaggaagaaatatgggctgtattaaatcaaagtgctgaaagtctccaagaattattcagaaaagtaagcctagctgatcctgctgcccttggcttcatcatttctccatggtctctgctgttgctgccatctggtagtgtgtcatttacagatgaaaatatttccaatcaggatcttcgagcattcactgcaccagaggttcttcaaaatcagtcactaacttctctctcagatgttgaaaagatccacatttattctcttggaatgacactgtattggggggctgattatgaagtgcctcagagccaacctattaagcttggagatcatctcaacagcatactgcttggaatgtgtgaggatgttatttacgctcgagtttctgttcggactgtgctggatgcttgcagtgcccacattaggaatagcaattgtgcaccctcattttcctacgtgaaacacttggtaaaactggttctgggaaatctttctgggacagatcagctttcctgtaacagtgaacaaaagcctgatcgaagccaggctattcgagatcgattgcgaggaaaaggattaccaacaggaagaagctctacttctgatgtactagacatacaaaagcctccactctctcatcagacctttcttaacaaagggcttagtaaatctatgggatttctgtccatcaaagatacacaagatgagaattatttcaaggacattttatcagataattctggacgtgaagattctgaaaatacattctccccttaccagttcaaaactagtggcccagaaaaaaaacccatccctggcattgatgtgctttctaagaagaagatctgggcttcatccatggacttgctttgtacagctgacagagacttctcttcaggagagactgccacatatcgtcgttgtcaccctgaggcagtaacagtgcggacttcaactactcctagaaaaaaggaggcaagatactcagatggaagtatagccttggatatctttggccctcagaaaatggatccaatatatcacactcgagaattgcccacctcctcagcaatatcaagtgctttggaccgaatccgagagagacaaaagaaacttcaggttctgagggaagccatgaatgtagaagaaccagttcgaagatacaaaacttatcatggtgatgtctttagtacctccagtgaaagtccatctattatttcctctgaatcagatttcagacaagtgagaagaagtgaagcctcaaagaggtttgaatccagcagtggtctcccaggggtagatgaaaccttaagtcaaggccagtcacagagaccgagcagacaatatgaaacaccctttgaaggcaacttaattaatcaagagatcatgctaaaacggcaagaggaagaactgatgcagctacaagccaaaatggcccttagacagtctcggttgagcctatatccaggagacacaatcaaagcgtccatgcttgacatcaccagggatccgttaagagaaattgccctagaaacagccatgactcaaagaaaactgaggaatttctttggccctgagtttgtgaaaatgacaattgaaccatttatatctttggatttgccacggtctattcttactaagaaagggaagaatgaggataaccgaaggaaagtaaacataatgcttctgaacgggcaaagactggaactgacctgtgataccaaaactatatgtaaagatgtgtttgatatggttgtggcacatattggcttagtagagcatcatttgtttgctttagctaccctcaaagataatgaatatttctttgttgatcctgacttaaaattaaccaaagtggccccagagggatggaaagaagaaccaaagaaaaagaccaaagccactgttaattttactttgtttttcagaattaaattttttatggatgatgttagtctaatacaacatactctgacgtgtcatcagtattaccttcagcttcgaaaagatattttggaggaaaggatgcactgtgatgatgagacttccttattgctggcatccttggctctccaggctgagtatggagattatcaaccagaggttcatggtgtgtcttactttagaatggagcactatttgcccgccagagtgatggagaaacttgatttatcctatatcaaagaagagttacccaaattgcataatacctatgtgggagcttctgaaaaagagacagagttagaatttttaaaggtctgccaaagactgacagaatatggagttcattttcaccgagtgcaccctgagaagaagtcacaaacaggaatattgcttggagtctgttctaaaggtgtccttgtgtttgaagttcacaatggagtgcgcacattggtccttcgctttccatggagggaaaccaagaaaatatctttttctaaaaagaaaatcacattgcaaaatacatcagatggaataaaacatggcttccagacagacaacagtaagatatgccagtacctgctgcacctctgctcttaccagcataagttccagctacagatgagagcaagacagagcaaccaagatgcccaagatattgagagagcttcgtttaggagcctgaatctccaagcagagtctgttagaggatttaatatgggacgagcaatcagcactggcagtctggccagcagcaccctcaacaaacttgctgttcgacctttatcagttcaagctgagattctgaagaggctatcctgctcagagctgtcgctttaccagccattgcaaaacagttcaaaagagaagaatgacaaagcttcatgggaggaaaagcctagagagatgagtaaatcataccatgatctcagtcaggcctctctctatccacatcggaaaaatgtcattgttaacatggaacccccaccacaaaccgttgcagagttggtgggaaaaccttctcaccagatgtcaagatctgatgcagaatctttggcaggagtgacaaaacttaataattcaaagtctgttgcgagtttaaatagaagtcctgaaaggaggaaacatgaatcagactcctcatccattgaagaccctgggcaagcatatgttctagatgtgctacacaaaagatggagcatagtatcttcaccagaaagggagatcaccttagtgaacctgaaaaaagatgcaaagtatggcttgggatttcaaattattggtggggagaagatgggaagactggacctaggcatatttatcagttcagttgcccctggaggaccagctgacttggatggatgcttgaagccaggagaccgtttgatatctgtgaatagtgtgagtctggagggagtcagccaccatgctgcaattgaaattttgcaaaatgcacctgaagatgtgacacttgttatctctcagccaaaagaaaagatatccaaagtgccttctactcctgtgcatctcaccaatgagatgaaaaactacatgaagaaatcttcctacatgcaagacagtgctatagattcttcttccaaggatcaccactggtcacgtggtaccctgaggcacatctcggagaactcctttgggccatctgggggcctgcgggaaggaagcctgagttctcaagattccaggactgagagtgccagcttgtctcaaagccaggtcaatggtttctttgccagccatttaggtgaccaaacctggcaggaatcacagcatggcagcccttccccatctgtaatatccaaagccaccgagaaagagactttcactgatagtaaccaaagcaaaactaaaaagccaggcatttctgatgtaactgattactcagaccgtggagattcagacatggatgaagccacttactccagcagtcaggatcatcaaacaccaaaacaggaatcttcctcttcagtgaatacatccaacaagatgaattttaaaactttttcttcatcacctcctaagcctggagatatctttgaggttgaactggctaaaaatgataacagcttggggataagtgtcacgggaggtgtgaatacgagtgtcagacatggtggcatttatgtgaaagctgttattccccagggagcagcagagtctgatggtagaattcacaaaggtgatcgcgtcctagctgtcaatggagttagtctagaaggagccacccataagcaagctgtggaaacactgagaaatacaggacaggtggttcatctgttattagaaaagggacaatctccaacatctaaagaacatgtcccggtaaccccacagtgtaccctttcagatcagaatgcccaaggtcaaggcccagaaaaagtgaagaaaacaactcaggtcaaagactacagctttgtcactgaagaaaatacatttgaggtaaaattatttaaaaatagctcaggtctaggattcagtttttctcgagaagataatcttataccggagcaaattaatgccagcatagtaagggttaaaaagctctttcctggacagccagcagcagaaagtggaaaaattgatgtaggagatgttatcttgaaagtgaatggagcctctttgaaaggactatctcagcaggaagtcatatctgctctcaggggaactgctccagaagtattcttgcttctctgcagacctccacctggtgtgctaccggaaattgatactgcgcttttgaccccacttcagtctccagcacaagtacttccaaacagcagtaaagactcttctcagccatcatgtgtggagcaaagcaccagctcagatgaaaatgaaatgtcagacaaaagcaaaaaacagtgcaagtccccatccagaagagacagttacagtgacagcagtgggagtggagaagatgacttagtgacagctccagcaaacatatcaaattcgacctggagttcagctttgcatcagactctaagcaacatggtatcacaggcacagagtcatcatgaagcacccaagagtcaagaagataccatttgtaccatgttttactatcctcagaaaattcccaataaaccagagtttgaggacagtaatccttcccctctaccaccggatatggctcctgggcagagttatcaaccccaatcagaatctgcttcctctagttcgatggataagtatcatatacatcacatttctgaaccaactagacaagaaaactggacacctttgaaaaatgacttggaaaatcaccttgaagactttgaactggaagtagaactcctcattaccctaattaaatcagaaaaaggaagcctgggttttacagtaaccaaaggcaatcagagaattggttgttatgttcatgatgtcatacaggatccagccaaaagtgatggaaggctaaaacctggggaccggctcataaaggttaatgatacagatgttactaatatgactcatacagatgcagttaatctgctccgggctgcatccaaaacagtcagattagttattggacgagttctagaattacccagaataccaatgttgcctcatttgctaccggacataacactaacgtgcaacaaagaggagttgggtttttccttatgtggaggtcatgacagcctttatcaagtggtatatattagtgatattaatccaaggtccgtcgcagccattgagggtaatctccagctattagatgtcatccattatgtgaacggagtcagcacacaaggaatgaccttggaggaagttaacagagcattagacatgtcacttccttcattggtattgaaagcaacaagaaatgatcttccagtggtccccagctcaaagaggtctgctgtttcagctccaaagtcaaccaaaggcaatggttcctacagtgtggggtcttgcagccagcctgccctcactcctaatgattcattctccacggttgctggggaagaaataaatgaaatatcgtaccccaaaggaaaatgttctacttatcagataaagggatcaccaaacttgactctgcccaaagaatcttatatacaagaagatgacatttatgatgattcccaagaagctgaagttatccagtctctgctggatgttgtggatgaggaagcccagaatcttttaaacgaaaataatgcagcaggatactcctgtggtccaggtacattaaagatgaatgggaagttatcagaagagagaacagaagatacagactgcgatggttcacctttacctgagtattttactgaggccaccaaaatgaatggctgtgaagaatattgtgaagaaaaagtaaaaagtgaaagcttaattcagaagccacaagaaaagaagactgatgatgatgaaataacatggggaaatgatgagttgccaatagagagaacaaaccatgaagattctgataaagatcattcctttctgacaaacgatgagctcgctgtactccctgtcgtcaaagtgcttccctctggtaaatacacgggtgccaacttaaaatcagtcattcgagtcctgcggggtttgctagatcaaggaattccttctaaggagctggagaatcttcaagaattaaaacctttggatcagtgtctaattgggcaaactaaggaaaacagaaggaagaacagatataaaaatatacttccctatgatgctacaagagtgcctcttggagatgaaggtggctatatcaatgccagcttcattaagataccagttgggaaagaagagttcgtttacattgcctgccaaggaccactgcctacaactgttggagacttctggcagatgatttgggagcaaaaatccacagtgatagccatgatgactcaagaagtagaaggagaaaaaatcaaatgccagcgctattggcccaacatcctaggcaaaacaacaatggtcagcaacagacttcgactggctcttgtgagaatgcagcagctgaagggctttgtggtgagggcaatgacccttgaagatattcagaccagagaggtgcgccatatttctcatctgaatttcactgcctggccagaccatgatacaccttctcaaccagatgatctgcttacttttatctcctacatgagacacatccacagatcaggcccaatcattacgcactgcagtgctggcattggacgttcagggaccctgatttgcatagatgtggttctgggattaatcagtcaggatcttgattttgacatctctgatttggtgcgctgcatgagactacaaagacacggaatggttcagacagaggatcaatatattttctgctatcaagtcatcctttatgtcctgacacgtcttcaagcagaagaagagcaaaaacagcagcctcagcttctgaagtgacatgaaaagagcctctggatgcatttccatttctctccttaacctccagcagactcctgctctctatccaaaataaagatcacagagcagcaagttcatacaacatgcatgttctcctctatcttagaggggtattcttcttgaaaataaaaaatattgaaatgctgtatttttacagctactttaacctatgataattatttacaaaattttaacactaaccaaacaatgcagatcttagggatgattaaaggcagcatttgatgatagcagacattgttacaaggacatggtgagtctatttttaatgcaccaatcttgtttatagcaaaaatgttttccaatattttaataaagtagttattttataggggatacttgaaaccagtatttaagctttaaatgacagtaatattggcatagaaaaaagtagcaaatgtttactgtatcaatttctaatgtttactatatagaatttcctgtaatatatttatatactttttcatgaaaatggagttatcagttatctgtttgttactgcatcatctgtttgtaatcattatctcactttgtaaataaaaacacaccttaaaacatgaa

SEQ ID NO: 441140 - DNA, 8137 bp, Homo sapiens
aaggcgcacgatggcgcgtccctgcagccctcgcccggcgctccagtagcaggacccggtctcgggaccagccggtaatatgcacgtgtcactagctgaggccctggaggttcggggtggaccacttcaggaggaagaaatatgggctgtattaaatcaaagtgctgaaagtctccaagaattattcagaaaagtaagcctagctgatcctgctgcccttggcttcatcatttctccatggtctctgctgttgctgccatctggtagtgtgtcatttacagatgaaaatatttccaatcaggatcttcgagcattcactgcaccagaggttcttcaaaatcagtcactaacttctctctcagatgttgaaaagatccacatttattctcttggaatgacactgtattggggggctgattatgaagtgcctcagagccaacctattaagcttggagatcatctcaacagcatactgcttggaatgtgtgaggatgttatttacgctcgagtttctgttcggactgtgctggatgcttgcagtgcccacattaggaatagcaattgtgcaccctcattttcctacgtgaaacacttggtaaaactggttctgggaaatctttctgggacagatcagctttcctgtaacagtgaacaaaagcctgatcgaagccaggctattcgagatcgattgcgaggaaaaggattaccaacaggaagaagctctacttctgatgtactagacatacaaaagcctccactctctcatcagacctttcttaacaaagggcttagtaaatctatgggatttctgtccatcaaagatacacaagatgagaattatttcaaggacattttatcagataattctggacgtgaagattctgaaaatacattctccccttaccagttcaaaactagtggcccagaaaaaaaacccatccctggcattgatgtgctttctaagaagaagatctgggcttcatccatggacttgctttgtacagctgacagagacttctcttcaggagagactgccacatatcgtcgttgtcaccctgaggcagtaacagtgcggacttcaactactcctagaaaaaaggaggcaagatactcagatggaagtatagccttggatatctttggccctcagaaaatggatccaatatatcacactcgagaattgcccacctcctcagcaatatcaagtgctttggaccgaatccgagagagacaaaagaaacttcaggttctgagggaagccatgaatgtagaagaaccagttcgaagatacaaaacttatcatggtgatgtctttagtacctccagtgaaagtccatctattatttcctctgaatcagatttcagacaagtgagaagaagtgaagcctcaaagaggtttgaatccagcagtggtctcccaggggtagatgaaaccttaagtcaaggccagtcacagagaccgagcagacaatatgaaacaccctttgaaggcaacttaattaatcaagagatcatgctaaaacggcaagaggaagaactgatgcagctacaagccaaaatggcccttagacagtctcggttgagcctatatccaggagacacaatcaaagcgtccatgcttgacatcaccagggatccgttaagagaaattgccctagaaacagccatgactcaaagaaaactgaggaatttctttggccctgagtttgtgaaaatgacaattgaaccatttatatctttggatttgccacggtctattcttactaagaaagggaagaatgaggataaccgaaggaaagtaaacataatgcttctgaacgggcaaagactggaactgacctgtgataccaaaactatatgtaaagatgtgtttgatatggttgtggcacatattggcttagtagagcatcatttgtttgctttagctaccctcaaagataatgaatatttctttgttgatcctgacttaaaattaaccaaagtggccccagagggatggaaagaagaaccaaagaaaaagaccaaagccactgttaattttactttgtttttcagaattaaattttttatggatgatgttagtctaatacaacatactctgacgtgtcatcagtattaccttcagcttcgaaaagatattttggaggaaaggatgcactgtgatgatgagacttccttattgctggcatccttggctctccaggctgagtatggagattatcaaccagaggttcatggtgtgtcttactttagaatggagcactatttgcccgccagagtgatggagaaacttgatttatcctatatcaaagaagagttacccaaattgcataatacctatgtgggagcttctgaaaaagagacagagttagaatttttaaaggtctgccaaagactgacagaatatggagttcattttcaccgagtgcaccctgagaagaagtcacaaacaggaatattgcttggagtctgttctaaaggtgtccttgtgtttgaagttcacaatggagtgcgcacattggtccttcgctttccatggagggaaaccaagaaaatatctttttctaaaaagaaaatcacattgcaaaatacatcagatggaataaaacatggcttccagacagacaacagtaagatatgccagtacctgctgcacctctgctcttaccagcataagttccagctacagatgagagcaagacagagcaaccaagatgcccaagatattgagagagcttcgtttaggagcctgaatctccaagcagagtctgttagaggatttaatatgggacgagcaatcagcactggcagtctggccagcagcaccctcaacaaacttgctgttcgacctttatcagttcaagctgagattctgaagaggctatcctgctcagagctgtcgctttaccagccattgcaaaacagttcaaaagagaagaatgacaaagcttcatgggaggaaaagcctagagagatgagtaaatcataccatgatctcagtcaggcctctctctatccacatcggaaaaatgtcattgttaacatggaacccccaccacaaaccgttgcagagttggtgggaaaaccttctcaccagatgtcaagatctgatgcagaatctttggcaggagtgacaaaacttaataattcaaagtctgttgcgagtttaaatagaagtcctgaaaggaggaaacatgaatcagactcctcatccattgaagaccctgggcaagcatatgttctaggaatgactatgcatagttctggaaactcttcatcccaagtacccttaaaagaaaatgatgtgctacacaaaagatggagcatagtatcttcaccagaaagggagatcaccttagtgaacctgaaaaaagatgcaaagtatggcttgggatttcaaattattggtggggagaagatgggaagactggacctaggcatatttatcagttcagttgcccctggaggaccagctgacttggatggatgcttgaagccaggagaccgtttgatatctgtgaatagtgtgagtctggagggagtcagccaccatgctgcaattgaaattttgcaaaatgcacctgaagatgtgacacttgttatctctcagccaaaagaaaagatatccaaagtgccttctactcctgtgcatctcaccaatgagatgaaaaactacatgaagaaatcttcctacatgcaagacagtgctatagattcttcttccaaggatcaccactggtcacgtggtaccctgaggcacatctcggagaactcctttgggccatctgggggcctgcgggaaggaagcctgagttctcaagattccaggactgagagtgccagcttgtctcaaagccaggtcaatggtttctttgccagccatttaggtgaccaaacctggcaggaatcacagcatggcagcccttccccatctgtaatatccaaagccaccgagaaagagactttcactgatagtaaccaaagcaaaactaaaaagccaggcatttctgatgtaactgattactcagaccgtggagattcagacatggatgaagccacttactccagcagtcaggatcatcaaacaccaaaacaggaatcttcctcttcagtgaatacatccaacaagatgaattttaaaactttttcttcatcacctcctaagcctggagatatctttgaggttgaactggctaaaaatgataacagcttggggataagtgtcacgggaggtgtgaatacgagtgtcagacatggtggcatttatgtgaaagctgttattccccagggagcagcagagtctgatggtagaattcacaaaggtgatcgcgtcctagctgtcaatggagttagtctagaaggagccacccataagcaagctgtggaaacactgagaaatacaggacaggtggttcatctgttattagaaaagggacaatctccaacatctaaagaacatgtcccggtaaccccacagtgtaccctttcagatcagaatgcccaaggtcaaggcccagaaaaagtgaagaaaacaactcaggtcaaagactacagctttgtcactgaagaaaatacatttgaggtaaaattatttaaaaatagctcaggtctaggattcagtttttctcgagaagataatcttataccggagcaaattaatgccagcatagtaagggttaaaaagctctttcctggacagccagcagcagaaagtggaaaaattgatgtaggagatgttatcttgaaagtgaatggagcctctttgaaaggactatctcagcaggaagtcatatctgctctcaggggaactgctccagaagtattcttgcttctctgcagacctccacctggtgtgctaccggaaattgatactgcgcttttgaccccacttcagtctccagcacaagtacttccaaacagcagtaaagactcttctcagccatcatgtgtggagcaaagcaccagctcagatgaaaatgaaatgtcagacaaaagcaaaaaacagtgcaagtccccatccagaagagacagttacagtgacagcagtgggagtggagaagatgacttagtgacagctccagcaaacatatcaaattcgacctggagttcagctttgcatcagactctaagcaacatggtatcacaggcacagagtcatcatgaagcacccaagagtcaagaagataccatttgtaccatgttttactatcctcagaaaattcccaataaaccagagtttgaggacagtaatccttcccctctaccaccggatatggctcctgggcagagttatcaaccccaatcagaatctgcttcctctagttcgatggataagtatcatatacatcacatttctgaaccaactagacaagaaaactggacacctttgaaaaatgacttggaaaatcaccttgaagactttgaactggaagtagaactcctcattaccctaattaaatcagaaaaaggaagcctgggttttacagtaaccaaaggcaatcagagaattggttgttatgttcatgatgtcatacaggatccagccaaaagtgatggaaggctaaaacctggggaccggctcataaaggttaatgatacagatgttactaatatgactcatacagatgcagttaatctgctccgggctgcatccaaaacagtcagattagttattggacgagttctagaattacccagaataccaatgttgcctcatttgctaccggacataacactaacgtgcaacaaagaggagttgggtttttccttatgtggaggtcatgacagcctttatcaagtggtatatattagtgatattaatccaaggtccgtcgcagccattgagggtaatctccagctattagatgtcatccattatgtgaacggagtcagcacacaaggaatgaccttggaggaagttaacagagcattagacatgtcacttccttcattggtattgaaagcaacaagaaatgatcttccagtggtccccagctcaaagaggtctgctgtttcagctccaaagtcaaccaaaggcaatggttcctacagtgtggggtcttgcagccagcctgccctcactcctaatgattcattctccacggttgctggggaagaaataaatgaaatatcgtaccccaaaggaaaatgttctacttatcagataaagggatcaccaaacttgactctgcccaaagaatcttatatacaagaagatgacatttatgatgattcccaagaagctgaagttatccagtctctgctggatgttgtggatgaggaagcccagaatcttttaaacgaaaataatgcagcaggatactcctgtggtccaggtacattaaagatgaatgggaagttatcagaagagagaacagaagatacagactgcgatggttcacctttacctgagtattttactgaggccaccaaaatgaatggctgtgaagaatattgtgaagaaaaagtaaaaagtgaaagcttaattcagaagccacaagaaaagaagactgatgatgatgaaataacatggggaaatgatgagttgccaatagagagaacaaaccatgaagattctgataaagatcattcctttctgacaaacgatgagctcgctgtactccctgtcgtcaaagtgcttccctctggtaaatacacgggtgccaacttaaaatcagtcattcgagtcctgcggggtttgctagatcaaggaattccttctaaggagctggagaatcttcaagaattaaaacctttggatcagtgtctaattgggcaaactaaggaaaacagaaggaagaacagatataaaaatatacttccctatgatgctacaagagtgcctcttggagatgaaggtggctatatcaatgccagcttcattaagataccagttgggaaagaagagttcgtttacattgcctgccaaggaccactgcctacaactgttggagacttctggcagatgatttgggagcaaaaatccacagtgatagccatgatgactcaagaagtagaaggagaaaaaatcaaatgccagcgctattggcccaacatcctaggcaaaacaacaatggtcagcaacagacttcgactggctcttgtgagaatgcagcagctgaagggctttgtggtgagggcaatgacccttgaagatattcagaccagagaggtgcgccatatttctcatctgaatttcactgcctggccagaccatgatacaccttctcaaccagatgatctgcttacttttatctcctacatgagacacatccacagatcaggcccaatcattacgcactgcagtgctggcattggacgttcagggaccctgatttgcatagatgtggttctgggattaatcagtcaggatcttgattttgacatctctgatttggtgcgctgcatgagactacaaagacacggaatggttcagacagaggatcaatatattttctgctatcaagtcatcctttatgtcctgacacgtcttcaagcagaagaagagcaaaaacagcagcctcagcttctgaagtgacatgaaaagagcctctggatgcatttccatttctctccttaacctccagcagactcctgctctctatccaaaataaagatcacagagcagcaagttcatacaacatgcatgttctcctctatcttagaggggtattcttcttgaaaataaaaaatattgaaatgctgtatttttacagctactttaacctatgataattatttacaaaattttaacactaaccaaacaatgcagatcttagggatgattaaaggcagcatttgatgatagcagacattgttacaaggacatggtgagtctatttttaatgcaccaatcttgtttatagcaaaaatgttttccaatattttaataaagtagttattttataggggatacttgaaaccagtatttaagctttaaatgacagtaatattggcatagaaaaaagtagcaaatgtttactgtatcaatttctaatgtttactatatagaatttcctgtaatatatttatatactttttcatgaaaatggagttatcagttatctgtttgttactgcatcatctgtttgtaatcattatctcactttgtaaataaaaacacaccttaaaacatgaa

SEQ ID NO: 441141 - DNA, 7564 bp, Homo sapiens
aaggcgcacgatggcgcgtccctgcagccctcgcccggcgctccagtagcaggacccggtctcgggaccagccggtaatatgcacgtgtcactagctgaggccctggaggttcggggtggaccacttcaggaggaagaaatatgggctgtattaaatcaaagtgctgaaagtctccaagaattattcagaaaagtaagcctagctgatcctgctgcccttggcttcatcatttctccatggtctctgctgttgctgccatctggtagtgtgtcatttacagatgaaaatatttccaatcaggatcttcgagcattcactgcaccagaggttcttcaaaatcagtcactaacttctctctcagatgttgaaaagatccacatttattctcttggaatgacactgtattggggggctgattatgaagtgcctcagagccaacctattaagcttggagatcatctcaacagcatactgcttggaatgtgtgaggatgttatttacgctcgagtttctgttcggactgtgctggatgcttgcagtgcccacattaggaatagcaattgtgcaccctcattttcctacgtgaaacacttggtaaaactggttctgggaaatctttctgggacagatcagctttcctgtaacagtgaacaaaagcctgatcgaagccaggctattcgagatcgattgcgaggaaaaggattaccaacaggaagaagctctacttctgatgtactagacatacaaaagcctccactctctcatcagacctttcttaacaaagggcttagtaaatctatgggatttctgtccatcaaagatacacaagatgagaattatttcaaggacattttatcagataattctggacgtgaagattctgaaaatacattctccccttaccagttcaaaactagtggcccagaaaaaaaacccatccctggcattgatgtgctttctaagaagaagatctgggcttcatccatggacttgctttgtacagctgacagagacttctcttcaggagagactgccacatatcgtcgttgtcaccctgaggcagtaacagtgcggacttcaactactcctagaaaaaaggaggcaagatactcagatggaagtatagccttggatatctttggccctcagaaaatggatccaatatatcacactcgagaattgcccacctcctcagcaatatcaagtgctttggaccgaatccgagagagacaaaagaaacttcaggttctgagggaagccatgaatgtagaagaaccagttcgaagatacaaaacttatcatggtgatgtctttagtacctccagtgaaagtccatctattatttcctctgaatcagatttcagacaagtgagaagaagtgaagcctcaaagaggtttgaatccagcagtggtctcccaggggtagatgaaaccttaagtcaaggccagtcacagagaccgagcagacaatatgaaacaccctttgaaggcaacttaattaatcaagagatcatgctaaaacggcaagaggaagaactgatgcagctacaagccaaaatggcccttagacagtctcggttgagcctatatccaggagacacaatcaaagcgtccatgcttgacatcaccagggatccgttaagagaaattgccctagaaacagccatgactcaaagaaaactgaggaatttctttggccctgagtttgtgaaaatgacaattgaaccatttatatctttggatttgccacggtctattcttactaagaaagggaagaatgaggataaccgaaggaaagtaaacataatgcttctgaacgggcaaagactggaactgacctgtgataccaaaactatatgtaaagatgtgtttgatatggttgtggcacatattggcttagtagagcatcatttgtttgctttagctaccctcaaagataatgaatatttctttgttgatcctgacttaaaattaaccaaagtggccccagagggatggaaagaagaaccaaagaaaaagaccaaagccactgttaattttactttgtttttcagaattaaattttttatggatgatgttagtctaatacaacatactctgacgtgtcatcagtattaccttcagcttcgaaaagatattttggaggaaaggatgcactgtgatgatgagacttccttattgctggcatccttggctctccaggctgagtatggagattatcaaccagaggttcatggtgtgtcttactttagaatggagcactatttgcccgccagagtgatggagaaacttgatttatcctatatcaaagaagagttacccaaattgcataatacctatgtgggagcttctgaaaaagagacagagttagaatttttaaaggtctgccaaagactgacagaatatggagttcattttcaccgagtgcaccctgagaagaagtcacaaacaggaatattgcttggagtctgttctaaaggtgtccttgtgtttgaagttcacaatggagtgcgcacattggtccttcgctttccatggagggaaaccaagaaaatatctttttctaaaaagaaaatcacattgcaaaatacatcagatggaataaaacatggcttccagacagacaacagtaagatatgccagtacctgctgcacctctgctcttaccagcataagttccagctacagatgagagcaagacagagcaaccaagatgcccaagatattgatgtgctacacaaaagatggagcatagtatcttcaccagaaagggagatcaccttagtgaacctgaaaaaagatgcaaagtatggcttgggatttcaaattattggtggggagaagatgggaagactggacctaggcatatttatcagttcagttgcccctggaggaccagctgacttggatggatgcttgaagccaggagaccgtttgatatctgtgaatagtgtgagtctggagggagtcagccaccatgctgcaattgaaattttgcaaaatgcacctgaagatgtgacacttgttatctctcagccaaaagaaaagatatccaaagtgccttctactcctgtgcatctcaccaatgagatgaaaaactacatgaagaaatcttcctacatgcaagacagtgctatagattcttcttccaaggatcaccactggtcacgtggtaccctgaggcacatctcggagaactcctttgggccatctgggggcctgcgggaaggaagcctgagttctcaagattccaggactgagagtgccagcttgtctcaaagccaggtcaatggtttctttgccagccatttaggtgaccaaacctggcaggaatcacagcatggcagcccttccccatctgtaatatccaaagccaccgagaaagagactttcactgatagtaaccaaagcaaaactaaaaagccaggcatttctgatgtaactgattactcagaccgtggagattcagacatggatgaagccacttactccagcagtcaggatcatcaaacaccaaaacaggaatcttcctcttcagtgaatacatccaacaagatgaattttaaaactttttcttcatcacctcctaagcctggagatatctttgaggttgaactggctaaaaatgataacagcttggggataagtgtcacgggaggtgtgaatacgagtgtcagacatggtggcatttatgtgaaagctgttattccccagggagcagcagagtctgatggtagaattcacaaaggtgatcgcgtcctagctgtcaatggagttagtctagaaggagccacccataagcaagctgtggaaacactgagaaatacaggacaggtggttcatctgttattagaaaagggacaatctccaacatctaaagaacatgtcccggtaaccccacagtgtaccctttcagatcagaatgcccaaggtcaaggcccagaaaaagtgaagaaaacaactcaggtcaaagactacagctttgtcactgaagaaaatacatttgaggtaaaattatttaaaaatagctcaggtctaggattcagtttttctcgagaagataatcttataccggagcaaattaatgccagcatagtaagggttaaaaagctctttcctggacagccagcagcagaaagtggaaaaattgatgtaggagatgttatcttgaaagtgaatggagcctctttgaaaggactatctcagcaggaagtcatatctgctctcaggggaactgctccagaagtattcttgcttctctgcagacctccacctggtgtgctaccggaaattgatactgcgcttttgaccccacttcagtctccagcacaagtacttccaaacagcagtaaagactcttctcagccatcatgtgtggagcaaagcaccagctcagatgaaaatgaaatgtcagacaaaagcaaaaaacagtgcaagtccccatccagaagagacagttacagtgacagcagtgggagtggagaagatgacttagtgacagctccagcaaacatatcaaattcgacctggagttcagctttgcatcagactctaagcaacatggtatcacaggcacagagtcatcatgaagcacccaagagtcaagaagataccatttgtaccatgttttactatcctcagaaaattcccaataaaccagagtttgaggacagtaatccttcccctctaccaccggatatggctcctgggcagagttatcaaccccaatcagaatctgcttcctctagttcgatggataagtatcatatacatcacatttctgaaccaactagacaagaaaactggacacctttgaaaaatgacttggaaaatcaccttgaagactttgaactggaagtagaactcctcattaccctaattaaatcagaaaaaggaagcctgggttttacagtaaccaaaggcaatcagagaattggttgttatgttcatgatgtcatacaggatccagccaaaagtgatggaaggctaaaacctggggaccggctcataaaggttaatgatacagatgttactaatatgactcatacagatgcagttaatctgctccgggctgcatccaaaacagtcagattagttattggacgagttctagaattacccagaataccaatgttgcctcatttgctaccggacataacactaacgtgcaacaaagaggagttgggtttttccttatgtggaggtcatgacagcctttatcaagtggtatatattagtgatattaatccaaggtccgtcgcagccattgagggtaatctccagctattagatgtcatccattatgtgaacggagtcagcacacaaggaatgaccttggaggaagttaacagagcattagacatgtcacttccttcattggtattgaaagcaacaagaaatgatcttccagtggtccccagctcaaagaggtctgctgtttcagctccaaagtcaaccaaaggcaatggttcctacagtgtggggtcttgcagccagcctgccctcactcctaatgattcattctccacggttgctggggaagaaataaatgaaatatcgtaccccaaaggaaaatgttctacttatcagataaagggatcaccaaacttgactctgcccaaagaatcttatatacaagaagatgacatttatgatgattcccaagaagctgaagttatccagtctctgctggatgttgtggatgaggaagcccagaatcttttaaacgaaaataatgcagcaggatactcctgtggtccaggtacattaaagatgaatgggaagttatcagaagagagaacagaagatacagactgcgatggttcacctttacctgagtattttactgaggccaccaaaatgaatggctgtgaagaatattgtgaagaaaaagtaaaaagtgaaagcttaattcagaagccacaagaaaagaagactgatgatgatgaaataacatggggaaatgatgagttgccaatagagagaacaaaccatgaagattctgataaagatcattcctttctgacaaacgatgagctcgctgtactccctgtcgtcaaagtgcttccctctggtaaatacacgggtgccaacttaaaatcagtcattcgagtcctgcggggtttgctagatcaaggaattccttctaaggagctggagaatcttcaagaattaaaacctttggatcagtgtctaattgggcaaactaaggaaaacagaaggaagaacagatataaaaatatacttccctatgatgctacaagagtgcctcttggagatgaaggtggctatatcaatgccagcttcattaagataccagttgggaaagaagagttcgtttacattgcctgccaaggaccactgcctacaactgttggagacttctggcagatgatttgggagcaaaaatccacagtgatagccatgatgactcaagaagtagaaggagaaaaaatcaaatgccagcgctattggcccaacatcctaggcaaaacaacaatggtcagcaacagacttcgactggctcttgtgagaatgcagcagctgaagggctttgtggtgagggcaatgacccttgaagatattcagaccagagaggtgcgccatatttctcatctgaatttcactgcctggccagaccatgatacaccttctcaaccagatgatctgcttacttttatctcctacatgagacacatccacagatcaggcccaatcattacgcactgcagtgctggcattggacgttcagggaccctgatttgcatagatgtggttctgggattaatcagtcaggatcttgattttgacatctctgatttggtgcgctgcatgagactacaaagacacggaatggttcagacagaggatcaatatattttctgctatcaagtcatcctttatgtcctgacacgtcttcaagcagaagaagagcaaaaacagcagcctcagcttctgaagtgacatgaaaagagcctctggatgcatttccatttctctccttaacctccagcagactcctgctctctatccaaaataaagatcacagagcagcaagttcatacaacatgcatgttctcctctatcttagaggggtattcttcttgaaaataaaaaatattgaaatgctgtatttttacagctactttaacctatgataattatttacaaaattttaacactaaccaaacaatgcagatcttagggatgattaaaggcagcatttgatgatagcagacattgttacaaggacatggtgagtctatttttaatgcaccaatcttgtttatagcaaaaatgttttccaatattttaataaagtagttattttataggggatacttgaaaccagtatttaagctttaaatgacagtaatattggcatagaaaaaagtagcaaatgtttactgtatcaatttctaatgtttactatatagaatttcctgtaatatatttatatactttttcatgaaaatggagttatcagttatctgtttgttactgcatcatctgtttgtaatcattatctcactttgtaaataaaaacacaccttaaaacatgaa

SEQ ID NO: 441142 - DNA, 430 bp, Homo sapiens
taaaatgttgccttttaatttaaaaatgcaatatctgcactgaagagattacagagaatgggatagcatgctggggacagagtttgagaatggtacaaaatactatgtaattaatggcattccttccctatttccaacctgaaaaagagatagaaggtaacattcttgctacagaaattccctgagaagtaatggattcatcagcattgactggaacacagcaaggcaggctggagttgcttagcttcaagaagacattctgtaaggagtgtgaatacatgggtccatttatcctcttttgatgattttcgtttctcttacctgaaaggaaaccatcacccactgacacaatggcgtccttcacagggagtgccgtatttagagtgtctgtcttcactgaagagttccacaatcctctttgtttataatg

SEQ ID NO: 441143 - DNA, 8432 bp, Homo sapiens
aaggcgcacgatggcgcgtccctgcagccctcgcccggcgctccagtagcaggacccggtctcgggaccagccggtaatatgcacgtgtcactagctgaggccctggaggttcggggtggaccacttcaggaggaagaaatatgggctgtattaaatcaaagtgctgaaagtctccaagaattattcagaaaagtaagcctagctgatcctgctgcccttggcttcatcatttctccatggtctctgctgttgctgccatctggtagtgtgtcatttacagatgaaaatatttccaatcaggatcttcgagcattcactgcaccagaggttcttcaaaatcagtcactaacttctctctcagatgttgaaaagatccacatttattctcttggaatgacactgtattggggggctgattatgaagtgcctcagagccaacctattaagcttggagatcatctcaacagcatactgcttggaatgtgtgaggatgttatttacgctcgagtttctgttcggactgtgctggatgcttgcagtgcccacattaggaatagcaattgtgcaccctcattttcctacgtgaaacacttggtaaaactggttctgggaaatctttctgggacagatcagctttcctgtaacagtgaacaaaagcctgatcgaagccaggctattcgagatcgattgcgaggaaaaggattaccaacaggaagaagctctacttctgatgtactagacatacaaaagcctccactctctcatcagacctttcttaacaaagggcttagtaaatctatgggatttctgtccatcaaagatacacaagatgagaattatttcaaggacattttatcagataattctggacgtgaagattctgaaaatacattctccccttaccagttcaaaactagtggcccagaaaaaaaacccatccctggcattgatgtgctttctaagaagaagatctgggcttcatccatggacttgctttgtacagctgacagagacttctcttcaggagagactgccacatatcgtcgttgtcaccctgaggcagtaacagtgcggacttcaactactcctagaaaaaaggaggcaagatactcagatggaagtatagccttggatatctttggccctcagaaaatggatccaatatatcacactcgagaattgcccacctcctcagcaatatcaagtgctttggaccgaatccgagagagacaaaagaaacttcaggttctgagggaagccatgaatgtagaagaaccagttcgaagatacaaaacttatcatggtgatgtctttagtacctccagtgaaagtccatctattatttcctctgaatcagatttcagacaagtgagaagaagtgaagcctcaaagaggtttgaatccagcagtggtctcccaggggtagatgaaaccttaagtcaaggccagtcacagagaccgagcagacaatatgaaacaccctttgaaggcaacttaattaatcaagagatcatgctaaaacggcaagaggaagaactgatgcagctacaagccaaaatggcccttagacagtctcggttgagcctatatccaggagacacaatcaaagcgtccatgcttgacatcaccagggatccgttaagagaaattgccctagaaacagccatgactcaaagaaaactgaggaatttctttggccctgagtttgtgaaaatgacaattgaaccatttatatctttggatttgccacggtctattcttactaagaaagggaagaatgaggataaccgaaggaaagtaaacataatgcttctgaacgggcaaagactggaactgacctgtgataccaaaactatatgtaaagatgtgtttgatatggttgtggcacatattggcttagtagagcatcatttgtttgctttagctaccctcaaagataatgaatatttctttgttgatcctgacttaaaattaaccaaagtggccccagagggatggaaagaagaaccaaagaaaaagaccaaagccactgttaattttactttgtttttcagaattaaattttttatggatgatgttagtctaatacaacatactctgacgtgtcatcagtattaccttcagcttcgaaaagatattttggaggaaaggatgcactgtgatgatgagacttccttattgctggcatccttggctctccaggctgagtatggagattatcaaccagaggttcatggtgtgtcttactttagaatggagcactatttgcccgccagagtgatggagaaacttgatttatcctatatcaaagaagagttacccaaattgcataatacctatgtgggagcttctgaaaaagagacagagttagaatttttaaaggtctgccaaagactgacagaatatggagttcattttcaccgagtgcaccctgagaagaagtcacaaacaggaatattgcttggagtctgttctaaaggtgtccttgtgtttgaagttcacaatggagtgcgcacattggtccttcgctttccatggagggaaaccaagaaaatatctttttctaaaaagaaaatcacattgcaaaatacatcagatggaataaaacatggcttccagacagacaacagtaagatatgccagtacctgctgcacctctgctcttaccagcataagttccagctacagatgagagcaagacagagcaaccaagatgcccaagatattgagagagcttcgtttaggagcctgaatctccaagcagagtctgttagaggatttaatatgggacgagcaatcagcactggcagtctggccagcagcaccctcaacaaacttgctgttcgacctttatcagttcaagctgagattctgaagaggctatcctgctcagagctgtcgctttaccagccattgcaaaacagttcaaaagagaagaatgacaaagcttcatgggaggaaaagcctagagagatgagtaaatcataccatgatctcagtcaggcctctctctatccacatcggaaaaatgtcattgttaacatggaacccccaccacaaaccgttgcagagttggtgggaaaaccttctcaccagatgtcaagatctgatgcagaatctttggcaggagtgacaaaacttaataattcaaagtctgttgcgagtttaaatagaagtcctgaaaggaggaaacatgaatcagactcctcatccattgaagaccctgggcaagcatatgttctagatgtgctacacaaaagatggagcatagtatcttcaccagaaagggagatcaccttagtgaacctgaaaaaagatgcaaagtatggcttgggatttcaaattattggtggggagaagatgggaagactggacctaggcatatttatcagttcagttgcccctggaggaccagctgacttggatggatgcttgaagccaggagaccgtttgatatctgtgaatagtgtgagtctggagggagtcagccaccatgctgcaattgaaattttgcaaaatgcacctgaagatgtgacacttgttatctctcagccaaaagaaaagatatccaaagtgccttctactcctgtgcatctcaccaatgagatgaaaaactacatgaagaaatcttcctacatgcaagacagtgctatagattcttcttccaaggatcaccactggtcacgtggtaccctgaggcacatctcggagaactcctttgggccatctgggggcctgcgggaaggaagcctgagttctcaagattccaggactgagagtgccagcttgtctcaaagccaggtcaatggtttctttgccagccatttaggtgaccaaacctggcaggaatcacagcatggcagcccttccccatctgtaatatccaaagccaccgagaaagagactttcactgatagtaaccaaagcaaaactaaaaagccaggcatttctgatgtaactgattactcagaccgtggagattcagacatggatgaagccacttactccagcagtcaggatcatcaaacaccaaaacaggaatcttcctcttcagtgaatacatccaacaagatgaattttaaaactttttcttcatcacctcctaagcctggagatatctttgaggttgaactggctaaaaatgataacagcttggggataagtgtcacgggaggtgtgaatacgagtgtcagacatggtggcatttatgtgaaagctgttattccccagggagcagcagagtctgatggtagaattcacaaaggtgatcgcgtcctagctgtcaatggagttagtctagaaggagccacccataagcaagctgtggaaacactgagaaatacaggacaggtggttcatctgttattagaaaagggacaatctccaacatctaaagaacatgtcccggtaaccccacagtgtaccctttcagatcagaatgcccaaggtcaaggcccagaaaaagtgaagaaaacaactcaggtcaaagactacagctttgtcactgaagaaaatacatttgaggtaaaattatttaaaaatagctcaggtctaggattcagtttttctcgagaagataatcttataccggagcaaattaatgccagcatagtaagggttaaaaagctctttcctggacagccagcagcagaaagtggaaaaattgatgtaggagatgttatcttgaaagtgaatggagcctctttgaaaggactatctcagcaggaagtcatatctgctctcaggggaactgctccagaagtattcttgcttctctgcagacctccacctggtgtgctaccggaaattgatactgcgcttttgaccccacttcagtctccagcacaagtacttccaaacagcagtaaagactcttctcagccatcatgtgtggagcaaagcaccagctcagatgaaaatgaaatgtcagacaaaagcaaaaaacagtgcaagtccccatccagaagagacagttacagtgacagcagtgggagtggagaagatgacttagtgacagctccagcaaacatatcaaattcgacctggagttcagctttgcatcagactctaagcaacatggtatcacaggcacagagtcatcatgaagcacccaagagtcaagaagataccatttgtaccatgttttactatcctcagaaaattcccaataaaccagagtttgaggacagtaatccttcccctctaccaccggatatggctcctgggcagagttatcaaccccaatcagaatctgcttcctctagttcgatggataagtatcatatacatcacatttctgaaccaactagacaagaaaactggacacctttgaaaaatgacttggaaaatcaccttgaagactttgaactggaagtagaactcctcattaccctaattaaatcagaaaaaggaagcctgggttttacagtaaccaaaggcaatcagagaattggttgttatgttcatgatgtcatacaggatccagccaaaagtgatggaaggctaaaacctggggaccggctcataaaggttaatgatacagatgttactaatatgactcatacagatgcagttaatctgctccgggctgcatccaaaacagtcagattagttattggacgagttctagaattacccagaataccaatgttgcctcatttgctaccggacataacactaacgtgcaacaaagaggagttgggtttttccttatgtggaggtcatgacagcctttatcaagtggtatatattagtgatattaatccaaggtccgtcgcagccattgagggtaatctccagctattagatgtcatccattatgtgaacggagtcagcacacaaggaatgaccttggaggaagttaacagagcattagacatgtcacttccttcattggtattgaaagcaacaagaaatgatcttccagtggtccccagctcaaagaggtctgctgtttcagctccaaagtcaaccaaaggcaatggttcctacagtgtggggtcttgcagccagcctgccctcactcctaatgattcattctccacggttgctggggaagaaataaatgaaatatcgtaccccaaaggaaaatgttctacttatcagataaagggatcaccaaacttgactctgcccaaagaatcttatatacaagaagatgacatttatgatgattcccaagaagctgaagttatccagtctctgctggatgttgtggatgaggaagcccagaatcttttaaacgaaaataatgcagcaggatactcctgtggtccaggtacattaaagatgaatgggaagttatcagaagagagaacagaagatacagactgcgatggttcacctttacctgagtattttactgaggccaccaaaatgaatggctgtgaagaatattgtgaagaaaaagtaaaaagtgaaagcttaattcagaagccacaagaaaagaagactgatgatgatgaaataacatggggaaatgatgagttgccaatagagagaacaaaccatgaagattctgataaagatcattcctttctgacaaacgatgagctcgctgtactccctgtcgtcaaagtgcttccctctggtaaatacacgggtgccaacttaaaatcagtcattcgagtcctgcggggtttgctagatcaaggaattccttctaaggagctggagaatcttcaagaattaaaacctttggatcagtgtctaattgggcaaactaaggaaaacagaaggaagaacagatataaaaatatacttccctatgatgctacaagagtgcctcttggagatgaaggtggctatatcaatgccagcttcattaagataccagttgggaaagaagagttcgtttacattgcctgccaaggaccactgcctacaactgttggagacttctggcagatgatttgggagcaaaaatccacagtgatagccatgatgactcaagaagtagaaggagaaaaaatcaaatgccagcgctattggcccaacatcctaggcaaaacaacaatggtcagcaacagacttcgactggctcttgtgagaatgcagcagctgaagggctttgtggtgagggcaatgacccttgaagatattcagaccagagaggtgcgccatatttctcatctgaatttcactgcctggccagaccatgatacaccttctcaaccagatgatctgcttacttttatctcctacatgagacacatccacagatcaggcccaatcattacgcactgcagtgctggcattggacgttcagggaccctgatttgcatagatgtggttctgggattaatcagtcaggatcttgattttgacatctctgatttggtgcgctgcatgagactacaaagacacggaatggttcagacagaggatcaatatattttctgctatcaagtcatcctttatgtcctgacacgtcttcaagcagaagaagagcaaaaacagcagcctcagcttctgaagtgacatgaaaagagcctctggatgcatttccatttctctccttaacctccagcagactcctgctctctatccaaaataaagatcacagagcagcaagttcatacaacatgcatgttctcctctatcttagaggggtattcttcttgaaaataaaaaatattgaaatgctgtatttttacagctactttaacctatgataattatttacaaaattttaacactaaccaaacaatgcagatcttagggatgattaaaggcagcatttgatgatagcagacattgttacaaggacatggtgagtctatttttaatgcaccaatcttgtttatagcaaaaatgttttccaatattttaataaagtagttattttataggggatacttgaaaccagtatttaagctttaaatgacagtaatattggcatagaaaaaagtagcaaatgtttactgtatcaatttctaatgtttactatatagaatttcctgtaatatatttatatactttttcatgaaaatggagttatcagttatctgtttgttactgcatcatctgtttgtaatcattatctcactttgtaaataaaaacacaccttaaaacatgaaaaaaaaaaaaaaaaaaaaaaaaaaaaaaaaaaagaaaaaaaaaaaaaaaaaaaagaaaagaagaaaaagaagcacaacaaaaacaaaacaaggggagggggggcgaacaaaaaaattaccccacagaagggaggcacatcataagacaaccacctattgtctgaaaggaaggacgccaccagaggcggattaaaaaacagcaggcgggcgggcgataacaacggacggggcggaacacaccgtcggcatactaggagagaccctcgggtgggggcagtagggaccacaacaagagaagcagcgaaaaaaaccaggtgtgggcacccccactagcgaggacggcggatgaatc

SEQ ID NO: 441144 - DNA, 7606 bp, Homo sapiens
aatgtccgttcatgtatacttgcttttattagataagagacgatgaactatgaaaagttatgcaaacatagtatctctttcctcttccactatgaccatcatcaccatcccatttcacctctgatcttccatttggagcatttaggaaattgccaccactttcattgtcaatagtggattacatttccatttattttctaaaaattgtgtgcatacatgatagattcttatcattccaggaagaagctctacttctgatgtactagacatacaaaagcctccactctctcatcagacctttcttaacaaagggcttagtaaatctatgggatttctgtccatcaaagatacacaagatgagaattatttcaaggacattttatcagataattctggacgtgaagattctgaaaatacattctccccttaccagttcaaaactagtggcccagaaaaaaaacccatccctggcattgatgtgctttctaagaagaagatctgggcttcatccatggacttgctttgtacagctgacagagacttctcttcaggagagactgccacatatcgtcgttgtcaccctgaggcagtaacagtgcggacttcaactactcctagaaaaaaggaggcaagatactcagatggaagtatagccttggatatctttggccctcagaaaatggatccaatatatcacactcgagaattgcccacctcctcagcaatatcaagtgctttggaccgaatccgagagagacaaaagaaacttcaggttctgagggaagccatgaatgtagaagaaccagttcgaagatacaaaacttatcatggtgatgtctttagtacctccagtgaaagtccatctattatttcctctgaatcagatttcagacaagtgagaagaagtgaagcctcaaagaggtttgaatccagcagtggtctcccaggggtagatgaaaccttaagtcaaggccagtcacagagaccgagcagacaatatgaaacaccctttgaaggcaacttaattaatcaagagatcatgctaaaacggcaagaggaagaactgatgcagctacaagccaaaatggcccttagacagtctcggttgagcctatatccaggagacacaatcaaagcgtccatgcttgacatcaccagggatccgttaagagaaattgccctagaaacagccatgactcaaagaaaactgaggaatttctttggccctgagtttgtgaaaatgacaattgaaccatttatatctttggatttgccacggtctattcttactaagaaagggaagaatgaggataaccgaaggaaagtaaacataatgcttctgaacgggcaaagactggaactgacctgtgataccaaaactatatgtaaagatgtgtttgatatggttgtggcacatattggcttagtagagcatcatttgtttgctttagctaccctcaaagataatgaatatttctttgttgatcctgacttaaaattaaccaaagtggccccagagggatggaaagaagaaccaaagaaaaagaccaaagccactgttaattttactttgtttttcagaattaaattttttatggatgatgttagtctaatacaacatactctgacgtgtcatcagtattaccttcagcttcgaaaagatattttggaggaaaggatgcactgtgatgatgagacttccttattgctggcatccttggctctccaggctgagtatggagattatcaaccagaggttcatggtgtgtcttactttagaatggagcactatttgcccgccagagtgatggagaaacttgatttatcctatatcaaagaagagttacccaaattgcataatacctatgtgggagcttctgaaaaagagacagagttagaatttttaaaggtctgccaaagactgacagaatatggagttcattttcaccgagtgcaccctgagaagaagtcacaaacaggaatattgcttggagtctgttctaaaggtgtccttgtgtttgaagttcacaatggagtgcgcacattggtccttcgctttccatggagggaaaccaagaaaatatctttttctaaaaagaaaatcacattgcaaaatacatcagatggaataaaacatggcttccagacagacaacagtaagatatgccagtacctgctgcacctctgctcttaccagcataagttccagctacagatgagagcaagacagagcaaccaagatgcccaagatattgagagagcttcgtttaggagcctgaatctccaagcagagtctgttagaggatttaatatgggacgagcaatcagcactggcagtctggccagcagcaccctcaacaaacttgctgttcgacctttatcagttcaagctgagattctgaagaggctatcctgctcagagctgtcgctttaccagccattgcaaaacagttcaaaagagaagaatgacaaagcttcatgggaggaaaagcctagagagatgagtaaatcataccatgatctcagtcaggcctctctctatccacatcggaaaaatgtcattgttaacatggaacccccaccacaaaccgttgcagagttggtgggaaaaccttctcaccagatgtcaagatctgatgcagaatctttggcaggagtgacaaaacttaataattcaaagtctgttgcgagtttaaatagaagtcctgaaaggaggaaacatgaatcagactcctcatccattgaagaccctgggcaagcatatgttctagatgtgctacacaaaagatggagcatagtatcttcaccagaaagggagatcaccttagtgaacctgaaaaaagatgcaaagtatggcttgggatttcaaattattggtggggagaagatgggaagactggacctaggcatatttatcagttcagttgcccctggaggaccagctgacttggatggatgcttgaagccaggagaccgtttgatatctgtgaatagtgtgagtctggagggagtcagccaccatgctgcaattgaaattttgcaaaatgcacctgaagatgtgacacttgttatctctcagccaaaagaaaagatatccaaagtgccttctactcctgtgcatctcaccaatgagatgaaaaactacatgaagaaatcttcctacatgcaagacagtgctatagattcttcttccaaggatcaccactggtcacgtggtaccctgaggcacatctcggagaactcctttgggccatctgggggcctgcgggaaggaagcctgagttctcaagattccaggactgagagtgccagcttgtctcaaagccaggtcaatggtttctttgccagccatttaggtgaccaaacctggcaggaatcacagcatggcagcccttccccatctgtaatatccaaagccaccgagaaagagactttcactgatagtaaccaaagcaaaactaaaaagccaggcatttctgatgtaactgattactcagaccgtggagattcagacatggatgaagccacttactccagcagtcaggatcatcaaacaccaaaacaggaatcttcctcttcagtgaatacatccaacaagatgaattttaaaactttttcttcatcacctcctaagcctggagatatctttgaggttgaactggctaaaaatgataacagcttggggataagtgtcacgggaggtgtgaatacgagtgtcagacatggtggcatttatgtgaaagctgttattccccagggagcagcagagtctgatggtagaattcacaaaggtgatcgcgtcctagctgtcaatggagttagtctagaaggagccacccataagcaagctgtggaaacactgagaaatacaggacaggtggttcatctgttattagaaaagggacaatctccaacatctaaagaacatgtcccggtaaccccacagtgtaccctttcagatcagaatgcccaaggtcaaggcccagaaaaagtgaagaaaacaactcaggtcaaagactacagctttgtcactgaagaaaatacatttgaggtaaaattatttaaaaatagctcaggtctaggattcagtttttctcgagaagataatcttataccggagcaaattaatgccagcatagtaagggttaaaaagctctttcctggacagccagcagcagaaagtggaaaaattgatgtaggagatgttatcttgaaagtgaatggagcctctttgaaaggactatctcagcaggaagtcatatctgctctcaggggaactgctccagaagtattcttgcttctctgcagacctccacctggtgtgctaccggaaattgatactgcgcttttgaccccacttcagtctccagcacaagtacttccaaacagcagtaaagactcttctcagccatcatgtgtggagcaaagcaccagctcagatgaaaatgaaatgtcagacaaaagcaaaaaacagtgcaagtccccatccagaagagacagttacagtgacagcagtgggagtggagaagatgacttagtgacagctccagcaaacatatcaaattcgacctggagttcagctttgcatcagactctaagcaacatggtatcacaggcacagagtcatcatgaagcacccaagagtcaagaagataccatttgtaccatgttttactatcctcagaaaattcccaataaaccagagtttgaggacagtaatccttcccctctaccaccggatatggctcctgggcagagttatcaaccccaatcagaatctgcttcctctagttcgatggataagtatcatatacatcacatttctgaaccaactagacaagaaaactggacacctttgaaaaatgacttggaaaatcaccttgaagactttgaactggaagtagaactcctcattaccctaattaaatcagaaaaaggaagcctgggttttacagtaaccaaaggcaatcagagaattggttgttatgttcatgatgtcatacaggatccagccaaaagtgatggaaggctaaaacctggggaccggctcataaaggttaatgatacagatgttactaatatgactcatacagatgcagttaatctgctccgggctgcatccaaaacagtcagattagttattggacgagttctagaattacccagaataccaatgttgcctcatttgctaccggacataacactaacgtgcaacaaagaggagttgggtttttccttatgtggaggtcatgacagcctttatcaagtggtatatattagtgatattaatccaaggtccgtcgcagccattgagggtaatctccagctattagatgtcatccattatgtgaacggagtcagcacacaaggaatgaccttggaggaagttaacagagcattagacatgtcacttccttcattggtattgaaagcaacaagaaatgatcttccagtggtccccagctcaaagaggtctgctgtttcagctccaaagtcaaccaaaggcaatggttcctacagtgtggggtcttgcagccagcctgccctcactcctaatgattcattctccacggttgctggggaagaaataaatgaaatatcgtaccccaaaggaaaatgttctacttatcagataaagggatcaccaaacttgactctgcccaaagaatcttatatacaagaagatgacatttatgatgattcccaagaagctgaagttatccagtctctgctggatgttgtggatgaggaagcccagaatcttttaaacgaaaataatgcagcaggatactcctgtggtccaggtacattaaagatgaatgggaagttatcagaagagagaacagaagatacagactgcgatggttcacctttacctgagtattttactgaggccaccaaaatgaatggctgtgaagaatattgtgaagaaaaagtaaaaagtgaaagcttaattcagaagccacaagaaaagaagactgatgatgatgaaataacatggggaaatgatgagttgccaatagagagaacaaaccatgaagattctgataaagatcattcctttctgacaaacgatgagctcgctgtactccctgtcgtcaaagtgcttccctctggtaaatacacgggtgccaacttaaaatcagtcattcgagtcctgcggggtttgctagatcaaggaattccttctaaggagctggagaatcttcaagaattaaaacctttggatcagtgtctaattgggcaaactaaggaaaacagaaggaagaacagatataaaaatatacttccctatgatgctacaagagtgcctcttggagatgaaggtggctatatcaatgccagcttcattaagataccagttgggaaagaagagttcgtttacattgcctgccaaggaccactgcctacaactgttggagacttctggcagatgatttgggagcaaaaatccacagtgatagccatgatgactcaagaagtagaaggagaaaaaatcaaatgccagcgctattggcccaacatcctaggcaaaacaacaatggtcagcaacagacttcgactggctcttgtgagaatgcagcagctgaagggctttgtggtgagggcaatgacccttgaagatattcagaccagagaggtgcgccatatttctcatctgaatttcactgcctggccagaccatgatacaccttctcaaccagatgatctgcttacttttatctcctacatgagacacatccacagatcaggcccaatcattacgcactgcagtgctggcattggacgttcagggaccctgatttgcatagatgtggttctgggattaatcagtcaggatcttgattttgacatctctgatttggtgcgctgcatgagactacaaagacacggaatggttcagacagaggatcaatatattttctgctatcaagtcatcctttatgtcctgacacgtcttcaagcagaagaagagcaaaaacagcagcctcagcttctgaagtgacatgaaaagagcctctggatgcatttccatttctctccttaacctccagcagactcctgctctctatccaaaataaagatcacagagcagcaagttcatacaacatgcatgttctcctctatcttagaggggtattcttcttgaaaataaaaaatattgaaatgctgtatttttacagctactttaacctatgataattatttacaaaattttaacactaaccaaacaatgcagatcttagggatgattaaaggcagcatttgatgatagcagacattgttacaaggacatggtgagtctatttttaatgcaccaatcttgtttatagcaaaaatgttttccaatattttaataaagtagttattttataggggatacttgaaaccagtatttaagctttaaatgacagtaatattggcatagaaaaaagtagcaaatgtttactgtatcaatttctaatgtttactatatagaatttcctgtaatatatttatatactttttcatgaaaatggagttatcagttatctgtttgttactgcatcatctgtttgtaatcattatctcactttgtaaataaaaacacaccttaaaacatgaa

SEQ ID NO: 441145 - DNA, 7723 bp, Homo sapiens
aatgtccgttcatgtatacttgcttttattagataagagacgatgaactatgaaaagttatgcaaacatagtatctctttcctcttccactatgaccatcatcaccatcccatttcacctctgatcttccatttggagcatttaggaaattgccaccactttcattgtcaatagtggattacatttccatttattttctaaaaattgtgtgcatacatgatagattcttatcattccaggaagaagctctacttctgatgtactagacatacaaaagcctccactctctcatcagacctttcttaacaaagggcttagtaaatctatgggatttctgtccatcaaagatacacaagatgagaattatttcaaggacattttatcagataattctggacgtgaagattctgaaaatacattctccccttaccagttcaaaactagtggcccagaaaaaaaacccatccctggcattgatgtgctttctaagaagaagatctgggcttcatccatggacttgctttgtacagctgacagagacttctcttcaggagagactgccacatatcgtcgttgtcaccctgaggcagtaacagtgcggacttcaactactcctagaaaaaaggaggcaagatactcagatggaagtatagccttggatatctttggccctcagaaaatggatccaatatatcacactcgagaattgcccacctcctcagcaatatcaagtgctttggaccgaatccgagagagacaaaagaaacttcaggttctgagggaagccatgaatgtagaagaaccagttcgaagatacaaaacttatcatggtgatgtctttagtacctccagtgaaagtccatctattatttcctctgaatcagatttcagacaagtgagaagaagtgaagcctcaaagaggtttgaatccagcagtggtctcccaggggtagatgaaaccttaagtcaaggccagtcacagagaccgagcagacaatatgaaacaccctttgaaggcaacttaattaatcaagagatcatgctaaaacggcaagaggaagaactgatgcagctacaagccaaaatggcccttagacagtctcggttgagcctatatccaggagacacaatcaaagcgtccatgcttgacatcaccagggatccgttaagagaaattgccctagaaacagccatgactcaaagaaaactgaggaatttctttggccctgagtttgtgaaaatgacaattgaaccatttatatctttggatttgccacggtctattcttactaagaaagggaagaatgaggataaccgaaggaaagtaaacataatgcttctgaacgggcaaagactggaactgacctgtgataccaaaactatatgtaaagatgtgtttgatatggttgtggcacatattggcttagtagagcatcatttgtttgctttagctaccctcaaagataatgaatatttctttgttgatcctgacttaaaattaaccaaagtggccccagagggatggaaagaagaaccaaagaaaaagaccaaagccactgttaattttactttgtttttcagaattaaattttttatggatgatgttagtctaatacaacatactctgacgtgtcatcagtattaccttcagcttcgaaaagatattttggaggaaaggatgcactgtgatgatgagacttccttattgctggcatccttggctctccaggctgagtatggagattatcaaccagaggttcatggtgtgtcttactttagaatggagcactatttgcccgccagagtgatggagaaacttgatttatcctatatcaaagaagagttacccaaattgcataatacctatgtgggagcttctgaaaaagagacagagttagaatttttaaaggtctgccaaagactgacagaatatggagttcattttcaccgagtgcaccctgagaagaagtcacaaacaggaatattgcttggagtctgttctaaaggtgtccttgtgtttgaagttcacaatggagtgcgcacattggtccttcgctttccatggagggaaaccaagaaaatatctttttctaaaaagaaaatcacattgcaaaatacatcagatggaataaaacatggcttccagacagacaacagtaagatatgccagtacctgctgcacctctgctcttaccagcataagttccagctacagatgagagcaagacagagcaaccaagatgcccaagatattgagagagcttcgtttaggagcctgaatctccaagcagagtctgttagaggatttaatatgggacgagcaatcagcactggcagtctggccagcagcaccctcaacaaacttgctgttcgacctttatcagttcaagctgagattctgaagaggctatcctgctcagagctgtcgctttaccagccattgcaaaacagttcaaaagagaagaatgacaaagcttcatgggaggaaaagcctagagagatgagtaaatcataccatgatctcagtcaggcctctctctatccacatcggaaaaatgtcattgttaacatggaacccccaccacaaaccgttgcagagttggtgggaaaaccttctcaccagatgtcaagatctgatgcagaatctttggcaggagtgacaaaacttaataattcaaagtctgttgcgagtttaaatagaagtcctgaaaggaggaaacatgaatcagactcctcatccattgaagaccctgggcaagcatatgttctagatgtgctacacaaaagatggagcatagtatcttcaccagaaagggagatcaccttagtgaacctgaaaaaagatgcaaagtatggcttgggatttcaaattattggtggggagaagatgggaagactggacctaggcatatttatcagttcagttgcccctggaggaccagctgacttggatggatgcttgaagccaggagaccgtttgatatctgtgaatagtgtgagtctggagggagtcagccaccatgctgcaattgaaattttgcaaaatgcacctgaagatgtgacacttgttatctctcagccaaaagaaaagatatccaaagtgccttctactcctgtgcatctcaccaatgagatgaaaaactacatgaagaaatcttcctacatgcaagacagtgctatagattcttcttccaaggatcaccactggtcacgtggtaccctgaggcacatctcggagaactcctttgggccatctgggggcctgcgggaaggaagcctgagttctcaagattccaggactgagagtgccagcttgtctcaaagccaggtcaatggtttctttgccagccatttaggtgaccaaacctggcaggaatcacagcatggcagcccttccccatctgtaatatccaaagccaccgagaaagagactttcactgatagtaaccaaagcaaaactaaaaagccaggcatttctgatgtaactgattactcagaccgtggagattcagacatggatgaagccacttactccagcagtcaggatcatcaaacaccaaaacaggaatcttcctcttcagtgaatacatccaacaagatgaattttaaaactttttcttcatcacctcctaagcctggagatatctttgaggttgaactggctaaaaatgataacagcttggggataagtgtcacgggaggtgtgaatacgagtgtcagacatggtggcatttatgtgaaagctgttattccccagggagcagcagagtctgatggtagaattcacaaaggtgatcgcgtcctagctgtcaatggagttagtctagaaggagccacccataagcaagctgtggaaacactgagaaatacaggacaggtggttcatctgttattagaaaagggacaatctccaacatctaaagaacatgtcccggtaaccccacagtgtaccctttcagatcagaatgcccaaggtcaaggcccagaaaaagtgaagaaaacaactcaggtcaaagactacagctttgtcactgaagaaaatacatttgaggtaaaattatttaaaaatagctcaggtctaggattcagtttttctcgagaagataatcttataccggagcaaattaatgccagcatagtaagggttaaaaagctctttcctggacagccagcagcagaaagtggaaaaattgatgtaggagatgttatcttgaaagtgaatggagcctctttgaaaggactatctcagcaggtgagcccctagcatgtggagtatagcatttttaatgatgagatggattggcctttcagaatggtttcataatgctggtttaactgtaccttcatttgtcattcatggtacccccaggaagtcatatctgctctcaggggaactgctccagaagtattcttgcttctctgcagacctccacctggtgtgctaccggaaattgatactgcgcttttgaccccacttcagtctccagcacaagtacttccaaacagcagtaaagactcttctcagccatcatgtgtggagcaaagcaccagctcagatgaaaatgaaatgtcagacaaaagcaaaaaacagtgcaagtccccatccagaagagacagttacagtgacagcagtgggagtggagaagatgacttagtgacagctccagcaaacatatcaaattcgacctggagttcagctttgcatcagactctaagcaacatggtatcacaggcacagagtcatcatgaagcacccaagagtcaagaagataccatttgtaccatgttttactatcctcagaaaattcccaataaaccagagtttgaggacagtaatccttcccctctaccaccggatatggctcctgggcagagttatcaaccccaatcagaatctgcttcctctagttcgatggataagtatcatatacatcacatttctgaaccaactagacaagaaaactggacacctttgaaaaatgacttggaaaatcaccttgaagactttgaactggaagtagaactcctcattaccctaattaaatcagaaaaaggaagcctgggttttacagtaaccaaaggcaatcagagaattggttgttatgttcatgatgtcatacaggatccagccaaaagtgatggaaggctaaaacctggggaccggctcataaaggttaatgatacagatgttactaatatgactcatacagatgcagttaatctgctccgggctgcatccaaaacagtcagattagttattggacgagttctagaattacccagaataccaatgttgcctcatttgctaccggacataacactaacgtgcaacaaagaggagttgggtttttccttatgtggaggtcatgacagcctttatcaagtggtatatattagtgatattaatccaaggtccgtcgcagccattgagggtaatctccagctattagatgtcatccattatgtgaacggagtcagcacacaaggaatgaccttggaggaagttaacagagcattagacatgtcacttccttcattggtattgaaagcaacaagaaatgatcttccagtggtccccagctcaaagaggtctgctgtttcagctccaaagtcaaccaaaggcaatggttcctacagtgtggggtcttgcagccagcctgccctcactcctaatgattcattctccacggttgctggggaagaaataaatgaaatatcgtaccccaaaggaaaatgttctacttatcagataaagggatcaccaaacttgactctgcccaaagaatcttatatacaagaagatgacatttatgatgattcccaagaagctgaagttatccagtctctgctggatgttgtggatgaggaagcccagaatcttttaaacgaaaataatgcagcaggatactcctgtggtccaggtacattaaagatgaatgggaagttatcagaagagagaacagaagatacagactgcgatggttcacctttacctgagtattttactgaggccaccaaaatgaatggctgtgaagaatattgtgaagaaaaagtaaaaagtgaaagcttaattcagaagccacaagaaaagaagactgatgatgatgaaataacatggggaaatgatgagttgccaatagagagaacaaaccatgaagattctgataaagatcattcctttctgacaaacgatgagctcgctgtactccctgtcgtcaaagtgcttccctctggtaaatacacgggtgccaacttaaaatcagtcattcgagtcctgcggggtttgctagatcaaggaattccttctaaggagctggagaatcttcaagaattaaaacctttggatcagtgtctaattgggcaaactaaggaaaacagaaggaagaacagatataaaaatatacttccctatgatgctacaagagtgcctcttggagatgaaggtggctatatcaatgccagcttcattaagataccagttgggaaagaagagttcgtttacattgcctgccaaggaccactgcctacaactgttggagacttctggcagatgatttgggagcaaaaatccacagtgatagccatgatgactcaagaagtagaaggagaaaaaatcaaatgccagcgctattggcccaacatcctaggcaaaacaacaatggtcagcaacagacttcgactggctcttgtgagaatgcagcagctgaagggctttgtggtgagggcaatgacccttgaagatattcagaccagagaggtgcgccatatttctcatctgaatttcactgcctggccagaccatgatacaccttctcaaccagatgatctgcttacttttatctcctacatgagacacatccacagatcaggcccaatcattacgcactgcagtgctggcattggacgttcagggaccctgatttgcatagatgtggttctgggattaatcagtcaggatcttgattttgacatctctgatttggtgcgctgcatgagactacaaagacacggaatggttcagacagaggatcaatatattttctgctatcaagtcatcctttatgtcctgacacgtcttcaagcagaagaagagcaaaaacagcagcctcagcttctgaagtgacatgaaaagagcctctggatgcatttccatttctctccttaacctccagcagactcctgctctctatccaaaataaagatcacagagcagcaagttcatacaacatgcatgttctcctctatcttagaggggtattcttcttgaaaataaaaaatattgaaatgctgtatttttacagctactttaacctatgataattatttacaaaattttaacactaaccaaacaatgcagatcttagggatgattaaaggcagcatttgatgatagcagacattgttacaaggacatggtgagtctatttttaatgcaccaatcttgtttatagcaaaaatgttttccaatattttaataaagtagttattttataggggatacttgaaaccagtatttaagctttaaatgacagtaatattggcatagaaaaaagtagcaaatgtttactgtatcaatttctaatgtttactatatagaatttcctgtaatatatttatatactttttcatgaaaatggagttatcagttatctgtttgttactgcatcatctgtttgtaatcattatctcactttgtaaataaaaacacaccttaaaacatgaa

SEQ ID NO: 441146 - DNA, 794 bp, Homo sapiens
aactcatccaacatcacttccaatagtggtatagctatatatatataatatttacattatacatctaaagtattctatctcactttttttggccataggatcaatatattttctgctatcaagtcatcctttatgtcctgacacgtcttcaagcagaagaagagcaaaaacagcagcctcagcttctgaagtgacatgaaaagagcctctggatgcatttccatttctctccttaacctccagcagactcctgctctctatccaaaataaagatcacagagcagcaagttcatacaacatgcatgttctcctctatcttagaggggtattcttcttgaaaataaaaaatattgaaatgctgtatttttacagctactttaacctatgataattatttacaaaattttaacactaaccaaacaatgcagatcttagggatgattaaaggcagcatttgatgatagcagacattgttacaaggacatggtgagtctatttttaatgcaccaatcttgtttatagcaaaaatgttttccaatattttaataaagtagttattttataggggatacttgaaaccagtatttaagctttaaatgacagtaatattggcatagaaaaaagtagcaaatgtttactgtatcaatttctaatgtttactatatagaatttcctgtaatatatttatatactttttcatgaaaatggagttatcagttatctgtttgttactgcatcatctgtttgtaatcattatctcactttgtaaataaaaacacaccttaaaacatgaa

SEQ ID NO: 441147 - DNA, 3231 bp, Homo sapiens
aatgtccgttcatgtatacttgcttttattagataagagacgatgaactatgaaaagttatgcaaacatagtatctctttcctcttccactatgaccatcatcaccatcccatttcacctctgatcttccatttggagcatttaggaaattgccaccactttcattgtcaatagtggattacatttccatttattttctaaaaattgtgtgcatacatgatagattcttatcattccaggaagaagctctacttctgatgtactagacatacaaaagcctccactctctcatcagacctttcttaacaaagggcttagtaaatctatgggatttctgtccatcaaagatacacaagatgagaattatttcaaggacattttatcagataattctggacgtgaagattctgaaaatacattctccccttaccagttcaaaactagtggcccagaaaaaaaacccatccctggcattgatgtgctttctaagaagaagatctgggcttcatccatggacttgctttgtacagctgacagagacttctcttcaggagagactgccacatatcgtcgttgtcaccctgaggcagtaacagtgcggacttcaactactcctagaaaaaaggaggcaagatactcagatggaagtatagccttggatatctttggccctcagaaaatggatccaatatatcacactcgagaattgcccacctcctcagcaatatcaagtgctttggaccgaatccgagagagacaaaagaaacttcaggttctgagggaagccatgaatgtagaagaaccagttcgaagatacaaaacttatcatggtgatgtctttagtacctccagtgaaagtccatctattatttcctctgaatcagatttcagacaagtgagaagaagtgaagcctcaaagaggtttgaatccagcagtggtctcccaggggtagatgaaaccttaagtcaaggccagtcacagagaccgagcagacaatatgaaacaccctttgaaggcaacttaattaatcaagagatcatgctaaaacggcaagaggaagaactgatgcagctacaagccaaaatggcccttagacagtctcggttgagcctatatccaggagacacaatcaaagcgtccatgcttgacatcaccagggatccgttaagagaaattgccctagaaacagccatgactcaaagaaaactgaggaatttctttggccctgagtttgtgaaaatgacaattgaaccatttatatctttggatttgccacggtctattcttactaagaaagggaagaatgaggataaccgaaggaaagtaaacataatgcttctgaacgggcaaagactggaactgacctgtgataccaaaactatatgtaaagatgtgtttgatatggttgtggcacatattggcttagtagagcatcatttgtttgctttagctaccctcaaagataatgaatatttctttgttgatcctgacttaaaattaaccaaagtggccccagagggatggaaagaagaaccaaagaaaaagaccaaagccactgttaattttactttgtttttcagaattaaattttttatggatgatgttagtctaatacaacatactctgacgtgtcatcagtattaccttcagcttcgaaaagatattttggaggaaaggatgcactgtgatgatgagacttccttattgctggcatccttggctctccaggctgagtatggagattatcaaccagaggttcatggtgtgtcttactttagaatggagcactatttgcccgccagagtgatggagaaacttgatttatcctatatcaaagaagagttacccaaattgcataatacctatgtgggagcttctgaaaaagagacagagttagaatttttaaaggtctgccaaagactgacagaatatggagttcattttcaccgagtgcaccctgagaagaagtcacaaacaggaatattgcttggagtctgttctaaaggtgtccttgtgtttgaagttcacaatggagtgcgcacattggtccttcgctttccatggagggaaaccaagaaaatatctttttctaaaaagaaaatcacattgcaaaatacatcagatggaataaaacatggcttccagacagacaacagtaagatatgccagtacctgctgcacctctgctcttaccagcataagttccagctacagatgagagcaagacagagcaaccaagatgcccaagatattgagagagcttcgtttaggagcctgaatctccaagcagagtctgttagaggatttaatatgggacgagcaatcagcactggcagtctggccagcagcaccctcaacaaacttgctgttcgacctttatcagttcaagctgagattctgaagaggctatcctgctcagagctgtcgctttaccagccattgcaaaacagttcaaaagagaagaatgacaaagcttcatgggaggaaaagcctagagagatgagtaaatcataccatgatctcagtcaggcctctctctatccacatcggaaaaatgtcattgttaacatggaacccccaccacaaaccgttgcagagttggtgggaaaaccttctcaccagatgtcaagatctgatgcagaatctttggcaggagtgacaaaacttaataattcaaagtctgttgcgagtttaaatagaagtcctgaaaggaggaaacatgaatcagactcctcatccattgaagaccctgggcaagcatatgttctagatgtgctacacaaaagatggagcatagtatcttcaccagaaagggagatcaccttagtgaacctgaaaaaagatgcaaagtatggcttgggatttcaaattattggtggggagaagatgggaagactggacctaggcatatttatcagttcagttgcccctggaggaccagctgacttggatggatgcttgaagccaggagaccgtttgatatctgtgaatagtgtgagtctggagggagtcagccaccatgctgcaattgaaattttgcaaaatgcacctgaagatgtgacacttgttatctctcagccaaaagaaaagatatccaaaggtaatgtgaatgtctcttacttatgtattctgtttcacttttctgtctcattcctttttagtgatattcgcacaaaaatggattcattgtgtacaaaattgatgcaacttaagtaaactgtgattactta

SEQ ID NO: 441148 - DNA, 413 bp, Homo sapiens
attacaggcgtgagcctctgagcccagcctgatatctacacttttagtaaggactaactaggaactttcctccaatctctatatatttatagttcaacttatcttctctcttgatttaaatttatttttataaagatactgttctaaaatatacttaacattagacataagattggggaataaattaaataacatattaaagaaactctgtaacacaatttcttccagaatttgcctgagtccctcctcaaacaaatgaatacgaaataagaccataagatttaaaagaacatgtaggatttttatttatgatttgaactgcctaatttttaggtgatcgcgtcctagctgtcaatggagttagtctagaaggagccacccataagcaagctgtggaaacactgagaaataca

SEQ ID NO: 441149 - DNA, 303 bp, Homo sapiens
gccccagagggatggaaagaagaaccaaagaaaaagaccaaagccactgttaattttactttgtttttcagaattaaattttttatggatgatgttagtctaatacagtgagtacacaagagtttctcttttgctctttttggacactggtcttttgaccctttagcttactgatactgaattacttgattccaatcaatgataatgtctgctttatcataaaagtaatatttctttcaacacagtttatctaatccttatgccttaaaagcttaataataagcttagtaataaactcatgga

SEQ ID NO: 441150 - DNA, 364 bp, Homo sapiens
tttaatgttacatcctccaaaaactgtgtaactagtgtcattctgtaaacagttaccatgaaaacaaaagggagatccttttgtcaaacttgattttttattacctgtgtacagacagatcagctttcctgtaacagtgaacaaaagcctgatcgaagccaggctattcgagatcgattgcgaggaaaaggattaccaacaggtaagagtatattaataggaaatgtctaggctttaaccttatcccattgttttctttacaaaattatacttacctggctttgaaatctggtaattgagactatgattagaacgtaaacgtacaaactggaggtagggaatgggcaggaacactagctacatt

SEQ ID NO: 441151 - DNA, 425 bp, Homo sapiens
atcattcctttctgacaaacgatgagctcgctgtactccctgtcgtcaaagtgcttccctctggtaaatacacgggtgccaacttaaaatcagtcattcgagtcctgcggggtttgctagatcaaggaattccttctaaggagctggaggtaagtggcttctgccaatgattctctcccaaagtgtatgcatttagtttgtaaggaaaatgtatctttactggcccaagattagaagaatttttgaaaattttccaactctaaaagcaccaccttatcatatctagcagaaaattaatttttctgattaggatcccaataatagtgatttaaaggaatcactttaactacttggaacttgatacatttccctgaagattatccttcctgcctcatagttaaggtaaaaatgtttaaaaaaaaaaa

SEQ ID NO: 441152 - DNA, 8275 bp, Homo sapiens
ctgattatgaagtgcctcagagccaacctattaagcttggagatcatctcaacagcatactgcttggaatgtgtgaggatgttatttacgctcgagtttctgttcggactgtgctggatgcttgcagtgcccacattaggaatagcaattgtgcaccctcattttcctacgtgaaacacttggtaaaactggttctgggaaatctttctggggtaatatgcacgtgtcactagctgaggccctggaggttcggggtggaccacttcaggaggaagaaatatgggctgtattaaatcaaagtgctgaaagtctccaagaattattcagaaaagtaagcctagctgatcctgctgcccttggcttcatcatttctccatggtctctgctgttgctgccatctggtagtgtgtcatttacagatgaaaatatttccaatcaggatcttcgagcattcactgcaccagaggttcttcaaaatcagtcactaacttctctctcagatgttgaaaagatccacatttattctcttggaatgacactgtattggggggctgattatgaagtgcctcagagccaacctattaagcttggagatcatctcaacagcatactgcttggaatgtgtgaggatgttatttacgctcgagtttctgttcggactgtgctggatgcttgcagtgcccacattaggaatagcaattgtgcaccctcattttcctacgtgaaacacttggtaaaactggttctgggaaatctttctgggacagatcagctttcctgtaacagtgaacaaaagcctgatcgaagccaggctattcgagatcgattgcgaggaaaaggattaccaacaggaagaagctctacttctgatgtactagacatacaaaagcctccactctctcatcagacctttcttaacaaagggcttagtaaatctatgggatttctgtccatcaaagatacacaagatgagaattatttcaaggacattttatcagataattctggacgtgaagattctgaaaatacattctccccttaccagttcaaaactagtggcccagaaaaaaaacccatccctggcattgatgtgctttctaagaagaagatctgggcttcatccatggacttgctttgtacagctgacagagacttctcttcaggagagactgccacatatcgtcgttgtcaccctgaggcagtaacagtgcggacttcaactactcctagaaaaaaggaggcaagatactcagatggaagtatagccttggatatctttggccctcagaaaatggatccaatatatcacactcgagaattgcccacctcctcagcaatatcaagtgctttggaccgaatccgagagagacaaaagaaacttcaggttctgagggaagccatgaatgtagaagaaccagttcgaagatacaaaacttatcatggtgatgtctttagtacctccagtgaaagtccatctattatttcctctgaatcagatttcagacaagtgagaagaagtgaagcctcaaagaggtttgaatccagcagtggtctcccaggggtagatgaaaccttaagtcaaggccagtcacagagaccgagcagacaatatgaaacaccctttgaaggcaacttaattaatcaagagatcatgctaaaacggcaagaggaagaactgatgcagctacaagccaaaatggcccttagacagtctcggttgagcctatatccaggagacacaatcaaagcgtccatgcttgacatcaccagggatccgttaagagaaattgccctagaaacagccatgactcaaagaaaactgaggaatttctttggccctgagtttgtgaaaatgacaattgaaccatttatatctttggatttgccacggtctattcttactaagaaagggaagaatgaggataaccgaaggaaagtaaacataatgcttctgaacgggcaaagactggaactgacctgtgataccaaaactatatgtaaagatgtgtttgatatggttgtggcacatattggcttagtagagcatcatttgtttgctttagctaccctcaaagataatgaatatttctttgttgatcctgacttaaaattaaccaaagtggccccagagggatggaaagaagaaccaaagaaaaagaccaaagccactgttaattttactttgtttttcagaattaaattttttatggatgatgttagtctaatacaacatactctgacgtgtcatcagtattaccttcagcttcgaaaagatattttggaggaaaggatgcactgtgatgatgagacttccttattgctggcatccttggctctccaggctgagtatggagattatcaaccagaggttcatggtgtgtcttactttagaatggagcactatttgcccgccagagtgatggagaaacttgatttatcctatatcaaagaagagttacccaaattgcataatacctatgtgggagcttctgaaaaagagacagagttagaatttttaaaggtctgccaaagactgacagaatatggagttcattttcaccgagtgcaccctgagaagaagtcacaaacaggaatattgcttggagtctgttctaaaggtgtccttgtgtttgaagttcacaatggagtgcgcacattggtccttcgctttccatggagggaaaccaagaaaatatctttttctaaaaagaaaatcacattgcaaaatacatcagatggaataaaacatggcttccagacagacaacagtaagatatgccagtacctgctgcacctctgctcttaccagcataagttccagctacagatgagagcaagacagagcaaccaagatgcccaagatattgagagagcttcgtttaggagcctgaatctccaagcagagtctgttagaggatttaatatgggacgagcaatcagcactggcagtctggccagcagcaccctcaacaaacttgctgttcgacctttatcagttcaagctgagattctgaagaggctatcctgctcagagctgtcgctttaccagccattgcaaaacagttcaaaagagaagaatgacaaagcttcatgggaggaaaagcctagagagatgagtaaatcataccatgatctcagtcaggcctctctctatccacatcggaaaaatgtcattgttaacatggaacccccaccacaaaccgttgcagagttggtgggaaaaccttctcaccagatgtcaagatctgatgcagaatctttggcaggagtgacaaaacttaataattcaaagtctgttgcgagtttaaatagaagtcctgaaaggaggaaacatgaatcagactcctcatccattgaagaccctgggcaagcatatgttctaggaatgactatgcatagttctggaaactcttcatcccaagtacccttaaaagaaaatgatgtgctacacaaaagatggagcatagtatcttcaccagaaagggagatcaccttagtgaacctgaaaaaagatgcaaagtatggcttgggatttcaaattattggtggggagaagatgggaagactggacctaggcatatttatcagttcagttgcccctggaggaccagctgacttggatggatgcttgaagccaggagaccgtttgatatctgtgaatagtgtgagtctggagggagtcagccaccatgctgcaattgaaattttgcaaaatgcacctgaagatgtgacacttgttatctctcagccaaaagaaaagatatccaaagtgccttctactcctgtgcatctcaccaatgagatgaaaaactacatgaagaaatcttcctacatgcaagacagtgctatagattcttcttccaaggatcaccactggtcacgtggtaccctgaggcacatctcggagaactcctttgggccatctgggggcctgcgggaaggaagcctgagttctcaagattccaggactgagagtgccagcttgtctcaaagccaggtcaatggtttctttgccagccatttaggtgaccaaacctggcaggaatcacagcatggcagcccttccccatctgtaatatccaaagccaccgagaaagagactttcactgatagtaaccaaagcaaaactaaaaagccaggcatttctgatgtaactgattactcagaccgtggagattcagacatggatgaagccacttactccagcagtcaggatcatcaaacaccaaaacaggaatcttcctcttcagtgaatacatccaacaagatgaattttaaaactttttcttcatcacctcctaagcctggagatatctttgaggttgaactggctaaaaatgataacagcttggggataagtgtcacgggaggtgtgaatacgagtgtcagacatggtggcatttatgtgaaagctgttattccccagggagcagcagagtctgatggtagaattcacaaaggtgatcgcgtcctagctgtcaatggagttagtctagaaggagccacccataagcaagctgtggaaacactgagaaatacaggacaggtggttcatctgttattagaaaagggacaatctccaacatctaaagaacatgtcccggtaaccccacagtgtaccctttcagatcagaatgcccaaggtcaaggcccagaaaaagtgaagaaaacaactcaggtcaaagactacagctttgtcactgaagaaaatacatttgaggtaaaattatttaaaaatagctcaggtctaggattcagtttttctcgagaagataatcttataccggagcaaattaatgccagcatagtaagggttaaaaagctctttcctggacagccagcagcagaaagtggaaaaattgatgtaggagatgttatcttgaaagtgaatggagcctctttgaaaggactatctcagcaggaagtcatatctgctctcaggggaactgctccagaagtattcttgcttctctgcagacctccacctggtgtgctaccggaaattgatactgcgcttttgaccccacttcagtctccagcacaagtacttccaaacagcagtaaagactcttctcagccatcatgtgtggagcaaagcaccagctcagatgaaaatgaaatgtcagacaaaagcaaaaaacagtgcaagtccccatccagaagagacagttacagtgacagcagtgggagtggagaagatgacttagtgacagctccagcaaacatatcaaattcgacctggagttcagctttgcatcagactctaagcaacatggtatcacaggcacagagtcatcatgaagcacccaagagtcaagaagataccatttgtaccatgttttactatcctcagaaaattcccaataaaccagagtttgaggacagtaatccttcccctctaccaccggatatggctcctgggcagagttatcaaccccaatcagaatctgcttcctctagttcgatggataagtatcatatacatcacatttctgaaccaactagacaagaaaactggacacctttgaaaaatgacttggaaaatcaccttgaagactttgaactggaagtagaactcctcattaccctaattaaatcagaaaaaggaagcctgggttttacagtaaccaaaggcaatcagagaattggttgttatgttcatgatgtcatacaggatccagccaaaagtgatggaaggctaaaacctggggaccggctcataaaggttaatgatacagatgttactaatatgactcatacagatgcagttaatctgctccgggctgcatccaaaacagtcagattagttattggacgagttctagaattacccagaataccaatgttgcctcatttgctaccggacataacactaacgtgcaacaaagaggagttgggtttttccttatgtggaggtcatgacagcctttatcaagtggtatatattagtgatattaatccaaggtccgtcgcagccattgagggtaatctccagctattagatgtcatccattatgtgaacggagtcagcacacaaggaatgaccttggaggaagttaacagagcattagacatgtcacttccttcattggtattgaaagcaacaagaaatgatcttccagtggtccccagctcaaagaggtctgctgtttcagctccaaagtcaaccaaaggcaatggttcctacagtgtggggtcttgcagccagcctgccctcactcctaatgattcattctccacggttgctggggaagaaataaatgaaatatcgtaccccaaaggaaaatgttctacttatcagataaagggatcaccaaacttgactctgcccaaagaatcttatatacaagaagatgacatttatgatgattcccaagaagctgaagttatccagtctctgctggatgttgtggatgaggaagcccagaatcttttaaacgaaaataatgcagcaggatactcctgtggtccaggtacattaaagatgaatgggaagttatcagaagagagaacagaagatacagactgcgatggttcacctttacctgagtattttactgaggccaccaaaatgaatggctgtgaagaatattgtgaagaaaaagtaaaaagtgaaagcttaattcagaagccacaagaaaagaagactgatgatgatgaaataacatggggaaatgatgagttgccaatagagagaacaaaccatgaagattctgataaagatcattcctttctgacaaacgatgagctcgctgtactccctgtcgtcaaagtgcttccctctggtaaatacacgggtgccaacttaaaatcagtcattcgagtcctgcggggtttgctagatcaaggaattccttctaaggagctggagaatcttcaagaattaaaacctttggatcagtgtctaattgggcaaactaaggaaaacagaaggaagaacagatataaaaatatacttccctatgatgctacaagagtgcctcttggagatgaaggtggctatatcaatgccagcttcattaagataccagttgggaaagaagagttcgtttacattgcctgccaaggaccactgcctacaactgttggagacttctggcagatgatttgggagcaaaaatccacagtgatagccatgatgactcaagaagtagaaggagaaaaaatcaaatgccagcgctattggcccaacatcctaggcaaaacaacaatggtcagcaacagacttcgactggctcttgtgagaatgcagcagctgaagggctttgtggtgagggcaatgacccttgaagatattcagaccagagaggtgcgccatatttctcatctgaatttcactgcctggccagaccatgatacaccttctcaaccagatgatctgcttacttttatctcctacatgagacacatccacagatcaggcccaatcattacgcactgcagtgctggcattggacgttcagggaccctgatttgcatagatgtggttctgggattaatcagtcaggatcttgattttgacatctctgatttggtgcgctgcatgagactacaaagacacggaatggttcagacagaggatcaatatattttctgctatcaagtcatcctttatgtcctgacacgtcttcaagcagaagaagagcaaaaacagcagcctcagcttctgaagtgacatgaaaagagcctctggatgcatttccatttctctccttaacctccagcagactcctgctctctatccaaaataaagatcacagagcagcaagttcatacaacatgcatgttctcctctatcttagaggggtattcttcttgaaaataaaaaatattgaaatgctgtatttttacagctactttaacctatgataattatttacaaaattttaacactaaccaaacaatgcagatcttagggatgattaaaggcagcatttgatgatagcagacattgttacaaggacatggtgagtctatttttaatgcaccaatcttgtttatagcaaaaatgttttccaatattttaataaagtagttattttataggggatacttgaaaccagtatttaagctttaaatgacagtaatattggcatagaaaaaagtagcaaatgtttactgtatcaatttctaatgtttactatatagaatttcctgtaatatatttatatactttttcatgaaaatggagttatcagttatctgtttgttactgcatcatctgtttgtaatcattatctcactttgtaaataaaaacacaccttaaaacatgaa

SEQ ID NO: 441153 - DNA, 677 bp, Homo sapiens
  misc_feature (616)..(616): n is a, c, g, or t
  misc_feature (620)..(620): n is a, c, g, or t
  misc_feature (643)..(643): n is a, c, g, or t
aatgtccgttcatgtatacttgcttttattagataagagacgatgaactatgaaaagttatgcaaacatagtatctctttcctcttccactatgaccatcatcaccatcccatttcacctctgatcttccatttggagcatttaggaaattgccaccactttcattgtcaatagtggattacatttccatttattttctaaaaattgtgtgcatacatgatagattcttatcattccaggaagaagctctacttctgatgtactagacatacaaaagcctccactctctcatcagacctttcttaacaaagggcttagtaaatctatgggatttctgtccatcaaagatacacaagatgagaattatttcaaggacattttatcagataattctggacgtgaagattctgaaaatacattctccccttaccagttcaaaactagtggcccagaaaaaaaacccatccctggcattgatgtgctttctaagaagaagatctgggcttcatccatggacttgctttgtacagctgacagagacttctcttcaggagagactgccacatatcgtcgttgtcaccctgaggcagtaacagtgcggacagatctggaatcnatcnctcggaaaccccccttccaaaanacagattccgggcggggccagggcggccccgccg

SEQ ID NO: 441154 - DNA, 8102 bp, Homo sapiens
aaggcgcacgatggcgcgtccctgcagccctcgcccggcgctccagtagcaggacccggtctcgggaccagccggtaatatgcacgtgtcactagctgaggccctggaggttcggggtggaccacttcaggaggaagaaatatgggctgtattaaatcaaagtgctgaaagtctccaagaattattcagaaaagtaagcctagctgatcctgctgcccttggcttcatcatttctccatggtctctgctgttgctgccatctggtagtgtgtcatttacagatgaaaatatttccaatcaggatcttcgagcattcactgcaccagaggttcttcaaaatcagtcactaacttctctctcagatgttgaaaagatccacatttattctcttggaatgacactgtattggggggctgattatgaagtgcctcagagccaacctattaagcttggagatcatctcaacagcatactgcttggaatgtgtgaggatgttatttacgctcgagtttctgttcggactgtgctggatgcttgcagtgcccacattaggaatagcaattgtgcaccctcattttcctacgtgaaacacttggtaaaactggttctgggaaatctttctgggacagatcagctttcctgtaacagtgaacaaaagcctgatcgaagccaggctattcgagatcgattgcgaggaaaaggattaccaacaggaagaagctctacttctgatgtactagacatacaaaagcctccactctctcatcagacctttcttaacaaagggcttagtaaatctatgggatttctgtccatcaaagatacacaagatgagaattatttcaaggacattttatcagataattctggacgtgaagattctgaaaatacattctccccttaccagttcaaaactagtggcccagaaaaaaaacccatccctggcattgatgtgctttctaagaagaagatctgggcttcatccatggacttgctttgtacagctgacagagacttctcttcaggagagactgccacatatcgtcgttgtcaccctgaggcagtaacagtgcggacttcaactactcctagaaaaaaggaggcaagatactcagatggaagtatagccttggatatctttggccctcagaaaatggatccaatatatcacactcgagaattgcccacctcctcagcaatatcaagtgctttggaccgaatccgagagagacaaaagaaacttcaggttctgagggaagccatgaatgtagaagaaccagttcgaagatacaaaacttatcatggtgatgtctttagtacctccagtgaaagtccatctattatttcctctgaatcagatttcagacaagtgagaagaagtgaagcctcaaagaggtttgaatccagcagtggtctcccaggggtagatgaaaccttaagtcaaggccagtcacagagaccgagcagacaatatgaaacaccctttgaaggcaacttaattaatcaagagatcatgctaaaacggcaagaggaagaactgatgcagctacaagccaaaatggcccttagacagtctcggttgagcctatatccaggagacacaatcaaagcgtccatgcttgacatcaccagggatccgttaagagaaattgccctagaaacagccatgactcaaagaaaactgaggaatttctttggccctgagtttgtgaaaatgacaattgaaccatttatatctttggatttgccacggtctattcttactaagaaagggaagaatgaggataaccgaaggaaagtaaacataatgcttctgaacgggcaaagactggaactgacctgtgataccaaaactatatgtaaagatgtgtttgatatggttgtggcacatattggcttagtagagcatcatttgtttgctttagctaccctcaaagataatgaatatttctttgttgatcctgacttaaaattaaccaaagtggccccagagggatggaaagaagaaccaaagaaaaagaccaaagccactgttaattttactttgtttttcagaattaaattttttatggatgatgttagtctaatacaacatactctgacgtgtcatcagtattaccttcagcttcgaaaagatattttggaggaaaggatgcactgtgatgatgagacttccttattgctggcatccttggctctccaggctgagtatggagattatcaaccagaggttcatggtgtgtcttactttagaatggagcactatttgcccgccagagtgatggagaaacttgatttatcctatatcaaagaagagttacccaaattgcataatacctatgtgggagcttctgaaaaagagacagagttagaatttttaaaggtctgccaaagactgacagaatatggagttcattttcaccgagtgcaccctgagaagaagtcacaaacaggaatattgcttggagtctgttctaaaggtgtccttgtgtttgaagttcacaatggagtgcgcacattggtccttcgctttccatggagggaaaccaagaaaatatctttttctaaaaagaaaatcacattgcaaaatacatcagatggaataaaacatggcttccagacagacaacagtaagatatgccagtacctgctgcacctctgctcttaccagcataagttccagctacagatgagagcaagacagagcaaccaagatgcccaagatattgagagagcttcgtttaggagcctgaatctccaagcagagtctgttagaggatttaatatgggacgagcaatcagcactggcagtctggccagcagcaccctcaacaaacttgctgttcgacctttatcagttcaagctgagattctgaagaggctatcctgctcagagctgtcgctttaccagccattgcaaaacagttcaaaagagaagaatgacaaagcttcatgggaggaaaagcctagagagatgagtaaatcataccatgatctcagtcaggcctctctctatccacatcggaaaaatgtcattgttaacatggaacccccaccacaaaccgttgcagagttggtgggaaaaccttctcaccagatgtcaagatctgatgcagaatctttggcaggagtgacaaaacttaataattcaaagtctgttgcgagtttaaatagaagtcctgaaaggaggaaacatgaatcagactcctcatccattgaagaccctgggcaagcatatgttctagatgtgctacacaaaagatggagcatagtatcttcaccagaaagggagatcaccttagtgaacctgaaaaaagatgcaaagtatggcttgggatttcaaattattggtggggagaagatgggaagactggacctaggcatatttatcagttcagttgcccctggaggaccagctgacttggatggatgcttgaagccaggagaccgtttgatatctgtgaatagtgtgagtctggagggagtcagccaccatgctgcaattgaaattttgcaaaatgcacctgaagatgtgacacttgttatctctcagccaaaagaaaagatatccaaagtgccttctactcctgtgcatctcaccaatgagatgaaaaactacatgaagaaatcttcctacatgcaagacagtgctatagattcttcttccaaggatcaccactggtcacgtggtaccctgaggcacatctcggagaactcctttgggccatctgggggcctgcgggaaggaagcctgagttctcaagattccaggactgagagtgccagcttgtctcaaagccaggtcaatggtttctttgccagccatttaggtgaccaaacctggcaggaatcacagcatggcagcccttccccatctgtaatatccaaagccaccgagaaagagactttcactgatagtaaccaaagcaaaactaaaaagccaggcatttctgatgtaactgattactcagaccgtggagattcagacatggatgaagccacttactccagcagtcaggatcatcaaacaccaaaacaggaatcttcctcttcagtgaatacatccaacaagatgaattttaaaactttttcttcatcacctcctaagcctggagatatctttgaggttgaactggctaaaaatgataacagcttggggataagtgtcacgggaggtgtgaatacgagtgtcagacatggtggcatttatgtgaaagctgttattccccagggagcagcagagtctgatggtagaattcacaaaggtgatcgcgtcctagctgtcaatggagttagtctagaaggagccacccataagcaagctgtggaaacactgagaaatacaggacaggtggttcatctgttattagaaaagggacaatctccaacatctaaagaacatgtcccggtaaccccacagtgtaccctttcagatcagaatgcccaaggtcaaggcccagaaaaagtgaagaaaacaactcaggtcaaagactacagctttgtcactgaagaaaatacatttgaggtaaaattatttaaaaatagctcaggtctaggattcagtttttctcgagaagataatcttataccggagcaaattaatgccagcatagtaagggttaaaaagctctttcctggacagccagcagcagaaagtggaaaaattgatgtaggagatgttatcttgaaagtgaatggagcctctttgaaaggactatctcagcaggaagtcatatctgctctcaggggaactgctccagaagtattcttgcttctctgcagacctccacctggtgtgctaccggaaattgatactgcgcttttgaccccacttcagtctccagcacaagtacttccaaacagcagtaaagactcttctcagccatcatgtgtggagcaaagcaccagctcagatgaaaatgaaatgtcagacaaaagcaaaaaacagtgcaagtccccatccagaagagacagttacagtgacagcagtgggagtggagaagatgacttagtgacagctccagcaaacatatcaaattcgacctggagttcagctttgcatcagactctaagcaacatggtatcacaggcacagagtcatcatgaagcacccaagagtcaagaagataccatttgtaccatgttttactatcctcagaaaattcccaataaaccagagtttgaggacagtaatccttcccctctaccaccggatatggctcctgggcagagttatcaaccccaatcagaatctgcttcctctagttcgatggataagtatcatatacatcacatttctgaaccaactagacaagaaaactggacacctttgaaaaatgacttggaaaatcaccttgaagactttgaactggaagtagaactcctcattaccctaattaaatcagaaaaaggaagcctgggttttacagtaaccaaaggcaatcagagaattggttgttatgttcatgatgtcatacaggatccagccaaaagtgatggaaggctaaaacctggggaccggctcataaaggttaatgatacagatgttactaatatgactcatacagatgcagttaatctgctccgggctgcatccaaaacagtcagattagttattggacgagttctagaattacccagaataccaatgttgcctcatttgctaccggacataacactaacgtgcaacaaagaggagttgggtttttccttatgtggaggtcatgacagcctttatcaagtggtatatattagtgatattaatccaaggtccgtcgcagccattgagggtaatctccagctattagatgtcatccattatgtgaacggagtcagcacacaaggaatgaccttggaggaagttaacagagcattagacatgtcacttccttcattggtattgaaagcaacaagaaatgatcttccagtggtccccagctcaaagaggtctgctgtttcagctccaaagtcaaccaaaggcaatggttcctacagtgtggggtcttgcagccagcctgccctcactcctaatgattcattctccacggttgctggggaagaaataaatgaaatatcgtaccccaaaggaaaatgttctacttatcagataaagggatcaccaaacttgactctgcccaaagaatcttatatacaagaagatgacatttatgatgattcccaagaagctgaagttatccagtctctgctggatgttgtggatgaggaagcccagaatcttttaaacgaaaataatgcagcaggatactcctgtggtccaggtacattaaagatgaatgggaagttatcagaagagagaacagaagatacagactgcgatggttcacctttacctgagtattttactgaggccaccaaaatgaatggctgtgaagaatattgtgaagaaaaagtaaaaagtgaaagcttaattcagaagccacaagaaaagaagactgatgatgatgaaataacatggggaaatgatgagttgccaatagagagaacaaaccatgaagattctgataaagatcattcctttctgacaaacgatgagctcgctgtactccctgtcgtcaaagtgcttccctctggtaaatacacgggtgccaacttaaaatcagtcattcgagtcctgcggggtttgctagatcaaggaattccttctaaggagctggagaatcttcaagaattaaaacctttggatcagtgtctaattgggcaaactaaggaaaacagaaggaagaacagatataaaaatatacttccctatgatgctacaagagtgcctcttggagatgaaggtggctatatcaatgccagcttcattaagataccagttgggaaagaagagttcgtttacattgcctgccaaggaccactgcctacaactgttggagacttctggcagatgatttgggagcaaaaatccacagtgatagccatgatgactcaagaagtagaaggagaaaaaatcaaatgccagcgctattggcccaacatcctaggcaaaacaacaatggtcagcaacagacttcgactggctcttgtgagaatgcagcagctgaagggctttgtggtgagggcaatgacccttgaagatattcagaccagagaggtgcgccatatttctcatctgaatttcactgcctggccagaccatgatacaccttctcaaccagatgatctgcttacttttatctcctacatgagacacatccacagatcaggcccaatcattacgcactgcagtgctggcattggacgttcagggaccctgatttgcatagatgtggttctgggattaatcagtcaggatcttgattttgacatctctgatttggtgcgctgcatgagactacaaagacacggaatggttcagacagaggatcaatatattttctgctatcaagtcatcctttatgtcctgacacgtcttcaagcagaagaagagcaaaaacagcagcctcagcttctgaagtgacatgaaaagagcctctggatgcatttccatttctctccttaacctccagcagactcctgctctctatccaaaataaagatcacagagcagcaagttcatacaacatgcatgttctcctctatcttagaggggtattcttcttgaaaataaaaaatattgaaatgctgtatttttacagctactttaacctatgataattatttacaaaattttaacactaaccaaacaatgcagatcttagggatgattaaaggcagcatttgatgatagcagacattgttacaaggacatggtgagtctatttttaatgcaccaatcttgtttatagcaaaaatgttttccaatattttaataaagtagttattttataggggatacttgaaaccagtatttaagctttaaatgacagtaatattggcatagaaaaaagtagcaaatgtttactgtatcaatttctaatgtttactatatagaatttcctgtaatatatttatatactttttcatgaaaatggagttatcagttatctgtttgttactgcatcatctgtttgtaatcattatctcactttgtaaataaaaacacaccttaaaacatgaacaagccaaaactgtgtgcagac

SEQ ID NO: 441155 - DNA, 7391 bp, Homo sapiens
aatgtccgttcatgtatacttgcttttattagataagagacgatgaactatgaaaagttatgcaaacatagtatctctttcctcttccactatgaccatcatcaccatcccatttcacctctgatcttccatttggagcatttaggaaattgccaccactttcattgtcaatagtggattacatttccatttattttctaaaaattgtgtgcatacatgatagattcttatcattccaggaagaagctctacttctgatgtactagacatacaaaagcctccactctctcatcagacctttcttaacaaagggcttagtaaatctatgggatttctgtccatcaaagatacacaagatgagaattatttcaaggacattttatcagataattctggacgtgaagattctgaaaatacattctccccttaccagttcaaaactagtggcccagaaaaaaaacccatccctggcattgatgtgctttctaagaagaagatctgggcttcatccatggacttgctttgtacagctgacagagacttctcttcaggagagactgccacatatcgtcgttgtcaccctgaggcagtaacagtgcggacttcaactactcctagaaaaaaggaggcaagatactcagatggaagtatagccttggatatctttggccctcagaaaatggatccaatatatcacactcgagaattgcccacctcctcagcaatatcaagtgctttggaccgaatccgagagagacaaaagaaacttcaggttctgagggaagccatgaatgtagaagaaccagttcgaagatacaaaacttatcatggtgatgtctttagtacctccagtgaaagtccatctattatttcctctgaatcagatttcagacaagtgagaagaagtgaagcctcaaagaggtttgaatccagcagtggtctcccaggggtagatgaaaccttaagtcaaggccagtcacagagaccgagcagacaatatgaaacaccctttgaaggcaacttaattaatcaagagatcatgctaaaacggcaagaggaagaactgatgcagctacaagccaaaatggcccttagacagtctcggttgagcctatatccaggagacacaatcaaagcgtccatgcttgacatcaccagggatccgttaagagaaattgccctagaaacagccatgactcaaagaaaactgaggaatttctttggccctgagtttgtgaaaatgacaattgaaccatttatatctttggatttgccacggtctattcttactaagaaagggaagaatgaggataaccgaaggaaagtaaacataatgcttctgaacgggcaaagactggaactgacctgtgataccaaaactatatgtaaagatgtgtttgatatggttgtggcacatattggcttagtagagcatcatttgtttgctttagctaccctcaaagataatgaatatttctttgttgatcctgacttaaaattaaccaaagtggccccagagggatggaaagaagaaccaaagaaaaagaccaaagccactgttaattttactttgtttttcagaattaaattttttatggatgatgttagtctaatacaacatactctgacgtgtcatcagtattaccttcagcttcgaaaagatattttggaggaaaggatgcactgtgatgatgagacttccttattgctggcatccttggctctccaggctgagtatggagattatcaaccagaggttcatggtgtgtcttactttagaatggagcactatttgcccgccagagtgatggagaaacttgatttatcctatatcaaagaagagttacccaaattgcataatacctatgtgggagcttctgaaaaagagacagagttagaatttttaaaggtctgccaaagactgacagaatatggagttcattttcaccgagtgcaccctgagaagaagtcacaaacaggaatattgcttggagtctgttctaaaggtgtccttgtgtttgaagttcacaatggagtgcgcacattggtccttcgctttccatggagggaaaccaagaaaatatctttttctaaaaagaaaatcacattgcaaaatacatcagatggaataaaacatggcttccagacagacaacagtaagatatgccagtacctgctgcacctctgctcttaccagcataagttccagctacagatgagagcaagacagagcaaccaagatgcccaagatattgagagagcttcgtttaggagcctgaatctccaagcagagtctgttagaggatttaatatgggacgagcaatcagcactggcagtctggccagcagcaccctcaacaaacttgctgttcgacctttatcagttcaagctgagattctgaagaggctatcctgctcagagctgtcgctttaccagccattgcaaaacagttcaaaagagaagaatgacaaagcttcatgggaggaaaagcctagagagatgagtaaatcataccatgatctcagtcaggcctctctctatccacatcggaaaaatgtcattgttaacatggaacccccaccacaaaccgttgcagagttggtgggaaaaccttctcaccagatgtcaagatctgatgcagaatctttggcaggagtgacaaaacttaataattcaaagtctgttgcgagtttaaatagaagtcctgaaaggaggaaacatgaatcagactcctcatccattgaagaccctgggcaagcatatgttctagatgtgctacacaaaagatggagcatagtatcttcaccagaaagggagatcaccttagtgaacctgaaaaaagatgcaaagtatggcttgggatttcaaattattggtggggagaagatgggaagactggacctaggcatatttatcagttcagttgcccctggaggaccagctgacttggatggatgcttgaagccaggagaccgtttgatatctgtgaatagtgtgagtctggagggagtcagccaccatgctgcaattgaaattttgcaaaatgcacctgaagatgtgacacttgttatctctcagccaaaagaaaagatatccaaagtgccttctactcctgtgcatctcaccaatgagatgaaaaactacatgaagaaatcttcctacatgcaagacagtgctatagattcttcttccaaggatcaccactggtcacgtggtaccctgaggcacatctcggagaactcctttgggccatctgggggcctgcgggaaggaagcctgagttctcaagattccaggactgagagtgccagcttgtctcaaagccaggtcaatggtttctttgccagccatttaggtgaccaaacctggcaggaatcacagcatggcagcccttccccatctgtaatatccaaagccaccgagaaagagactttcactgatagtaaccaaagcaaaactaaaaagccaggcatttctgatgtaactgattactcagaccgtggagattcagacatggatgaagccacttactccagcagtcaggatcatcaaacaccaaaacaggaatcttcctcttcagtgaatacatccaacaagatgaattttaaaactttttcttcatcacctcctaagcctggagatatctttgaggttgaactggctaaaaatgataacagcttggggataagtgtcacgggaggtgtgaatacgagtgtcagacatggtggcatttatgtgaaagctgttattccccagggagcagcagagtctgatggtagaattcacaaaggtgatcgcgtcctagctgtcaatggagttagtctagaaggagccacccataagcaagctgtggaaacactgagaaatacaggacaggtggttcatctgttattagaaaagggacaatctccaacatctaaagaacatgtcccggtaaccccacagtgtaccctttcagatcagaatgcccaaggtcaaggcccagaaaaagtgaagaaaacaactcaggtcaaagactacagctttgtcactgaaggaagtcatatctgctctcaggggaactgctccagaagtattcttgcttctctgcagacctccacctggtgtgctaccggaaattgatactgcgcttttgaccccacttcagtctccagcacaagtacttccaaacagcagtaaagactcttctcagccatcatgtgtggagcaaagcaccagctcagatgaaaatgaaatgtcagacaaaagcaaaaaacagtgcaagtccccatccagaagagacagttacagtgacagcagtgggagtggagaagatgacttagtgacagctccagcaaacatatcaaattcgacctggagttcagctttgcatcagactctaagcaacatggtatcacaggcacagagtcatcatgaagcacccaagagtcaagaagataccatttgtaccatgttttactatcctcagaaaattcccaataaaccagagtttgaggacagtaatccttcccctctaccaccggatatggctcctgggcagagttatcaaccccaatcagaatctgcttcctctagttcgatggataagtatcatatacatcacatttctgaaccaactagacaagaaaactggacacctttgaaaaatgacttggaaaatcaccttgaagactttgaactggaagtagaactcctcattaccctaattaaatcagaaaaaggaagcctgggttttacagtaaccaaaggcaatcagagaattggttgttatgttcatgatgtcatacaggatccagccaaaagtgatggaaggctaaaacctggggaccggctcataaaggttaatgatacagatgttactaatatgactcatacagatgcagttaatctgctccgggctgcatccaaaacagtcagattagttattggacgagttctagaattacccagaataccaatgttgcctcatttgctaccggacataacactaacgtgcaacaaagaggagttgggtttttccttatgtggaggtcatgacagcctttatcaagtggtatatattagtgatattaatccaaggtccgtcgcagccattgagggtaatctccagctattagatgtcatccattatgtgaacggagtcagcacacaaggaatgaccttggaggaagttaacagagcattagacatgtcacttccttcattggtattgaaagcaacaagaaatgatcttccagtggtccccagctcaaagaggtctgctgtttcagctccaaagtcaaccaaaggcaatggttcctacagtgtggggtcttgcagccagcctgccctcactcctaatgattcattctccacggttgctggggaagaaataaatgaaatatcgtaccccaaaggaaaatgttctacttatcagataaagggatcaccaaacttgactctgcccaaagaatcttatatacaagaagatgacatttatgatgattcccaagaagctgaagttatccagtctctgctggatgttgtggatgaggaagcccagaatcttttaaacgaaaataatgcagcaggatactcctgtggtccaggtacattaaagatgaatgggaagttatcagaagagagaacagaagatacagactgcgatggttcacctttacctgagtattttactgaggccaccaaaatgaatggctgtgaagaatattgtgaagaaaaagtaaaaagtgaaagcttaattcagaagccacaagaaaagaagactgatgatgatgaaataacatggggaaatgatgagttgccaatagagagaacaaaccatgaagattctgataaagatcattcctttctgacaaacgatgagctcgctgtactccctgtcgtcaaagtgcttccctctggtaaatacacgggtgccaacttaaaatcagtcattcgagtcctgcggggtttgctagatcaaggaattccttctaaggagctggagaatcttcaagaattaaaacctttggatcagtgtctaattgggcaaactaaggaaaacagaaggaagaacagatataaaaatatacttccctatgatgctacaagagtgcctcttggagatgaaggtggctatatcaatgccagcttcattaagataccagttgggaaagaagagttcgtttacattgcctgccaaggaccactgcctacaactgttggagacttctggcagatgatttgggagcaaaaatccacagtgatagccatgatgactcaagaagtagaaggagaaaaaatcaaatgccagcgctattggcccaacatcctaggcaaaacaacaatggtcagcaacagacttcgactggctcttgtgagaatgcagcagctgaagggctttgtggtgagggcaatgacccttgaagatattcagaccagagaggtgcgccatatttctcatctgaatttcactgcctggccagaccatgatacaccttctcaaccagatgatctgcttacttttatctcctacatgagacacatccacagatcaggcccaatcattacgcactgcagtgctggcattggacgttcagggaccctgatttgcatagatgtggttctgggattaatcagtcaggatcttgattttgacatctctgatttggtgcgctgcatgagactacaaagacacggaatggttcagacagaggatcaatatattttctgctatcaagtcatcctttatgtcctgacacgtcttcaagcagaagaagagcaaaaacagcagcctcagcttctgaagtgacatgaaaagagcctctggatgcatttccatttctctccttaacctccagcagactcctgctctctatccaaaataaagatcacagagcagcaagttcatacaacatgcatgttctcctctatcttagaggggtattcttcttgaaaataaaaaatattgaaatgctgtatttttacagctactttaacctatgataattatttacaaaattttaacactaaccaaacaatgcagatcttagggatgattaaaggcagcatttgatgatagcagacattgttacaaggacatggtgagtctatttttaatgcaccaatcttgtttatagcaaaaatgttttccaatattttaataaagtagttattttataggggatacttgaaaccagtatttaagctttaaatgacagtaatattggcatagaaaaaagtagcaaatgtttactgtatcaatttctaatgtttactatatagaatttcctgtaatatatttatatactttttcatgaaaatggagttatcagttatctgtttgttactgcatcatctgtttgtaatcattatctcactttgtaaataaaaacacaccttaaaacatgaa

SEQ ID NO: 441156 - DNA, 665 bp, Homo sapiens
aatgtccgttcatgtatacttgcttttattagataagagacgatgaactatgaaaagttatgcaaacatagtatctctttcctcttccactatgaccatcatcaccatcccatttcacctctgatcttccatttggagcatttaggaaattgccaccactttcattgtcaatagtggattacatttccatttattttctaaaaattgtgtgcatacatgatagattcttatcattccaggaagaagctctacttctgatgtactagacatacaaaagcctccactctctcatcagacctttcttaacaaagggcttagtaaatctatgggatttctgtccatcaaagatacacaagatgagaattatttcaaggacattttatcagataattctggacgtgaagattctgaaaatacattctccccttaccagttcaaaactagtggcccagaaaaaaaacccatccctggcattgatgtgctttctaagaagaagatctgggcttcatccatggacttgctttgtacagctgacagagacttctcttcaggagagactgccacatatcgtcgttgtcaccctgaggcagtaacagtgcggacgtgttaccctcaaggtctgtcgtgtgtgggtaagatgaaagaagaaaaatatgagatgtata

SEQ ID NO: 441157 - DNA, 374 bp, Homo sapiens
cttgctttgtacagctgacagagacttctcttcaggagagactgccacatatcgtcgttgtcaccctgaggcagtaacagtgcggacttcaactactcctagaaaaaaggaggcaagatactcagatggaagtatagccttggatatctttggccctcagaaaatggatccaatatatcacactcgagaattgcccacctcctcagcaatatcaagtgctttggaccgaatccgagagagacaaaagaaacttcaggttctgagggaagccatgaatgtagaaggttagtaattctgtgcatgtttgagaaagaattgaagtattttaaatatttttttgaaataaagaagggttattaaattattccacaagt

SEQ ID NO: 441158 - DNA, 3146 bp, Homo sapiens
  misc_feature (2)..(3): n is a, c, g, or t
cnnacgcgtggggtgggagaccggagcgggagacagcggtgacaggagcagcggccgggagcccttagggaggcagacagagcctgcagccaatgccccaggagccctcggttccaaccaactgatgcccctgtgcccactggcccacgccatgcagccccagtccgttctgcacagcggctacttccacccactacttcgggcctggcagacagccaccaccaccctcaatgcctccaacctcatctaccccatctttgtcacggatgttcctgatgacatacagcctatcaccagcctcccaggagtggccaggtatggtgtgaagcggctggaagagatgctgaggcccttggtggaagagggcctacgctgtgtcttgatctttggcgtccccagcagagttcccaaggacgagcggggttccgcagctgactccgaggagtccccagctattgaggcaatccatctgttgaggaagaccttccccaacctcctggtggcctgtgatgtctgcctgtgtccctacacctcccatggtcactgcgggctcctgagtgaaaacggagcattccgggctgaggagagccgccagcggctggctgaggtggcattggcgtatgccaaggcaggatgtcaggtggtagccccgtcggacatgatggatggacgcgtggaagccatcaaagaggccctgatggcacatggacttggcaacagggtatcggtgatgagctacagtgccaaatttgcttcctgtttctatggccctttccgggatgcagctaagtcaagcccagcttttggggaccgccgctgctaccagctgccccctggagcacgaggcctggctctccgagctgtggaccgggatgtacgggaaggagctgacatgctcatggtgaagccgggaatgccctacctggacatcgtgcgggaggtaaaggacaagcaccctgacctccctctcgccgtgtaccacgtctctggagagtttgccatgctgtggcatggagcccaggccggggcatttgatctcaaggctgccgtactggaggccatgactgccttccgcagagcaggtgctgacatcatcatcacctactacacaccgcagctgctgcagtggctgaaggaggaatgatggagacagtgccaggcccaagaactagaactttaaaacgttcccggggcctcagacaagtgaaaaccaaagtaaatgctgcttttagaactgtgccctcatgccctcttcctgctcacatgctagcggggcccagcagccctgggtggttttgccagcatgctaactcttgtaactcgcagctgcatcctatgagctctcccaagcttccccgcccctcccctgggtcagccgtgaggcccacctttgccaccctcagctctttcctctggtgtggcttcagcttgaaagcaacctggagtcgggggcacagcctttggggcctggctgggagagggtcttggagcattaggggaagaagagagcagtgggatcttggggcctgagaagccttggaacgcttctggcagcagagctgggtgtgggaatgaggcctagatcgatatccctgggttagagttgaaatttgccgcaattccactggaaggcatttcccacgaggccagaggttgccaggctgcctgaggtctcctattctactctgaaccataaacccagagaagaattactcattaaccagcataaatactgcctgaggatcaaaactcagaggcaaagagggagttcctgactgctagaggtgccaccaccacaaacactttttattcaggagatactttttgagaatctctgctctgttcctaggttcagtgctgggtcctgggaatacagcaggacagacctcagcttatctcttcatagaaattatacaaagagaattggggagacagctaagaagaaaacaaagaaataaagcagttacaaattgtgataagtgctttgaaggaaagaaggggtctgagacaacaacagggaaggggcctctcttgaaacagtagttgggaaggaggcagacatgcaccagtgatgtggtgacaggtgctctgaaggaggtcaccaggacctgacctctttgaaggatcagaaaatacttccctgaaggactgacatttgagcctagacctgaagggtgagccatcaagctaagacaattggggaagagcattccagggagagggaggagttgtgcaaaggccctggggctccttctagctggaggaatgcaaggctagcttgtctggagcactgagaggatggcctgaactgagtggagagagacagaccaggaccaaaccatgcagaggtcaagggccacattcaccttttcagagtgactcaatcaaatttgtagtttgtaaaagtattttaacagctctgcggcaaagtgcaaatgaaaagtcttgatggcatggactggagcggggacagtggggatggagaaaggggaatggattgtggatgtgtttagaaggtagattcgatgtgaaggatgaatctggcttgaccttctgggtggctgatgggccatttactgagatggggcagcctggaagaggaacagaagcagggtcggggtggagggagaatactaaacttagcttgagacattttgcaataaggaagctatatctagagtgcttatgtgactcacctaaggccactcaacaagtttgtggcagaactggattagaactgcacagaaaacagccaagctgggatttgaacccatgtagtccaactccaaggcctctgcccctaaccactgtgccataccacctcccaataatcaacagcaaaattataggtctaacaatgttttatagacacccctccatttatgtgatgggtttgcatcctgataaacccatcataagttgaaaatatgatcataagttgaaaatatgatcataagtcaaaaatgtatttaatatacctaacctaccaaacatcatagcttagcctagcctgccttaaacatgctcagaacacttacattagcctacagtgggcaaaactatccaacacaaaatctatattgtaataaagttataaagaattttgaataaaaattcaatatttgaaaaaaaatttctactgaatg

SEQ ID NO: 441159 - DNA, 3092 bp, Homo sapiens
  misc_feature (2)..(3): n is a, c, g, or t
cnnacgcgtggggtgggagaccggagcgggagacagcggtgacaggagcagcggccgggagcccttagggaggcagacagagcctgcagccaatgccccaggagccctcggttccaaccaactgatgcccctgtgcccactggcccacgccatgcagccccagtccgttctgcacagcggctacttccacccactacttcgggcctggcagacagccaccaccaccctcaatgcctccaacctcatctaccccatctttgtcacggatgttcctgatgacatacagcctatcaccagcctcccaggagtggccaggtatggtgtgaagcggctggaagagatgctgaggcccttggtggaagagggcctacgctgtgtcttgatctttggcgtccccagcagagttcccaaggacgagcggggttccgcagctgactccgaggagtccccagctattgaggcaatccatctgttgaggaagaccttccccaacctcctggtggcctgtgatgtctgcctgtgtccctacacctcccatggtcactgcgggctcctgagtgaaaacggagcattccgggctgaggagagccgccagcggctggctgaggtggcattggcgtatgccaaggcaggatgtcaggtggtagccccgtcggacatgatggatggacgcgtggaagccatcaaagaggccctgatggcacatggacttggcaacagggtatcggtgatgagctacagtgccaaatttgcttcctgtttctatggccctttccgggatgcagctaagtcaagcccagcttttggggaccgccgctgctaccagctgccccctggagcacgaggcctggctctccgagctgtggaccgggatgtacgggaaggagctgacatgctcatggtgaagccgggaatgccctacctggacatcgtgcgggaggtaaaggacaagcaccctgacctccctctcgccgtgtaccacgtctctggagagtttgccatgctgtggcatggagcccaggccggggcatttgatctcaaggctgccgtactggaggccatgactgccttccgcagagcaggtgctgacatcatcatcacctactacacaccgcagctgctgcagtggctgaaggaggaatgatggagacagtgccaggcccaagaactagaactttaaaacgttcccggggcctcagacaagtgcacatgctagcggggcccagcagccctgggtggttttgccagcatgctaactcttgtaactcgcagctgcatcctatgagctctcccaagcttccccgcccctcccctgggtcagccgtgaggcccacctttgccaccctcagctctttcctctggtgtggcttcagcttgaaagcaacctggagtcgggggcacagcctttggggcctggctgggagagggtcttggagcattaggggaagaagagagcagtgggatcttggggcctgagaagccttggaacgcttctggcagcagagctgggtgtgggaatgaggcctagatcgatatccctgggttagagttgaaatttgccgcaattccactggaaggcatttcccacgaggccagaggttgccaggctgcctgaggtctcctattctactctgaaccataaacccagagaagaattactcattaaccagcataaatactgcctgaggatcaaaactcagaggcaaagagggagttcctgactgctagaggtgccaccaccacaaacactttttattcaggagatactttttgagaatctctgctctgttcctaggttcagtgctgggtcctgggaatacagcaggacagacctcagcttatctcttcatagaaattatacaaagagaattggggagacagctaagaagaaaacaaagaaataaagcagttacaaattgtgataagtgctttgaaggaaagaaggggtctgagacaacaacagggaaggggcctctcttgaaacagtagttgggaaggaggcagacatgcaccagtgatgtggtgacaggtgctctgaaggaggtcaccaggacctgacctctttgaaggatcagaaaatacttccctgaaggactgacatttgagcctagacctgaagggtgagccatcaagctaagacaattggggaagagcattccagggagagggaggagttgtgcaaaggccctggggctccttctagctggaggaatgcaaggctagcttgtctggagcactgagaggatggcctgaactgagtggagagagacagaccaggaccaaaccatgcagaggtcaagggccacattcaccttttcagagtgactcaatcaaatttgtagtttgtaaaagtattttaacagctctgcggcaaagtgcaaatgaaaagtcttgatggcatggactggagcggggacagtggggatggagaaaggggaatggattgtggatgtgtttagaaggtagattcgatgtgaaggatgaatctggcttgaccttctgggtggctgatgggccatttactgagatggggcagcctggaagaggaacagaagcagggtcggggtggagggagaatactaaacttagcttgagacattttgcaataaggaagctatatctagagtgcttatgtgactcacctaaggccactcaacaagtttgtggcagaactggattagaactgcacagaaaacagccaagctgggatttgaacccatgtagtccaactccaaggcctctgcccctaaccactgtgccataccacctcccaataatcaacagcaaaattataggtctaacaatgttttatagacacccctccatttatgtgatgggtttgcatcctgataaacccatcataagttgaaaatatgatcataagttgaaaatatgatcataagtcaaaaatgtatttaatatacctaacctaccaaacatcatagcttagcctagcctgccttaaacatgctcagaacacttacattagcctacagtgggcaaaactatccaacacaaaatctatattgtaataaagttataaagaattttgaataaaaattcaatatttgaaaaaaaatttctactgaatg

SEQ ID NO: 441160 - DNA, 3091 bp, Homo sapiens
  misc_feature (2)..(3): n is a, c, g, or t
cnnacgcgtggggtgggagaccggagcgggagacagcggtgacaggagcagcggccgggagcccttagggaggcagacagagcctgcagccaatgccccaggagccctcggttccaaccaactgatgcccctgtgcccactggcccacgccatgcagccccagtccgttctgcacagcggctacttccacccactacttcgggcctggcagacagccaccaccaccctcaatgcctccaacctcatctaccccatctttgtcacggatgttcctgatgacatacagcctatcaccagcctcccaggagtggccaggtatggtgtgaagcggctggaagagatgctgaggcccttggtggaagagggcctacgctgtgtcttgatctttggcgtccccagcagagttcccaaggacgagcggggttccgcagctgactccgaggagtccccagctattgaggcaatccatctgttgaggaagaccttccccaacctcctggtggcctgtgatgtctgcctgtgtccctacacctcccatggtcactgcgggctctgagtgccaccctctgccccccaggatgtcaggtggtagccccgtcggacatgatggatggacgcgtggaagccatcaaagaggccctgatggcacatggacttggcaacagggtatcggtgatgagctacagtgccaaatttgcttcctgtttctatggccctttccgggatgcagctaagtcaagcccagcttttggggaccgccgctgctaccagctgccccctggagcacgaggcctggctctccgagctgtggaccgggatgtacgggaaggagctgacatgctcatggtgaagccgggaatgccctacctggacatcgtgcgggaggtaaaggacaagcaccctgacctccctctcgccgtgtaccacgtctctggagagtttgccatgctgtggcatggagcccaggccggggcatttgatctcaaggctgccgtactggaggccatgactgccttccgcagagcaggtgctgacatcatcatcacctactacacaccgcagctgctgcagtggctgaaggaggaatgatggagacagtgccaggcccaagaactagaactttaaaacgttcccggggcctcagacaagtgaaaaccaaagtaaatgctgcttttagaactgtgccctcatgccctcttcctgctcacatgctagcggggcccagcagccctgggtggttttgccagcatgctaactcttgtaactcgcagctgcatcctatgagctctcccaagcttccccgcccctcccctgggtcagccgtgaggcccacctttgccaccctcagctctttcctctggtgtggcttcagcttgaaagcaacctggagtcgggggcacagcctttggggcctggctgggagagggtcttggagcattaggggaagaagagagcagtgggatcttggggcctgagaagccttggaacgcttctggcagcagagctgggtgtgggaatgaggcctagatcgatatccctgggttagagttgaaatttgccgcaattccactggaaggcatttcccacgaggccagaggttgccaggctgcctgaggtctcctattctactctgaaccataaacccagagaagaattactcattaaccagcataaatactgcctgaggatcaaaactcagaggcaaagagggagttcctgactgctagaggtgccaccaccacaaacactttttattcaggagatactttttgagaatctctgctctgttcctaggttcagtgctgggtcctgggaatacagcaggacagacctcagcttatctcttcatagaaattatacaaagagaattggggagacagctaagaagaaaacaaagaaataaagcagttacaaattgtgataagtgctttgaaggaaagaaggggtctgagacaacaacagggaaggggcctctcttgaaacagtagttgggaaggaggcagacatgcaccagtgatgtggtgacaggtgctctgaaggaggtcaccaggacctgacctctttgaaggatcagaaaatacttccctgaaggactgacatttgagcctagacctgaagggtgagccatcaagctaagacaattggggaagagcattccagggagagggaggagttgtgcaaaggccctggggctccttctagctggaggaatgcaaggctagcttgtctggagcactgagaggatggcctgaactgagtggagagagacagaccaggaccaaaccatgcagaggtcaagggccacattcaccttttcagagtgactcaatcaaatttgtagtttgtaaaagtattttaacagctctgcggcaaagtgcaaatgaaaagtcttgatggcatggactggagcggggacagtggggatggagaaaggggaatggattgtggatgtgtttagaaggtagattcgatgtgaaggatgaatctggcttgaccttctgggtggctgatgggccatttactgagatggggcagcctggaagaggaacagaagcagggtcggggtggagggagaatactaaacttagcttgagacattttgcaataaggaagctatatctagagtgcttatgtgactcacctaaggccactcaacaagtttgtggcagaactggattagaactgcacagaaaacagccaagctgggatttgaacccatgtagtccaactccaaggcctctgcccctaaccactgtgccataccacctcccaataatcaacagcaaaattataggtctaacaatgttttatagacacccctccatttatgtgatgggtttgcatcctgataaacccatcataagttgaaaatatgatcataagttgaaaatatgatcataagtcaaaaatgtatttaatatacctaacctaccaaacatcatagcttagcctagcctgccttaaacatgctcagaacacttacattagcctacagtgggcaaaactatccaacacaaaatctatattgtaataaagttataaagaattttgaataaaaattcaatatttgaaaaaaaatttctactgaatg

SEQ ID NO: 441161 - DNA, 3312 bp, Homo sapiens
  misc_feature (2)..(3): n is a, c, g, or t
cnnacgcgtggggtgggagaccggagcgggagacagcggtgacaggagcagcggccgggagcccttagggaggcagacagagcctgcagccaatgccccaggagccctcggttccaaccaactgatgcccctgtgcccactggcccacgccatgcagccccagtccgttctgcacagcggctacttccacccactacttcgggcctggcagacagccaccaccaccctcaatgcctccaacctcatctaccccatctttgtcacgccctgggcttggccaggcagggaagccagacactggatcccatcctcctcccaccatctccacttccatatttctttcctgcttcccaaccatccctctcagtcgcccccgcaccactggcccttcccacagctaccaatccatatcccacccccgctcttgcagggatgttcctgatgacatacagcctatcaccagcctcccaggagtggccaggtatggtgtgaagcggctggaagagatgctgaggcccttggtggaagagggcctacgctgtgtcttgatctttggcgtccccagcagagttcccaaggacgagcggggttccgcagctgactccgaggagtccccagctattgaggcaatccatctgttgaggaagaccttccccaacctcctggtggcctgtgatgtctgcctgtgtccctacacctcccatggtcactgcgggctcctgagtgaaaacggagcattccgggctgaggagagccgccagcggctggctgaggtggcattggcgtatgccaaggcaggatgtcaggtggtagccccgtcggacatgatggatggacgcgtggaagccatcaaagaggccctgatggcacatggacttggcaacagggtatcggtgatgagctacagtgccaaatttgcttcctgtttctatggccctttccgggatgcagctaagtcaagcccagcttttggggaccgccgctgctaccagctgccccctggagcacgaggcctggctctccgagctgtggaccgggatgtacgggaaggagctgacatgctcatggtgaagccgggaatgccctacctggacatcgtgcgggaggtaaaggacaagcaccctgacctccctctcgccgtgtaccacgtctctggagagtttgccatgctgtggcatggagcccaggccggggcatttgatctcaaggctgccgtactggaggccatgactgccttccgcagagcaggtgctgacatcatcatcacctactacacaccgcagctgctgcagtggctgaaggaggaatgatggagacagtgccaggcccaagaactagaactttaaaacgttcccggggcctcagacaagtgaaaaccaaagtaaatgctgcttttagaactgtgccctcatgccctcttcctgctcacatgctagcggggcccagcagccctgggtggttttgccagcatgctaactcttgtaactcgcagctgcatcctatgagctctcccaagcttccccgcccctcccctgggtcagccgtgaggcccacctttgccaccctcagctctttcctctggtgtggcttcagcttgaaagcaacctggagtcgggggcacagcctttggggcctggctgggagagggtcttggagcattaggggaagaagagagcagtgggatcttggggcctgagaagccttggaacgcttctggcagcagagctgggtgtgggaatgaggcctagatcgatatccctgggttagagttgaaatttgccgcaattccactggaaggcatttcccacgaggccagaggttgccaggctgcctgaggtctcctattctactctgaaccataaacccagagaagaattactcattaaccagcataaatactgcctgaggatcaaaactcagaggcaaagagggagttcctgactgctagaggtgccaccaccacaaacactttttattcaggagatactttttgagaatctctgctctgttcctaggttcagtgctgggtcctgggaatacagcaggacagacctcagcttatctcttcatagaaattatacaaagagaattggggagacagctaagaagaaaacaaagaaataaagcagttacaaattgtgataagtgctttgaaggaaagaaggggtctgagacaacaacagggaaggggcctctcttgaaacagtagttgggaaggaggcagacatgcaccagtgatgtggtgacaggtgctctgaaggaggtcaccaggacctgacctctttgaaggatcagaaaatacttccctgaaggactgacatttgagcctagacctgaagggtgagccatcaagctaagacaattggggaagagcattccagggagagggaggagttgtgcaaaggccctggggctccttctagctggaggaatgcaaggctagcttgtctggagcactgagaggatggcctgaactgagtggagagagacagaccaggaccaaaccatgcagaggtcaagggccacattcaccttttcagagtgactcaatcaaatttgtagtttgtaaaagtattttaacagctctgcggcaaagtgcaaatgaaaagtcttgatggcatggactggagcggggacagtggggatggagaaaggggaatggattgtggatgtgtttagaaggtagattcgatgtgaaggatgaatctggcttgaccttctgggtggctgatgggccatttactgagatggggcagcctggaagaggaacagaagcagggtcggggtggagggagaatactaaacttagcttgagacattttgcaataaggaagctatatctagagtgcttatgtgactcacctaaggccactcaacaagtttgtggcagaactggattagaactgcacagaaaacagccaagctgggatttgaacccatgtagtccaactccaaggcctctgcccctaaccactgtgccataccacctcccaataatcaacagcaaaattataggtctaacaatgttttatagacacccctccatttatgtgatgggtttgcatcctgataaacccatcataagttgaaaatatgatcataagttgaaaatatgatcataagtcaaaaatgtatttaatatacctaacctaccaaacatcatagcttagcctagcctgccttaaacatgctcagaacacttacattagcctacagtgggcaaaactatccaacacaaaatctatattgtaataaagttataaagaattttgaataaaaattcaatatttgaaaaaaaatttctactgaatg

SEQ ID NO: 441162 - DNA, 3392 bp, Homo sapiens
aaaaaaaaagaagagaattttttttaaacagtcattgcttgctcagatgtttactttaaaagataataatgaacaagaagcagtcacataaaatacaagcccaaattttatatcattagattctgattgtcatgaaagtttctaaagacttactttcatttctcaacttaccttgttgaccagcagggattggtgaaccatgctgtgagtagcattgggctagagagaggggaggcaggaatctagaagagctgttttccagatgtgaccatctcctgaggacagggaccatgtctcatgtgccacccatcaccccccacagacagagcctgcagccaatgccccaggagccctcggttccaaccaactgatgcccctgtgcccactggcccacgccatgcagccccagtccgttctgcacagcggctacttccacccactacttcgggcctggcagacagccaccaccaccctcaatgcctccaacctcatctaccccatctttgtcacggatgttcctgatgacatacagcctatcaccagcctcccaggagtggccaggtatggtgtgaagcggctggaagagatgctgaggcccttggtggaagagggcctacgctgtgtcttgatctttggcgtccccagcagagttcccaaggacgagcggggttccgcagctgactccgaggagtccccagctattgaggcaatccatctgttgaggaagaccttccccaacctcctggtggcctgtgatgtctgcctgtgtccctacacctcccatggtcactgcgggctcctgagtgaaaacggagcattccgggctgaggagagccgccagcggctggctgaggtggcattggcgtatgccaaggcaggatgtcaggtggtagccccgtcggacatgatggatggacgcgtggaagccatcaaagaggccctgatggcacatggacttggcaacagggtatcggtgatgagctacagtgccaaatttgcttcctgtttctatggccctttccgggatgcagctaagtcaagcccagcttttggggaccgccgctgctaccagctgccccctggagcacgaggcctggctctccgagctgtggaccgggatgtacgggaaggagctgacatgctcatggtgaagccgggaatgccctacctggacatcgtgcgggaggtaaaggacaagcaccctgacctccctctcgccgtgtaccacgtctctggagagtttgccatgctgtggcatggagcccaggccggggcatttgatctcaaggctgccgtactggaggccatgactgccttccgcagagcaggtgctgacatcatcatcacctactacacaccgcagctgctgcagtggctgaaggaggaatgatggagacagtgccaggcccaagaactagaactttaaaacgttcccggggcctcagacaagtgaaaaccaaagtaaatgctgcttttagaactgtgccctcatgccctcttcctgctcacatgctagcggggcccagcagccctgggtggttttgccagcatgctaactcttgtaactcgcagctgcatcctatgagctctcccaagcttccccgcccctcccctgggtcagccgtgaggcccacctttgccaccctcagctctttcctctggtgtggcttcagcttgaaagcaacctggagtcgggggcacagcctttggggcctggctgggagagggtcttggagcattaggggaagaagagagcagtgggatcttggggcctgagaagccttggaacgcttctggcagcagagctgggtgtgggaatgaggcctagatcgatatccctgggttagagttgaaatttgccgcaattccactggaaggcatttcccacgaggccagaggttgccaggctgcctgaggtctcctattctactctgaaccataaacccagagaagaattactcattaaccagcataaatactgcctgaggatcaaaactcagaggcaaagagggagttcctgactgctagaggtgccaccaccacaaacactttttattcaggagatactttttgagaatctctgctctgttcctaggttcagtgctgggtcctgggaatacagcaggacagacctcagcttatctcttcatagaaattatacaaagagaattggggagacagctaagaagaaaacaaagaaataaagcagttacaaattgtgataagtgctttgaaggaaagaaggggtctgagacaacaacagggaaggggcctctcttgaaacagtagttgggaaggaggcagacatgcaccagtgatgtggtgacaggtgctctgaaggaggtcaccaggacctgacctctttgaaggatcagaaaatacttccctgaaggactgacatttgagcctagacctgaagggtgagccatcaagctaagacaattggggaagagcattccagggagagggaggagttgtgcaaaggccctggggctccttctagctggaggaatgcaaggctagcttgtctggagcactgagaggatggcctgaactgagtggagagagacagaccaggaccaaaccatgcagaggtcaagggccacattcaccttttcagagtgactcaatcaaatttgtagtttgtaaaagtattttaacagctctgcggcaaagtgcaaatgaaaagtcttgatggcatggactggagcggggacagtggggatggagaaaggggaatggattgtggatgtgtttagaaggtagattcgatgtgaaggatgaatctggcttgaccttctgggtggctgatgggccatttactgagatggggcagcctggaagaggaacagaagcagggtcggggtggagggagaatactaaacttagcttgagacattttgcaataaggaagctatatctagagtgcttatgtgactcacctaaggccactcaacaagtttgtggcagaactggattagaactgcacagaaaacagccaagctgggatttgaacccatgtagtccaactccaaggcctctgcccctaaccactgtgccataccacctcccaataatcaacagcaaaattataggtctaacaatgttttatagacacccctccatttatgtgatgggtttgcatcctgataaacccatcataagttgaaaatatgatcataagttgaaaatatgatcataagtcaaaaatgtatttaatatacctaacctaccaaacatcatagcttagcctagcctgccttaaacatgctcagaacacttacattagcctacagtgggcaaaactatccaacacaaaatctatattgtaataaagttataaagaattttgaataaaaattcaatatttgaaaaaaaatttctactgaatg

SEQ ID NO: 441163 - DNA, 3257 bp, Homo sapiens
  misc_feature (2)..(3): n is a, c, g, or t
cnnacgcgtggggtgggagaccggagcgggagacagcggtgacaggagcagcggccgggagcccttagggaggcagacagagcctgcagccaatgccccaggagccctcggttccaaccaactgatgcccctgtgcccactggcccacgccatgcagccccagtccgttctgcacagcggctacttccacccactacttcgggcctggcagacagccaccaccaccctcaatgcctccaacctcatctaccccatctttgtcacgccctgggcttggccaggcagggaagccagacactggatcccatcctcctcccaccatctccacttccatatttctttcctgcttcccaaccatccctctcagtcgcccccgcaccactggcccttcccacagctaccaatccatatcccacccccgctcttgcagggatgttcctgatgacatacagcctatcaccagcctcccaggagtggccaggtatggtgtgaagcggctggaagagatgctgaggcccttggtggaagagggcctacgctgtgtcttgatctttggcgtccccagcagagttcccaaggacgagcggggttccgcagctgactccgaggagtccccagctattgaggcaatccatctgttgaggaagaccttccccaacctcctggtggcctgtgatgtctgcctgtgtccctacacctcccatggtcactgcgggctctgagtgccaccctctgccccccaggatgtcaggtggtagccccgtcggacatgatggatggacgcgtggaagccatcaaagaggccctgatggcacatggacttggcaacagggtatcggtgatgagctacagtgccaaatttgcttcctgtttctatggccctttccgggatgcagctaagtcaagcccagcttttggggaccgccgctgctaccagctgccccctggagcacgaggcctggctctccgagctgtggaccgggatgtacgggaaggagctgacatgctcatggtgaagccgggaatgccctacctggacatcgtgcgggaggtaaaggacaagcaccctgacctccctctcgccgtgtaccacgtctctggagagtttgccatgctgtggcatggagcccaggccggggcatttgatctcaaggctgccgtactggaggccatgactgccttccgcagagcaggtgctgacatcatcatcacctactacacaccgcagctgctgcagtggctgaaggaggaatgatggagacagtgccaggcccaagaactagaactttaaaacgttcccggggcctcagacaagtgaaaaccaaagtaaatgctgcttttagaactgtgccctcatgccctcttcctgctcacatgctagcggggcccagcagccctgggtggttttgccagcatgctaactcttgtaactcgcagctgcatcctatgagctctcccaagcttccccgcccctcccctgggtcagccgtgaggcccacctttgccaccctcagctctttcctctggtgtggcttcagcttgaaagcaacctggagtcgggggcacagcctttggggcctggctgggagagggtcttggagcattaggggaagaagagagcagtgggatcttggggcctgagaagccttggaacgcttctggcagcagagctgggtgtgggaatgaggcctagatcgatatccctgggttagagttgaaatttgccgcaattccactggaaggcatttcccacgaggccagaggttgccaggctgcctgaggtctcctattctactctgaaccataaacccagagaagaattactcattaaccagcataaatactgcctgaggatcaaaactcagaggcaaagagggagttcctgactgctagaggtgccaccaccacaaacactttttattcaggagatactttttgagaatctctgctctgttcctaggttcagtgctgggtcctgggaatacagcaggacagacctcagcttatctcttcatagaaattatacaaagagaattggggagacagctaagaagaaaacaaagaaataaagcagttacaaattgtgataagtgctttgaaggaaagaaggggtctgagacaacaacagggaaggggcctctcttgaaacagtagttgggaaggaggcagacatgcaccagtgatgtggtgacaggtgctctgaaggaggtcaccaggacctgacctctttgaaggatcagaaaatacttccctgaaggactgacatttgagcctagacctgaagggtgagccatcaagctaagacaattggggaagagcattccagggagagggaggagttgtgcaaaggccctggggctccttctagctggaggaatgcaaggctagcttgtctggagcactgagaggatggcctgaactgagtggagagagacagaccaggaccaaaccatgcagaggtcaagggccacattcaccttttcagagtgactcaatcaaatttgtagtttgtaaaagtattttaacagctctgcggcaaagtgcaaatgaaaagtcttgatggcatggactggagcggggacagtggggatggagaaaggggaatggattgtggatgtgtttagaaggtagattcgatgtgaaggatgaatctggcttgaccttctgggtggctgatgggccatttactgagatggggcagcctggaagaggaacagaagcagggtcggggtggagggagaatactaaacttagcttgagacattttgcaataaggaagctatatctagagtgcttatgtgactcacctaaggccactcaacaagtttgtggcagaactggattagaactgcacagaaaacagccaagctgggatttgaacccatgtagtccaactccaaggcctctgcccctaaccactgtgccataccacctcccaataatcaacagcaaaattataggtctaacaatgttttatagacacccctccatttatgtgatgggtttgcatcctgataaacccatcataagttgaaaatatgatcataagttgaaaatatgatcataagtcaaaaatgtatttaatatacctaacctaccaaacatcatagcttagcctagcctgccttaaacatgctcagaacacttacattagcctacagtgggcaaaactatccaacacaaaatctatattgtaataaagttataaagaattttgaataaaaattcaatatttgaaaaaaaatttctactgaatg

SEQ ID NO: 441164 - DNA, 1260 bp, Homo sapiens
  misc_feature (2)..(3): n is a, c, g, or t
cnnacgcgtggggtgggagaccggagcgggagacagcggtgacaggagcagcggccgggagcccttagggaggcagacagagcctgcagccaatgccccaggagccctcggttccaaccaactgatgcccctgtgcccactggcccacgccatgcagccccagtccgttctgcacagcggctacttccacccactacttcgggcctggcagacagccaccaccaccctcaatgcctccaacctcatctaccccatctttgtcacggatgttcctgatgacatacagcctatcaccagcctcccaggagtggccaggtatggtgtgaagcggctggaagagatgctgaggcccttggtggaagagggcctacgctgtgtcttgatctttggcgtccccagcagagttcccaaggacgagcggggttccgcagctgactccgaggagtccccagctattgaggcaatccatctgttgaggaagaccttccccaacctcctggtggcctgtgatgtctgcctgtgtccctacacctcccatggtcactgcgggctcctgagtgaaaacggagcattccgggctgaggagagccgccagcggctggctgaggtggcattggcgtatgccaaggcaggatgtcaggtggtagccccgtcggacatgatggatggacgcgtggaagccatcaaagaggccctgatggcacatggacttggcaacagggtatcggtgatgagctacagtgccaaatttgcttcctgtttctatggccctttccgggatgcagctaagtcaagcccagcttttggggaccgccgctgctaccagctgccccctggagcacgaggcctggctctccgagctgtggaccgggatgtacgggaaggagctgacatgctcatggtgaagccgggaatgccctacctggacatcgtgcgggaggtaaaggacaagcaccctgacctccctctcgccgtgtaccacgtctctggagagtttgccatgctgtggcatggagcccaggccggggcatttgatctcaaggctgccgtactggaggccatgactgccttccgcagagcaggtgctgacatcatcatcacctactacacaccgcagctgctgcagtggctgaaggaggaatgatggagacagtgccaggcccaagaactagaactttaaaacgttcccggggcctcagacaagtgaaaaccaaagtaaatgctgcttttagaactgtgccctcatgccctcttcctgct

SEQ ID NO: 441165 - DNA, 2557 bp, Homo sapiens
ggcacgagggccccgggagcgcgggcggcgggccccttggtcctcaggcggccgtggcggcggtggcggcggttgggccgaggcaggcggcctcagtggccgaggtggctggacgcgtagcaggtggaaggagggagggagccgcaggcgcagacccacccgccatgaagccccccgcagcctgtgcaggagacatggcggacgcagcatctccgtgctctgtggtaaacgacctgcggtgggacctgagtgcccagcagatagaggagcgcaccagggagctcatcgagcagaccaagcgcgtgtatgaccaggttggcacccaggagtttgaggacgtgtcctacgagagcacgctcaaggcgctggccgatgtggaggtcacctacacagttcagaggaatatccttgacttcccccagcatgtttccccctccaaggacatccggacagccagcacagaggccgacaagaagctctctgagttcgacgtggagatgagcatgagggaggacgtgtaccagaggatcgtgtggctccaggagaaagttcagaaggactcactgaggcccgaggctgcgcggtacctggagcggctaatcaagctgggccggagaaatgggcttcacctccccagagagactcaggaaaacatcaaacgcatcaagaagaagctgagccttctgtgcatcgacttcaacaagaacctgaacgaggacacgaccttcctgcccttcacgctccaggagctaggagggctccccgaggactttctgaactccctggagaagatggaggacggcaagttgaaggtcaccctcaagtacccccattacttccccctcctgaagaaatgccacgtgcctgagaccaggaggaaagtggaggaggccttcaactgccggtgcaaggaggagaactgcgctatcctcaaggagctggtgacgctgcgggcccagaagtcccgcctgctggggttccacacgcacgccgactatgtcctggagatgaacatggccaagaccagccagaccgtggccaccttcctagatgagctggcgcagaagctgaagcccctgggggagcaggagcgtgcggtgattctggagctgaagcgtgcggagtgcgagcgccggggcctgcccttcgacggccgcatccgtgcctgggacatgcgctactacatgaaccaggtggaggagacgcgctactgcgtggaccagaacctgctcaaggagtacttccccgtgcaggtggtcacgcacgggctgctgggcatctaccaggagctcctggggctggccttccaccacgaggagggcgccagtgcctggcatgaggacgtgcggctctacaccgcgagggacgcggcctcgggggaggtggtcggcaagttctacctggacctgtacccgcgggaaggaaagtacgggcacgcggcctgctttggcctgcagcccggctgcctgcggcaggatgggagccgccagatcgccatcgcggccatggtggccaacttcaccaagcccacagccgacgcgccctcgctgctgcagcatgacgaggtggagacctacttccatgagtttggccacgtgatgcaccagctctgctcccaggcggagttcgccatgttcagcgggacccacgtggagcgggactttgtggaggcgccgtcgcagatgctggagaactgggtgtgggagcaggagccgctgctgcggatgtcgcggcactaccgcacaggcagcgccgtgccccgggagctcctggagaagctcattgagtcccggcaggccaacacaggcctcttcaacctgcgccagatcgtcctcgccaaggtggaccaggccctgcacacgcagacggacgcagaccccgccgaggagtatgcgcggctctgccaggagatcctcggggtcccggccacgccaggaaccaacatgcctgcaaccttcggccatctggcaggtggctacgacgcccagtactacgggtacctgtggagcgaggtgtattccatggacatgttccacacgcgcttcaagcaggagggtgtcctgaacagcaaggttggcatggattacagaagctgcatcctgagacccggcggttccgaggatgccagcgccatgctgaggcgcttcctgggccgtgaccccaagcaggacgccttcctcctgagcaaggggctgcaggtcgggggctgcgagcccgagccgcaggtctgctgaggcctggcactgcgactgcccagtctggcctgcgctcccgccgccctggtgccttagcccccggcacaggatggggcaggctctggcacagtgcctgggactggcagggtggctgagcggctgtcttgcctcttgtcattgtctgtccccacccggtcgtggcccacccggctagagacggcgtcctcaaggcatctggagggctttcgtggctgccagggcctggtctttgttgcactaacacgtctcctctctgggaaacgtcccttgtcaggagacggctcttctttgaaatgaggtcattaaaaggaaacagaaaaaga

SEQ ID NO: 441166 - DNA, 2402 bp, Homo sapiens
ggcacgagggccccgggagcgcgggcggcgggccccttggtcctcaggcggccgtggcggcggtggcggcggttgggccgaggcaggcggcctcagtggccgaggtggctggacgcgtagcaggtggaaggagggagggagccgcaggcgcagacccacccgccatgaagccccccgcaggacgtgtcctacgagagcacgctcaaggcgctggccgatgtggaggtcacctacacagttcagaggaatatccttgacttcccccagcatgtttccccctccaaggacatccggacagccagcacagaggccgacaagaagctctctgagttcgacgtggagatgagcatgagggaggacgtgtaccagaggatcgtgtggctccaggagaaagttcagaaggactcactgaggcccgaggctgcgcggtacctggagcggctaatcaagctgggccggagaaatgggcttcacctccccagagagactcaggaaaacatcaaacgcatcaagaagaagctgagccttctgtgcatcgacttcaacaagaacctgaacgaggacacgaccttcctgcccttcacgctccaggagctaggagggctccccgaggactttctgaactccctggagaagatggaggacggcaagttgaaggtcaccctcaagtacccccattacttccccctcctgaagaaatgccacgtgcctgagaccaggaggaaagtggaggaggccttcaactgccggtgcaaggaggagaactgcgctatcctcaaggagctggtgacgctgcgggcccagaagtcccgcctgctggggttccacacgcacgccgactatgtcctggagatgaacatggccaagaccagccagaccgtggccaccttcctagatgagctggcgcagaagctgaagcccctgggggagcaggagcgtgcggtgattctggagctgaagcgtgcggagtgcgagcgccggggcctgcccttcgacggccgcatccgtgcctgggacatgcgctactacatgaaccaggtggaggagacgcgctactgcgtggaccagaacctgctcaaggagtacttccccgtgcaggtggtcacgcacgggctgctgggcatctaccaggagctcctggggctggccttccaccacgaggagggcgccagtgcctggcatgaggacgtgcggctctacaccgcgagggacgcggcctcgggggaggtggtcggcaagttctacctggacctgtacccgcgggaaggaaagtacgggcacgcggcctgctttggcctgcagcccggctgcctgcggcaggatgggagccgccagatcgccatcgcggccatggtggccaacttcaccaagcccacagccgacgcgccctcgctgctgcagcatgacgaggtggagacctacttccatgagtttggccacgtgatgcaccagctctgctcccaggcggagttcgccatgttcagcgggacccacgtggagcgggactttgtggaggcgccgtcgcagatgctggagaactgggtgtgggagcaggagccgctgctgcggatgtcgcggcactaccgcacaggcagcgccgtgccccgggagctcctggagaagctcattgagtcccggcaggccaacacaggcctcttcaacctgcgccagatcgtcctcgccaaggtggaccaggccctgcacacgcagacggacgcagaccccgccgaggagtatgcgcggctctgccaggagatcctcggggtcccggccacgccaggaaccaacatgcctgcaaccttcggccatctggcaggtggctacgacgcccagtactacgggtacctgtggagcgaggtgtattccatggacatgttccacacgcgcttcaagcaggagggtgtcctgaacagcaaggttggcatggattacagaagctgcatcctgagacccggcggttccgaggatgccagcgccatgctgaggcgcttcctgggccgtgaccccaagcaggacgccttcctcctgagcaaggggctgcaggtcgggggctgcgagcccgagccgcaggtctgctgaggcctggcactgcgactgcccagtctggcctgcgctcccgccgccctggtgccttagcccccggcacaggatggggcaggctctggcacagtgcctgggactggcagggtggctgagcggctgtcttgcctcttgtcattgtctgtccccacccggtcgtggcccacccggctagagacggcgtcctcaaggcatctggagggctttcgtggctgccagggcctggtctttgttgcactaacacgtctcctctctgggaaacgtcccttgtcaggagacggctcttctttgaaatgaggtcattaaaaggaaacagaaaaaga

SEQ ID NO: 441167 - DNA, 2528 bp, Homo sapiens
ggcacgagggccccgggagcgcgggcggcgggccccttggtcctcaggcggccgtggcggcggtggcggcggttgggccgaggcaggcggcctcagtggccgaggtggctggacgcgtagcaggtggaaggagggagggagccgcaggcgcagacccacccgccatgaagccccccgcagcctgtgcaggagacatggcggacgcagcatctccgtgctctgtggtaaacgacctgcggtgggacctgagtgcccagcagatagaggagcgcaccagggagctcatcgagcagaccaagcgcgtgtatgaccaggttggcacccaggagtttgaggacgtgtcctacgagagcacgctcaaggcgctggccgatgtggaggtcacctacacagcatgtttccccctccaaggacatccggacagccagcacagaggccgacaagaagctctctgagttcgacgtggagatgagcatgagggaggacgtgtaccagaggatcgtgtggctccaggagaaagttcagaaggactcactgaggcccgaggctgcgcggtacctggagcggctaatcaagctgggccggagaaatgggcttcacctccccagagagactcaggaaaacatcaaacgcatcaagaagaagctgagccttctgtgcatcgacttcaacaagaacctgaacgaggacacgaccttcctgcccttcacgctccaggagctaggagggctccccgaggactttctgaactccctggagaagatggaggacggcaagttgaaggtcaccctcaagtacccccattacttccccctcctgaagaaatgccacgtgcctgagaccaggaggaaagtggaggaggccttcaactgccggtgcaaggaggagaactgcgctatcctcaaggagctggtgacgctgcgggcccagaagtcccgcctgctggggttccacacgcacgccgactatgtcctggagatgaacatggccaagaccagccagaccgtggccaccttcctagatgagctggcgcagaagctgaagcccctgggggagcaggagcgtgcggtgattctggagctgaagcgtgcggagtgcgagcgccggggcctgcccttcgacggccgcatccgtgcctgggacatgcgctactacatgaaccaggtggaggagacgcgctactgcgtggaccagaacctgctcaaggagtacttccccgtgcaggtggtcacgcacgggctgctgggcatctaccaggagctcctggggctggccttccaccacgaggagggcgccagtgcctggcatgaggacgtgcggctctacaccgcgagggacgcggcctcgggggaggtggtcggcaagttctacctggacctgtacccgcgggaaggaaagtacgggcacgcggcctgctttggcctgcagcccggctgcctgcggcaggatgggagccgccagatcgccatcgcggccatggtggccaacttcaccaagcccacagccgacgcgccctcgctgctgcagcatgacgaggtggagacctacttccatgagtttggccacgtgatgcaccagctctgctcccaggcggagttcgccatgttcagcgggacccacgtggagcgggactttgtggaggcgccgtcgcagatgctggagaactgggtgtgggagcaggagccgctgctgcggatgtcgcggcactaccgcacaggcagcgccgtgccccgggagctcctggagaagctcattgagtcccggcaggccaacacaggcctcttcaacctgcgccagatcgtcctcgccaaggtggaccaggccctgcacacgcagacggacgcagaccccgccgaggagtatgcgcggctctgccaggagatcctcggggtcccggccacgccaggaaccaacatgcctgcaaccttcggccatctggcaggtggctacgacgcccagtactacgggtacctgtggagcgaggtgtattccatggacatgttccacacgcgcttcaagcaggagggtgtcctgaacagcaaggttggcatggattacagaagctgcatcctgagacccggcggttccgaggatgccagcgccatgctgaggcgcttcctgggccgtgaccccaagcaggacgccttcctcctgagcaaggggctgcaggtcgggggctgcgagcccgagccgcaggtctgctgaggcctggcactgcgactgcccagtctggcctgcgctcccgccgccctggtgccttagcccccggcacaggatggggcaggctctggcacagtgcctgggactggcagggtggctgagcggctgtcttgcctcttgtcattgtctgtccccacccggtcgtggcccacccggctagagacggcgtcctcaaggcatctggagggctttcgtggctgccagggcctggtctttgttgcactaacacgtctcctctctgggaaacgtcccttgtcaggagacggctcttctttgaaatgaggtcattaaaaggaaacagaaaaaga

SEQ ID NO: 441168 - DNA, 2521 bp, Homo sapiens
ggcacgagggccccgggagcgcgggcggcgggccccttggtcctcaggcggccgtggcggcggtggcggcggttgggccgaggcaggcggcctcagtggccgaggtggctggacgcgtagcaggtggaaggagggagggagccgcaggcgcagacccacccgccatgaagccccccgcagcctgtgcaggagacatggcggacgcagcatctccgtgctctgtggtaaacgacctgcggtgggacctgagtgcccagcagatagaggagcgcaccagggagctcatcgagcagaccaagcgcgtgtatgaccaggttggcacccaggagtttgaggacgtgtcctacgagagcacgctcaaggcgctggccgatgtggaggtcacctacacagttcagaggaatatccttgacttcccccagcatgtttccccctccaaggacatccggacagccagcacagaggccgacaagaagctctctgagttcgacgtggagatgagcatgagggaggacgtgtaccagaggatcgtgtggctccaggagaaagttcagaaggactcactgaggcccgaggctgcgcggtacctggagcggctaatcaagctgggccggagaaatgggcttcacctccccagagagactcaggaaaacatcaaacgcatcaagaagaagctgagccttctgtgcatcgacttcaacaagaacctgaacgaggacacgaccttcctgcccttcacgctccaggagctaggagggctccccgaggactttctgaactccctggagaagatggaggacggcaagttgaaggtcaccctcaagtacccccattacttccccctcctgaagaaatgccacgtgcctgagaccaggaggaaagtggaggaggccttcaactgccggtgcaaggaggagaactgcgctatcctcaaggagctggtgacgctgcgggcccagaagtcccgcctgctggggttccacacgcacgccgactatgtcctggagatgaacatggccaagaccagccagaccgtggccaccttcctagatgagctggcgcagaagctgaagcccctgggggagcaggagcgtgcggtgattctggagctgaagcgtgcggagtgcgagcgccggggcctgcccttcgacggccgcatccgtgcctgggacatgcgctactacatgaaccaggtggaggagacgcgctactgcgtggaccagaacctgctcaaggagtacttccccgtgcaggtggtcacgcacgggctgctgggcatctaccaggagctcctggggctggccttccaccacgaggagggcgccagtgcctggcatgaggacgtgcggctctacaccgcgagggacgcggcctcgggggaggtggtcggcaagttctacctggacctgtacccgcgggaaggaaagtacgggcacgcggcctgctttggcctgcagcccggctgcctgcggcaggatgggagccgccagatcgccatcgcggccatggtggccaacttcaccaagcccacagccgacgcgccctcgctgctgcagcatgacgaggtggagacctacttccatgagtttggccacgtgatgcaccagctctgctcccaggcggagttcgccatgttcagcgggacccacgtggagcgggactttgtggaggcgccgtcgcagatgctggagaactgggtgtgggagcaggagccgctgctgcggatgtcgcggcactaccgcacaggcagcgccgtgccccgggagctcctggagaagctcattgagtcccggcaggccaacacaggcctcttcaacctgcgccagatcgtcctcgccaaggtggaccaggccctgcacacgcagacggacgcagaccccgccgaggagtatgcgcggctctgccaggagatcctcggggtcccggccacgccaggtggctacgacgcccagtactacgggtacctgtggagcgaggtgtattccatggacatgttccacacgcgcttcaagcaggagggtgtcctgaacagcaaggttggcatggattacagaagctgcatcctgagacccggcggttccgaggatgccagcgccatgctgaggcgcttcctgggccgtgaccccaagcaggacgccttcctcctgagcaaggggctgcaggtcgggggctgcgagcccgagccgcaggtctgctgaggcctggcactgcgactgcccagtctggcctgcgctcccgccgccctggtgccttagcccccggcacaggatggggcaggctctggcacagtgcctgggactggcagggtggctgagcggctgtcttgcctcttgtcattgtctgtccccacccggtcgtggcccacccggctagagacggcgtcctcaaggcatctggagggctttcgtggctgccagggcctggtctttgttgcactaacacgtctcctctctgggaaacgtcccttgtcaggagacggctcttctttgaaatgaggtcattaaaaggaaacagaaaaaga

SEQ ID NO: 441169 - DNA, 2907 bp, Homo sapiens
  misc_feature (2560)..(2560): n is a, c, g, or t
ggcacgagggccccgggagcgcgggcggcgggccccttggtcctcaggcggccgtggcggcggtggcggcggttgggccgaggcaggcggcctcagtggccgaggtggctggacgcgtagcaggtggaaggagggagggagccgcaggcgcagacccacccgccatgaagccccccgcagcctgtgcaggagacatggcggacgcagcatctccgtgctctgtggtaaacgacctgcggtgggacctgagtgcccagcagatagaggagcgcaccagggagctcatcgagcagaccaagcgcgtgtatgaccaggttggcacccaggagtttgaggacgtgtcctacgagagcacgctcaaggcgctggccgatgtggaggtcacctacacagttcagaggaatatccttgacttcccccagcatgtttccccctccaaggacatccggacagccagcacagaggccgacaagaagctctctgagttcgacgtggagatgagcatgagggaggacgtgtaccagaggatcgtgtggctccaggagaaagttcagaaggactcactgaggcccgaggctgcgcggtacctggagcggctaatcaagctgggccggagaaatgggcttcacctccccagagagactcaggaaaacatcaaacgcatcaagaagaagctgagccttctgtgcatcgacttcaacaagaacctgaacgaggacacgaccttcctgcccttcacgctccaggagctaggagggctccccgaggactttctgaactccctggagaagatggaggacggcaagttgaaggtcaccctcaagtacccccattacttccccctcctgaagaaatgccacgtgcctgagaccaggaggaaagtggaggaggccttcaactgccggtgcaaggaggagaactgcgctatcctcaaggagctggtgacgctgcgggcccagaagtcccgcctgctggggttccacacgcacgccgactatgtcctggagatgaacatggccaagaccagccagaccgtggccaccttcctagatgagctggcgcagaagctgaagcccctgggggagcaggagcgtgcggtgattctggagctgaagcgtgcggagtgcgagcgccggggcctgcccttcgacggccgcatccgtgcctgggacatgcgctactacatgaaccaggtggaggagacgcgctactgcgtggaccagaacctgctcaaggagtacttccccgtgcaggtggtcacgcacgggctgctgggcatctaccaggagctcctggggctggccttccaccacgaggagggcgccagtgcctggcatgaggacgtgcggctctacaccgcgagggacgcggcctcgggggaggtggtcggcaagttctacctggacctgtacccgcgggaaggaaagtacgggcacgcggcctgctttggcctgcagcccggctgcctgcggcaggatgggagccgccagatcgccatcgcggccatggtggccaacttcaccaagcccacagccgacgcgccctcgctgctgcagcatgacgaggtggagacctacttccatgagtttggccacgtgatgcaccagctctgctcccaggcggagttcgccatgttcagcgggacccacgtggagcgggactttgtggaggcgccgtcgcagatgctggagaactgggtgtgggagcaggagccgctgctgcggatgtcgcggcactaccgcacaggcagcgccgtgccccgggagctcctggagaagctcattgagtcccggcaggccaacacaggcctcttcaacctgcgccagatcgtcctcgccaaggtggaccaggccctgcacacgcagacggacgcagaccccgccgaggagtatgcgcggctctgccaggagatcctcggggtcccggccacgccaggaaccaacatgcctgcaaccttcggccatctggcaggtggctacgacgcccagtactacgggtacctgtggagcgaggtgtattccatggacatgttccacacgcgcttcaagcaggagggtgtcctgaacagcaaggttggcatggattacagaagctgcatcctgagacccggcggttccgaggatgccagcgccatgctgaggcgcttcctgggccgtgaccccaagcaggacgccttcctcctgagcaaggggctgcaggtcgggggctgcgagcccgagccgcaggtctgctgaggcctggcactgcgactgcccagtctggcctgcgctcccgccgccctggtgccttagcccccggcacaggatggggcaggctctggcacagtgcctgggactggcagggtggctgagcggctgtcttgcctcttgtcattgtctgtccccacccggtcgtggcccacccggctagagacggcgtcctcaaggcatctggagggctttcgtggctgccagggcctggtctttgttgcactaacacgtctcctctctgggaaacgtcccttgtcaggagacggctcttctttgaaatgaggtcattaaaaggaaacagaaaaagaaanaaaaaacaaaaaaacaaaaacaaaaacaaaaaaaagggccgccccccctctcataaagatttctcccccaaggggcccccaacttttccgcgcgtctaccccgcgctttctcttgttgtccccaagggtggccccccctttggcggacgccgcgcctttttataagaccgtaaggccctggcgcgcccgcgcgtcgttcttcacgacagcgccctgtcacacactggtgcgcaacaacacgcgtctcttacctgtgtggggacaccttgttgtgtgcagaggggccaccccctttttcttctgtgggcgcgtgtgctcccccctttctgcggccccaaacctcccct

SEQ ID NO: 441170 - DNA, 2486 bp, Homo sapiens
ggcacgagggccccgggagcgcgggcggcgggccccttggtcctcaggcggccgtggcggcggtggcggcggttgggccgaggcaggcggcctcagtggccgaggtggctggacgcgtagcaggtggaaggagggagggagccgcaggcgcagacccacccgccatgaagccccccgcagcctgtgcaggagacatggcggacgcagcatctccgtgctctgtggtaaacgacctgcggtgggacctgagtgcccagcagatagaggagcgcaccagggagctcatcgagcagaccaagcgcgtgtatgaccaggttggcacccaggagtttgaggacgtgtcctacgagagcacgctcaaggcgctggccgatgtggaggtcacctacacagttcagaggaatatccttgacttcccccagcatgtttccccctccaaggacatccggacagccagcacagaggccgacaagaagctctctgagttcgacgtggagatgagcatgagggaggacgtgtaccagaggatcgtgtggctccaggagaaatgggcttcacctccccagagagactcaggaaaacatcaaacgcatcaagaagaagctgagccttctgtgcatcgacttcaacaagaacctgaacgaggacacgaccttcctgcccttcacgctccaggagctaggagggctccccgaggactttctgaactccctggagaagatggaggacggcaagttgaaggtcaccctcaagtacccccattacttccccctcctgaagaaatgccacgtgcctgagaccaggaggaaagtggaggaggccttcaactgccggtgcaaggaggagaactgcgctatcctcaaggagctggtgacgctgcgggcccagaagtcccgcctgctggggttccacacgcacgccgactatgtcctggagatgaacatggccaagaccagccagaccgtggccaccttcctagatgagctggcgcagaagctgaagcccctgggggagcaggagcgtgcggtgattctggagctgaagcgtgcggagtgcgagcgccggggcctgcccttcgacggccgcatccgtgcctgggacatgcgctactacatgaaccaggtggaggagacgcgctactgcgtggaccagaacctgctcaaggagtacttccccgtgcaggtggtcacgcacgggctgctgggcatctaccaggagctcctggggctggccttccaccacgaggagggcgccagtgcctggcatgaggacgtgcggctctacaccgcgagggacgcggcctcgggggaggtggtcggcaagttctacctggacctgtacccgcgggaaggaaagtacgggcacgcggcctgctttggcctgcagcccggctgcctgcggcaggatgggagccgccagatcgccatcgcggccatggtggccaacttcaccaagcccacagccgacgcgccctcgctgctgcagcatgacgaggtggagacctacttccatgagtttggccacgtgatgcaccagctctgctcccaggcggagttcgccatgttcagcgggacccacgtggagcgggactttgtggaggcgccgtcgcagatgctggagaactgggtgtgggagcaggagccgctgctgcggatgtcgcggcactaccgcacaggcagcgccgtgccccgggagctcctggagaagctcattgagtcccggcaggccaacacaggcctcttcaacctgcgccagatcgtcctcgccaaggtggaccaggccctgcacacgcagacggacgcagaccccgccgaggagtatgcgcggctctgccaggagatcctcggggtcccggccacgccaggaaccaacatgcctgcaaccttcggccatctggcaggtggctacgacgcccagtactacgggtacctgtggagcgaggtgtattccatggacatgttccacacgcgcttcaagcaggagggtgtcctgaacagcaaggttggcatggattacagaagctgcatcctgagacccggcggttccgaggatgccagcgccatgctgaggcgcttcctgggccgtgaccccaagcaggacgccttcctcctgagcaaggggctgcaggtcgggggctgcgagcccgagccgcaggtctgctgaggcctggcactgcgactgcccagtctggcctgcgctcccgccgccctggtgccttagcccccggcacaggatggggcaggctctggcacagtgcctgggactggcagggtggctgagcggctgtcttgcctcttgtcattgtctgtccccacccggtcgtggcccacccggctagagacggcgtcctcaaggcatctggagggctttcgtggctgccagggcctggtctttgttgcactaacacgtctcctctctgggaaacgtcccttgtcaggagacggctcttctttgaaatgaggtcattaaaaggaaacagaaaaaga

SEQ ID NO: 441171 - DNA, 1939 bp, Homo sapiens
ggcacgagggccccgggagcgcgggcggcgggccccttggtcctcaggcggccgtggcggcggtggcggcggttgggccgaggcaggcggcctcagtggccgaggtggctggacgcgtagcaggtggaaggagggagggagccgcaggcgcagacccacccgccatgaagccccccgcagcctgtgcaggagacatggcggacgcagcatctccgtgctctgtggtaaacgacctgcggtgggacctgagtgcccagcagatagaggagcgcaccagggagctcatcgagcagaccaagcgcgtgtatgaccaggttggcacccaggagtttgaggacgtgtcctacgagagcacgctcaaggcgctggccgatgtggaggtcacctacacagttcagaggaatatccttgacttcccccagcatgtttccccctccaaggacatccggacagccagcacagaggccgacaagaagctctctgagttcgacgtggagatgagcatgagggaggacgtgtaccagaggatcgtgtggctccaggagaaagttcagaaggactcactgaggcccgaggctgcgcggtacctggagcggctaatcaagctgggccggagaaatgggcttcacctccccagagagactcaggaaaacatcaaacgcatcaagaagaagctgagccttctgtgcatcgacttcaacaagaacctgaacgaggacacgaccttcctgcccttcacgctccaggagctaggagggctccccgaggactttctgaactccctggagaagatggaggacggcaagttgaaggtcaccctcaagtacccccattacttccccctcctgaagaaatgccacgtgcctgagaccaggaggaaagtggaggaggccttcaactgccggtgcaaggaggagaactgcgctatcctcaaggagctggtgacgctgcgggcccagaagtcccgcctgctggggttccacacgcacgccgactatgtcctggagatgaacatggccaagaccagccagaccgtggccaccttcctagatgagctggcgcagaagctgaagcccctgggggagcaggagcgtgcggtgattctggagctgaagcgtgcggagtgcgagcgccggggcctgcccttcgacggccgcatccgtgcctgggacatgcgctactacatgaaccaggtggaggagacgcgctactgcgtggaccagaacctgctcaaggagtacttccccgtgcaggtggtcacgcacgggctgctgggcatctaccaggagctcctggggctggccttccaccacgaggagggcgccagtgcctggcatgaggacgtgcggctctacaccgcgagggacgcggcctcgggggaggtggtcggcaagttctacctggacctgtacccgcgggaaggaaagtacgggcacgcggcctgctttggcctgcagcccggctgcctgcggcaggatgggagccgccagatcgccatcgcggccatggtggccaacttcaccaagcccacagccgacgcgccctcgctgctgcagcatgacgaggtggagacctacttccatgagtttggccacgtgatgcaccagctctgctcccaggcggagttcgccatgttcagcgggacccacgtggagcgggactttgtggaggcgccgtcgcagatgctggagaactgggtgtgggagcaggagccgctgctgcggatgtcgcggcactaccgcacaggcagcgccgtgccccgggagctcctggagaagctcattgagtcccggcaggccaacacaggcctcttcaacctgcgccagatcgtcctcggcctggtctttgttgcactaacacgtctcctctctgggaaacgtcccttgtcaggagacggctcttctttgaaatgaggtcattaaaaggaaacagaaaaaga

SEQ ID NO: 441172 - DNA, 2116 bp, Homo sapiens
ggcacgagggccccgggagcgcgggcggcgggccccttggtcctcaggcggccgtggcggcggtggcggcggttgggccgaggcaggcggcctcagtggccgaggtggctggacgcgtagcaggtggaaggagggagggagccgcaggcgcagacccacccgccatgaagccccccgcagcctgtgcaggagacatggcggacgcagcatctccgtgctctgtggtaaacgacctgcggtgggacctgagtgcccagcagatagaggagcgcaccagggagctcatcgagcagaccaagcgcgtgtatgaccaggttggcacccaggagtttgaggacgtgtcctacgagagcacgctcaaggcgctggccgatgtggaggtcacctacacagttcagaggaatatccttgacttcccccagcatgtttccccctccaaggacatccggacagccagcacagaggccgacaagaagctctctgagttcgacgtggagatgagcatgagggaggacgtgtaccagaggatcgtgtggctccaggagaaagttcagaaggactcactgaggcccgaggctgcgcggtacctggagcggctaatcaagctgggccggagaaatgggcttcacctccccagagagactcaggaacgtgcggtgattctggagctgaagcgtgcggagtgcgagcgccggggcctgcccttcgacggccgcatccgtgcctgggacatgcgctactacatgaaccaggtggaggagacgcgctactgcgtggaccagaacctgctcaaggagtacttccccgtgcaggtggtcacgcacgggctgctgggcatctaccaggagctcctggggctggccttccaccacgaggagggcgccagtgcctggcatgaggacgtgcggctctacaccgcgagggacgcggcctcgggggaggtggtcggcaagttctacctggacctgtacccgcgggaaggaaagtacgggcacgcggcctgctttggcctgcagcccggctgcctgcggcaggatgggagccgccagatcgccatcgcggccatggtggccaacttcaccaagcccacagccgacgcgccctcgctgctgcagcatgacgaggtggagacctacttccatgagtttggccacgtgatgcaccagctctgctcccaggcggagttcgccatgttcagcgggacccacgtggagcgggactttgtggaggcgccgtcgcagatgctggagaactgggtgtgggagcaggagccgctgctgcggatgtcgcggcactaccgcacaggcagcgccgtgccccgggagctcctggagaagctcattgagtcccggcaggccaacacaggcctcttcaacctgcgccagatcgtcctcgccaaggtggaccaggccctgcacacgcagacggacgcagaccccgccgaggagtatgcgcggctctgccaggagatcctcggggtcccggccacgccaggaaccaacatgcctgcaaccttcggccatctggcaggtggctacgacgcccagtactacgggtacctgtggagcgaggtgtattccatggacatgttccacacgcgcttcaagcaggagggtgtcctgaacagcaaggttggcatggattacagaagctgcatcctgagacccggcggttccgaggatgccagcgccatgctgaggcgcttcctgggccgtgaccccaagcaggacgccttcctcctgagcaaggggctgcaggtcgggggctgcgagcccgagccgcaggtctgctgaggcctggcactgcgactgcccagtctggcctgcgctcccgccgccctggtgccttagcccccggcacaggatggggcaggctctggcacagtgcctgggactggcagggtggctgagcggctgtcttgcctcttgtcattgtctgtccccacccggtcgtggcccacccggctagagacggcgtcctcaaggcatctggagggctttcgtggctgccagggcctggtctttgttgcactaacacgtctcctctctgggaaacgtcccttgtcaggagacggctcttctttgaaatgaggtcattaaaaggaaacagaaaaaga

SEQ ID NO: 441173 - DNA, 319 bp, Homo sapiens
caagagccctggacctcactcttctggatgagaagcgggtgatcccttcctttccctctgccctcctgactttgaccctaactgaaccgaaagcagacccgcccggcactgggttttgtttctgcgtagcctgtgcaggagacatggcggacgcagcatctccgtgctctgtggtaaacgacctgcggtgggacctgagtgcccagcagatagaggagcgcaccagggagctcatcgagcagaccaagcgcgtgtatgaccaggttggcacccaggagtttgaggacgtgtcctacgagagcacgctcaaggcgctggc

SEQ ID NO: 441174 - DNA, 897 bp, Homo sapiens
cctcccaaaatttcccccatctgcctctggccccccaaccggatcattctttccacccttgcctccctggggtccccgtgagctcccgatcattctttccacccctactgccctggggtcggggtgagctcccaatcattctttccaccctgaccgccctggggtcggcgtgagctcccgatcgttctttctacccctactgctctggggtccgtgtgagctccggatcattctttccaccctgactcccctggggtcggagtgagctcccgatcattctttccactctgaccgccctggggttgaggtgaaccagtctttgcattgaagctgcaagcctgaggcacggtggccctggcgtctcccgagccatgaggtaggaaccccagagggtttcagtccgggatgctgccgcccccacttctcttgaggctgtcgggcaggggccaggtgggagggtgtggctgccgggcagcggggtgaactgtgtcctgccaggggttttgtgggtggagaagggacagcagggctccagtgagaagctctgggagtaggaattgggtctctctggagggacacacttgaaagtggttgagccgtggggctgcgtgctgagatctcagctctgagcgggaggctctgcctgggggtggttcttcaggaaaagcaaagcaggacctccctctccacgtggggcctccctctccgcccagggcccagcgtgctcagctctcctgctgtttttgtctttgatgggaggcactgcctctaacgctggtttccttgtgcagtggccgggccacccttcccgccacctcctcccttcacacatgaggttggtgccggcgccctggaagcccacgatgtccgggggttgggctggatttagctttaacc

SEQ ID NO: 441175 - DNA, 807 bp, Homo sapiens
ggcacgagggccccgggagcgcgggcggcgggccccttggtcctcaggcggccgtggcggcggtggcggcggttgggccgaggcaggcggcctcagtggccgaggtggctggacgcgtagcaggtggaaggagggagggagccgcaggcgcagacccacccgccatgaagccccccgcagcctgtgcaggagacatggcggacgcagcatctccgtgctctgtggtaaacgacctgcggtgggacctgagtgcccagcagatagaggagcgcaccagggagctcatcgagcagaccaagcgcgtgtatgaccaggttggcacccaggagtttgaggacgtgtcctacgagagcacgctcaaggcgctggccgatgtggaggtcacctacacagttcagaggaatatccttgacttcccccagcatgtttccccctccaaggacatccggacagccagcacagaggccgacaagaagctctctgagttcgacgtggagatgagcatgagggaggacgtgtaccagaggatcgtgtggctccaggagaaagttcagaaggactcactgaggcccgaggctgcgcggtacctggagcggctaatcaagctgggccggagaaatgggcttcacctccccagagagactcaggaaaacatcaaacgcatcaagaagaagctgagccttctgtgcatcgacttcaacaagaacctgaacgaggacacgaccttcctgcccttcacgctccaggagctagtggccgggccacccttcccgccacctcctcccttcacacatgaggttggtgccg

SEQ ID NO: 441176 - DNA, 2991 bp, Homo sapiens
ggcacgagggccccgggagcgcgggcggcgggccccttggtcctcaggcggccgtggcggcggtggcggcggttgggccgaggcaggcggcctcagtggccgaggtggctggacgcgtagcaggtggaaggagggagggagccgcaggcgcagacccacccgccatgaagccccccgcagcctgtgcaggagacatggcggacgcagcatctccgtgctctgtggtaaacgacctgcggtgggacctgagtgcccagcagatagaggagcgcaccagggagctcatcgagcagaccaagcgcgtgtatgaccaggttggcacccaggagtttgaggacgtgtcctacgagagcacgctcaaggcgctggccgatgtggaggtcacctacacagttcagaggaatatccttgacttcccccagcatgtttccccctccaaggacatccggacagccagcacagaggccgacaagaagctctctgagttcgacgtggagatgagcatgagggaggacgtgtaccagaggatcgtgtggctccaggagaaagttcagaaggactcactgaggcccgaggctgcgcggtacctggagcggctaatcaagctgggccggagaaatgggcttcacctccccagagagactcaggaaaacatcaaacgcatcaagaagaagctgagccttctgtgcatcgacttcaacaagaacctgaacgaggacacgaccttcctgcccttcacgctccaggagctaggagggctccccgaggactttctgaactccctggagaagatggaggacggcaagttgaaggtcaccctcaagtacccccattacttccccctcctgaagaaatgccacgtgcctgagaccaggaggaaagtggaggaggccttcaactgccggtgcaaggaggagaactgcgctatcctcaaggagctggtgacgctgcgggcccagaagtcccgcctgctggggttccacacgcacgccgactatgtcctggagatgaacatggccaagaccagccagaccgtggccaccttcctagatgagctggcgcagaagctgaagcccctgggggagcaggagcgtgcggtgattctggagctgaagcgtgcggagtgcgagcgccggggcctgcccttcgacggccgcatccgtgcctgggacatgcgctactacatgaaccaggtggaggagacgcgctactgcgtggaccagaacctgctcaaggagtacttccccgtgcaggtggtcacgcacgggctgctgggcatctaccaggagctcctggggctggccttccaccacgaggagggcgccagtgcctggcatgaggacgtgcggctctacaccgcgagggacgcggcctcgggggaggtggtcggcaagttctacctggacctgtacccgcggtgggtgagggcagcgggggcggggggcgcaccccggccctgggtctcctcggagcccggtgtgcccgtctgagatgggaaggaagtcgttgcctgctccatggggcctcggggatgaaccccgagacgtagcacccgtgggcacaccacaggggccgaaaatgcagctgtccccgtttccagtctcactcagccaccccgacagggcgcagctctgcccaggccggagtcctttaggggagggatggcagccggggcctggccgtggttttcatgctgccctgcgccaagccacctctgctgagagggaggtttagaacctcagaggtgcccggcggtctgggttagcagtcaggtgggctgagggatgcggagtcagggactcttgcggtgtctctagtccctgcggggcctgacgctgcctccctccccagggaaggaaagtacgggcacgcggcctgctttggcctgcagcccggctgcctgcggcaggatgggagccgccagatcgccatcgcggccatggtggccaacttcaccaagcccacagccgacgcgccctcgctgctgcagcatgacgaggtggagacctacttccatgagtttggccacgtgatgcaccagctctgctcccaggcggagttcgccatgttcagcgggacccacgtggagcgggactttgtggaggcgccgtcgcagatgctggagaactgggtgtgggagcaggagccgctgctgcggatgtcgcggcactaccgcacaggcagcgccgtgccccgggagctcctggagaagctcattgagtcccggcaggccaacacaggcctcttcaacctgcgccagatcgtcctcgccaaggtggaccaggccctgcacacgcagacggacgcagaccccgccgaggagtatgcgcggctctgccaggagatcctcggggtcccggccacgccaggaaccaacatgcctgcaaccttcggccatctggcaggtggctacgacgcccagtactacgggtacctgtggagcgaggtgtattccatggacatgttccacacgcgcttcaagcaggagggtgtcctgaacagcaaggttggcatggattacagaagctgcatcctgagacccggcggttccgaggatgccagcgccatgctgaggcgcttcctgggccgtgaccccaagcaggacgccttcctcctgagcaaggggctgcaggtcgggggctgcgagcccgagccgcaggtctgctgaggcctggcactgcgactgcccagtctggcctgcgctcccgccgccctggtgccttagcccccggcacaggatggggcaggctctggcacagtgcctgggactggcagggtggctgagcggctgtcttgcctcttgtcattgtctgtccccacccggtcgtggcccacccggctagagacggcgtcctcaaggcatctggagggctttcgtggctgccagggcctggtctttgttgcactaacacgtctcctctctgggaaacgtcccttgtcaggagacggctcttctttgaaatgaggtcattaaaaggaaacagaaaaaga

SEQ ID NO: 441177 - DNA, 2611 bp, Homo sapiens
ggcacgagggccccgggagcgcgggcggcgggccccttggtcctcaggcggccgtggcggcggtggcggcggttgggccgaggcaggcggcctcagtggccgaggtggctggacgcgtagcaggtggaaggagggagggagccgcaggcgcagacccacccgccatgaagccccccgcagcctgtgcaggagacatggcggacgcagcatctccgtgctctgtggtaaacgacctgcggtgggacctgagtgcccagcagatagaggagcgcaccagggagctcatcgagcagaccaagcgcgtgtatgaccaggttggcacccaggagtttgaggacgtgtcctacgagagcacgctcaaggcgctggccgatgtggaggtcacctacacagttcagaggaatatccttgacttcccccagcatgtttccccctccaaggacatccggacagccagcacagaggccgacaagaagctctctgagttcgacgtggagatgagcatgagggaggacgtgtaccagaggatcgtgtggctccaggagaaagttcagaaggactcactgaggcccgaggctgcgcggtacctggagcggctaatcaagctgggccggagaaatgggcttcacctccccagagagactcaggaaaacatcaaacgcatcaagaagaagctgagccttctgtgcatcgacttcaacaagaacctgaacgaggacacgaccttcctgcccttcacgctccaggagctaggagggctccccgaggactttctgaactccctggagaagatggaggacggcaagttgaaggtcaccctcaagtacccccattacttccccctcctgaagaaatgccacgtgcctgagaccaggaggaaagtggaggaggccttcaactgccggtgcaaggaggagaactgcgctatcctcaaggagctggtgacgctgcgggcccagaagtcccgcctgctggggttccacacgcacgccgactatgtcctggagatgaacatggccaagaccagccagaccgtggccaccttcctagatgagctggcgcagaagctgaagcccctgggggagcaggagcgtgcggtgattctggagctgaagcgtgcggagtgcgagcgccggggcctgcccttcgacggccgcatccgtgcctgggacatgcgctactacatgaaccaggtggaggagacgcgctactgcgtggaccagaacctgctcaaggagtacttccccgtgcaggtggtcacgcacgggctgctgggcatctaccaggagctcctggggctggccttccaccacgaggagggcgccagtgcctggcatgaggacgtgcggctctacaccgcgagggacgcggcctcgggggaggtggtcggcaagttctacctggacctgtacccgcgggaaggaaagtacgggcacgcggcctgctttggcctgcagcccggctgcctgcggcaggatgggagccgccagatcgccatcgcggccatggtggccaacttcaccaagcccacagccgacgcgccctcgctgctgcagcatgacgaggtggagacctacttccatgagtttggccacgtgatgcaccagctctgctcccaggcggagttcgccatgttcagcgggacccacgtggagcgggactttgtggaggcgccgtcgcagatgctggagaactgggtgtgggagcaggagccgctgctgcggatgtcgcggcactaccgcacaggcagcgccgtgccccgggagctcctggagaagctcattgagtcccggcaggccaacacaggcctcttcaacctgcgccagatcgtcctcgccaaggtggaccaggccctgcacacgcagacggacgcagaccccgccgaggagtatgcgcggctctgccaggagatcctcggggtcccggccacgccaggaaccaacatgcctgcaaccttcggccatctggcaggtggctacgacgcccagtactacgggtacctgtggagcgaggtgtattccatggacatgttccacacgcgcttcaagcaggagggtgtcctgaacagcaaggttggcatggattacagaagctgcatcctgagacccggcggttccgaggatgccagcgccatgctgaggcgcttcctgggccgtgaccccaagcaggacgccttcctcctgagcaaggggctgcaggtcgggggctgcgagcccgagccgcaggtctgctgaggcctggcactgcgactgcccagtctggcctgcgctcccgccgccctggtgccttagcccccggcacaggatggggcaggctctggcacagtgcctgggactggcagggtggctgagcggctgtcttgcctcttgtcattgtctgtccccacccggtcgtggcccacccggctagagacggcgtcctcaaggcatctggagggctttcgtggctgccagggcctggtctttgttgcactaacacgtctcctctctgggaaacgtcccttgtcaggagacggctcttctttgaaatgaggtcattaaaaggaaacagaaaaagacgcaccaccacacctgatccacaccgcgaaacacacatggcctagcacaccaga

SEQ ID NO: 441178 - DNA, 2276 bp, Homo sapiens
ggcacgagggccccgggagcgcgggcggcgggccccttggtcctcaggcggccgtggcggcggtggcggcggttgggccgaggcaggcggcctcagtggccgaggtggctggacgcgtagcaggtggaaggagggagggagccgcaggcgcagacccacccgccatgaagccccccgcagcctgtgcaggagacatggcggacgcagcatctccgtgctctgtggtaaacgacctgcggtgggacctgagtgcccagcagatagaggagcgcaccagggagctcatcgagcagaccaagcgcgtgtatgaccaggttggcacccaggagtttgaggacgtgtcctacgagagcacgctcaaggcgctggccgatgtggaggtcacctacacagttcagaggaatatccttgacttcccccagcatgtttccccctccaaggacatccggacagccagcacagaggccgacaagaagctctctgagttcgacgtggagatgagcatgagggaggacgtgtaccagaggatcgtgtggctccaggagaaagttcagaaggactcactgaggcccgaggctgcgcggtacctggagcggctaatcaagctgggccggagaaatgggcttcacctccccagagagactcaggaaaacatcaaacgcatcaagaagaagctgagccttctgtgcatcgacttcaacaagaacctgaacgaggacacgaccttcctgcccttcacgctccaggagctaggagggctccccgaggactttctgaactccctggagaagatggaggacggcaagttgaaggtcaccctcaagtacccccattacttccccctcctgaagaaatgccacgtgcctgagaccaggaggaaagtggaggaggccttcaactgccggtgcaaggaggagaactgcgctatcctcaaggagctggtgacgctgcgggcccagaagtcccgcctgctggggttccacacgcacgccgactatgtcctggagatgaacatggccaagaccagccagaccgtggccaccttcctagatgagctggcgcagaagctgaagcccctgggggagcaggagcgtgcggtgattctggagctgaagcgtgcggagtgcgagcgccggggcctgcccttcgacggccgcatccgtgcctgggacatgcgctactacatgaaccaggtggaggagacgcgctactgcgtggaccagaacctgctcaaggagtacttccccgtgcaggtggtcacgcacgggctgctgggcatctaccaggagctcctggggctggccttccaccacgaggagggcgccagtgcctggcatgaggacgtgcggctctacaccgcgagggacgcggcctcgggggaggtggtcggcaagttctacctggacctgtacccgcgggaaggaaagtacgggcacgcggcctgctttggcctgcagcccggctgcctgcggcaggatgggagccgccagatcgccatcgcggccatggtggccaacttcaccaagcccacagccgacgcgccctcgctgctgcagcatgacgaggtggagacctacttccatgagtttggccacgtgatgcaccagctctgctcccaggcggagttcgccatgttcagcgggacccacgtggagcgggactttgtggaggcgccgtcgcagatgctggagaactgggtgtgggagcaggagccgctgctgcggatgtcgcggcactaccgcacaggcagcgccgtgccccgggagctcctggagaagctcattgagtcccggcaggccaacacaggcctcttcaacctgcgccagatcgtcctcgccaaggtggaccaggccctgcacacgcagacggacgcagaccccgccgaggagtatgcgcggctctgccaggagatcctcggggtcccggccacgccaggaaccaacatgcctgcaaccttcggccatctggcaggtggctacgacgcccagtactacgggtacctgtggagcgaggtgtattccatggacatgttccacacgcgcttcaagcaggagggtgtcctgaacagcaaggaagctccacactggcccctcaggcctcgggctgtgagtgctgggagctccgtgtcttcccatacgagtccttccgggatctgcgtgatcggctcagagccatgggctgagacagacccttctctggagaaggcttgggtttgccattcatttgctcctcaacctccagtttcctcactatgaagtgcggccgttacgccatgt

SEQ ID NO: 441179 - DNA, 1876 bp, Homo sapiens
  misc_feature (9)..(10): n is a, c, g, or t
  misc_feature (44)..(44): n is a, c, g, or t
  misc_feature (46)..(46): n is a, c, g, or t
  misc_feature (54)..(54): n is a, c, g, or t
  misc_feature (56)..(57): n is a, c, g, or t
ccgagtaanngggatatcgtcggaccgcccgctcggacacgacntncctgcccntnncgctccaggagctaggagggctccccgaggactttctgaactccctggagaagatggaggacggcaagttgaaggtcaccctcaagtacccccattacttccccctcctgaagaaatgccacgtgcctgagaccaggaggaaagtggaggaggccttcaactgccggtgcaaggaggagaactgcgctatcctcaaggagctggtgacgctgcgggcccagaagtcccgcctgctggggttccacacgcacgccgactatgtcctggagatgaacatggccaagaccagccagaccgtggccaccttcctagatgagctggcgcagaagctgaagcccctgggggagcaggagcgtgcggtgattctggagctgaagcgtgcggagtgcgagcgccggggcctgcccttcgacggccgcatccgtgcctgggacatgcgctactacatgaaccaggtggaggagacgcgctactgcgtggaccagaacctgctcaaggagtacttccccgtgcaggtggtcacgcacgggctgctgggcatctaccaggagctcctggggctggccttccaccacgaggagggcgccagtgcctggcatgaggacgtgcggctctacaccgcgagggacgcggcctcgggggaggtggtcggcaagttctacctggacctgtacccgcgggaaggaaagtacgggcacgcggcctgctttggcctgcagcccggctgcctgcggcaggatgggagccgccagatcgccatcgcggccatggtggccaacttcaccaagcccacagccgacgcgccctcgctgctgcagcatgacgaggtggagacctacttccatgagtttggccacgtgatgcaccagctctgctcccaggcggagttcgccatgttcagcgggacccacgtggagcgggactttgtggaggcgccgtcgcagatgctggagaactgggtgtgggagcaggagccgctgctgcggatgtcgcggcactaccgcacaggcagcgccgtgccccgggagctcctggagaagctcattgagtcccggcaggccaacacaggcctcttcaacctgcgccagatcgtcctcgccaaggtggaccaggccctgcacacgcagacggacgcagaccccgccgaggagtatgcgcggctctgccaggagatcctcggggtcccggccacgccaggaaccaacatgcctgcaaccttcggccatctggcaggtggctacgacgcccagtactacgggtacctgtggagcgaggtgtattccatggacatgttccacacgcgcttcaagcaggagggtgtcctgaacagcaaggttggcatggattacagaagctgcatcctgagacccggcggttccgaggatgccagcgccatgctgaggcgcttcctgggccgtgaccccaagcaggacgccttcctcctgagcaaggggctgcaggtcgggggctgcgagcccgagccgcaggtctgctgaggcctggcactgcgactgcccagtctggcctgcgctcccgccgccctggtgccttagcccccggcacaggatggggcaggctctggcacagtgcctgggactggcagggtggctgagcggctgtcttgcctcttgtcattgtctgtccccacccggtcgtggcccacccggctagagacggcgtcctcaaggcatctggagggctttcgtggctgccagggcctggtctttgttgcactaacacgtctcctctctgggaaacgtcccttgtcaggagacggctcttctttgaaatgaggtcattaaaaggaaacagaaaaaga

SEQ ID NO: 441180 - DNA, 685 bp, Homo sapiens
tgcacacccccgctctgagattctgatgaaaggcacctgcgctctcccacctgtgctgatgcaggcggcccccgggcctccctgggaacctggaaggggttgctccgaggcccccctgggcgagggtgtgcagactcctggggtcctctgccttcctccctgggtccccacccggccacagtgccctgtctcctcggcaggttggcatggattacagaagctgcatcctgagacccggcggttccgaggatgccagcgccatgctgaggcgcttcctgggccgtgaccccaagcaggacgccttcctcctgagcaaggggctgcaggtcgggggctgcgagcccgagccgcaggtctgctgaggcctggcactgcgactgcccagtctggcctgcgctcccgccgccctggtgccttagcccccggcacaggatggggcaggctctggcacagtgcctgggactggcagggtggctgagcggctgtcttgcctcttgtcattgtctgtccccacccggtcgtggcccacccggctagagacggcgtcctcaaggcatctggagggctttcgtggctgccagggcctggtctttgttgcactaacacgtctcctctctgggaaacgtcccttgtcaggagacggctcttctttgaaatgaggtcattaaaaggaaacagaaaaaga

SEQ ID NO: 441181 - DNA, 1416 bp, Homo sapiens
agcggaggggaggggcgcggccgccggacgcgccctcgcagcttccgccgggcccctccggaaatcccgtatcgtagggcgacggcggcttagaaagtgcttcctggagcgcagacgaggtcatgaatcatgtgacggtggcttgaggaggaacctgtctttaaagctgtccctgaagtgacagcggagagaaccaggcagcccagaaaccccaggcgtggagattgatcctgcgagagaagggggttcatcatggcggatgacctaaagcgattcttgtataaaaagttaccaagtgttgaagggctccatgccattgttgtgtcagatagagatggagtacctgttattaaagtggcaaatgacaatgctccagagcatgctttgcgacctggtttcttatccacttttgcccttgcaacagaccaaggaagcaaacttggactttccaaaaataaaagtatcatctgttactataacacctaccaggtggttcaatttaatcgtttacctttggtggtgagtttcatagccagcagcagtgccaatacaggactaattgtcagcctagaaaaggaacttgctccattgtttgaagaactgagacaagttgtggaagtttcttaatctgacagtggtttcagtgtgtaccttatcttcattataacaacacaatatcaatccagcaatctttagactacaataatacttttatccatgtgctcaagaaagggcccctttttccaacttatactaaagagctagcatatagatgtaatttatagatagatcagttgctatattttctggtgtagggtctttcttatttagtgagatctagggataccacagaaatggttcagtctatcacagctcccatggagttagtctggtcaccagatatggatgagagattctattcagtggatcagaatcaaactggtacattgatccacttgagccgttaagtgctgccaattgtacaatatgcccaggcttgcagaataaagccaactttttattgtgaataataataaggacatatttttcttcagattatgttttatttctttgcattgagtgaggaacataaaatggcttggtaaaagtaataaaatcagtacaatcactaactttcctttgtacatattattttgcagtatagatgaatattactaatcagtttgattattctcagagggtgctgctctttaatgaaaatgaaaattatagctaatgttttttcctcaaactctgctttctgtaaccaatcagtgttttaatgtttgtgtgttcttcataaaatttaaatacaattcgttattctgtttccaatgttagtatgtatgtaaacatgatagtacagccatttttttcatatgtgagtaaaaataaaatagtatttttaaaaatata

SEQ ID NO: 441182 - DNA, 4288 bp, Homo sapiens
agcggaggggaggggcgcggccgccggacgcgccctcgcagcttccgccgggcccctccggaaatcccgtatcgtagggcgacggcggcttagaaagtgcttcctggagcgcagacgaggtcatgaatcatgtgacggtggcttgaggaggaacctgtctttaaagctgtccctgaagtgacagcggagagaaccaggcagcccagaaaccccaggcgtggagattgatcctgcgagagaagggggttcatcatggcggatgacctaaagcgattcttgtataaaaagttaccaagtgttgaagggctccatgccattgttgtgtcagatagagatggagtacctgttattaaagtggcaaatgacaatgctccagagcatgctttgcgacctggtttcttatccacttttgcccttgcaacagaccaaggaagcaaacttggactttccaaaaataaaagtatcatctgttactataacacctaccaggtggttcaatttaatcgtttacctttggtggtgagtttcatagccagcagcagtgccaatacaggactaattgtcagcctagaaaaggaacttgctccattgtttgaagaactgagacaagttgtggaagtttcttaatctgacagtggtttcagtgtgtaccttatcttcattataacaacacaatatcaatccagcaatctttagactacaataatacttttatccatgtgctcaagaaagggcccctttttccaacttatactaaagagctagcatatagatgtaatttatagatagatcagttgctatattttctggtgtagggtctttcttatttagtgagatctagggataccacagaaatggttcagtctatcacagctcccatggagttagtctggtcaccagatatggatgagagattctattcagtggatcagaatcaaactggtacattgatccacttgagccgttaagtgctgccaattgtacaatatgcccaggcttgcagaataaagccaactttttattgtgaataataataaggacatatttttcttcagattatgttttatttctttgcattgagtgaggaacataaaatggcttggtaaaagtaataaaatcagtacaatcactaactttcctttgtacatattattttgcagtatagatgaatattactaatcagtttgattattctcagagggtgctgctctttaatgaaaatgaaaattatagctaatgttttttcctcaaactctgctttctgtaaccaatcagtgttttaatgtttgtgtgttcttcataaaatttaaatacaattcgttattctgtttccaatgttagtatgtatgtaaacatgatagtacagccatttttttcatatgtgagtaaaaataaaatagtatttttaaaaatatagtttgagcactgtataggtcctttttttgttcagactttttccaaaaatctaaacataattaatatactctttcagccacatgaataaataatgagtgtttcttgtaggtattggtttggagattgttttacggtaatatgtactgttaactggaaaagaaacctgagattgcagtcagccaagattgtgccactgcaccccagcctgggcaacagagactccgtctcaaaaacaaaaaagaaaagaaaccaagaaacctcaggcatgaacctaatttaatctccatgaaagaggtactacagttctagaatataccctttatgttcaggaatgcagtctatcattcagagttaatttctttctaggctctttgacaatcagtttttccctggatcagttcagtacatatgcattgagcacctgtgtgccagtcagccgagctatcacattgcacaattctaagaagcaccattcatgtctcatcatatttctatgctctgggagttgcctttcacatagaatatgtgtgattgttatccctagaattgtgcagtgaggcaattggctaggtgctgtgctgctttttctttctttcttttttttttaagagacggagtcttgctgtgttgcccagtctggagtgcagtggtggcatgatcttgcctcactgtaacctctgcctcctgggttcaagctgttctcatgccccattctcccttgtagctgggattacaggcttacaccatcgcacttggcaaatttgtgtatttttagtagagacaggaattcaccatgttggccaggctggtcttgaactcctgacttaaagtgatccacctgctttggcctcccaaaatgctaggattataggtgtgagccactgcaccgggccatgtgctactttttcttccttccatccttcctcccttcttcagtgtaaatatgagattaatttgtgataccttactttaaagaacttagagttcagtaaaggaagcaggtatagaaagtgctatgataaagctatacataggatggtatagaaccacagactaggggcacttaaaatgggcaagaaaatagcctttgtaaataaaatagaggcaagagatataatgctttacctgcaaagagctataaatacagccatgtaccatataatgatgtttcagttagtgaaggaccacatacgagggtggtcagaacagcaggctataccatatagcctaggtgtgtagtaggctataccatatagcctaggtgtgtagtagtaggctataccatatagcctaggtgtgtagtagtaggcgataccatatagcctaggtgtgtagtagtaggctataccatatagcctaggtgtatagtagtaggctataccatatagcctaggtgtgtagtaggctataccatatagcctaggtatgtagtagtaggctataccatatagcctaggtgtgtagtagtaggctataccatctggggttcctgtcagtacagtatgatgttcacataatgatgaaatcacctaacaaagcatgtctcgaaatgtatccacattgttacgtaacacatgactgtagttaattgttacaattgaaatactagatgtactcattgaaatccagaattcccattatctggattatttaatatcgttcaggaaatttttgccagtgcaatggtgcatgaaacaatgtcttttagaaatgaggtggccagatttctatttgcagataataattgtatatctaaaaatcctagaaaaagaaatgataacaaatggagctacttaacctttacatgttgaatgctgccactgttaaaatttctgagggggtataatagataaactatcccatagttcatctggaaaaataaggtggtgaaaattgctaagaaatttttgaaagggtaatgtaaacctagattaactgtttttgaaaggtagtacagaactgaatgcacaactagatatcaatggtatgtactcacccagaaaaaagacttcagtacatacatgtgagggcttaaaacattgttataaagacgggatcacaatgggaaaaggattattcaataagtagggcaggcattctctatgcctgctagggaagtgtgacttgttatactctttatgtacagcaattggcagtctgtgaaacttttaaattcatatacataaccttttgccctgcaattccacttctagaaatttatcctaccaaacaaagcacatagatgtgcaaaagtatgtatttacaagtatattctttgcaacttggtaatgtcaaagaattggaagcaacctaaatatctgccataggtaggataaccatatgctttggctttttgaacactaccagtttatacctgctgttcttggataattattaatagtgctttcattctcaatgtctcactttagataataaattacagaggattggtgaaactaatttgcccaatggaaaaaggaatgaagaagtgctttaggtactgagatgaaaagatctctaaggcataataatgtttattgagaaaagcatggtgtcaaactgtatggcatgctacaattgatgtataagaagaaaaaatgtgtatgtattcctatttgtttgtatatggtagactgtctctgaagacatatatggaagaacctgatcacattggtagtctccaaggagcagaactagatacctgggggataaggatcccaggagtgagccttttcattgtaaacttcattgtactttgagtttttaactgttcaaaaataataaaattagaaataaaatatttcaacaaacaataaaatgggatatttggggaagaaagttgtctcagggctctccaaagaagcagaaccgg

SEQ ID NO: 441183 - DNA, 2078 bp, Homo sapiens
  misc_feature (2078)..(2078): n is a, c, g, or t
agcggaggggaggggcgcggccgccggacgcgccctcgcagcttccgccgggcccctccggaaatcccgtatcgtagggcgacggcggcttagaaagtgcttcctggagcgcagacgaggtcatgaatcatgtgacggtggcttgaggaggaacctgtctttaaagctgtccctgaagtgacagcggagagaaccaggcagcccagaaaccccaggcgtggagattgatcctgcgagagaagggggttcatcatggcggatgacctaaagcgattcttgtataaaaagttaccaagtgttgaagggctccatgccattgttgtgtcagatagagatggagtacctgttattaaagtggcaaatgacaatgctccagagcatgctttgcgacctggtttcttatccacttttgcccttgcaacagaccaaggaagcaaacttggactttccaaaaataaaagtatcatctgttactataacacctaccaggtggttcaatttaatcgtttacctttggtggtgagtttcatagccagcagcagtgccaatacaggactaattgtcagcctagaaaaggaacttgctccattgtttgaagaactgagacaagttgtggaagtttcttaatctgacagtggtttcagtgtgtaccttatcttcattataacaacacaatatcaatccagcaatctttagactacaataatacttttatccatgtgctcaagaaagggcccctttttccaacttatactaaagagctagcatatagatgtaatttatagatagatcagttgctatattttctggtgtagggtctttcttatttagtgagatctagggataccacagaaatggttcagtctatcacagctcccatggagttagtctggtcaccagatatggatgagagattctattcagtggatcagaatcaaactggtacattgatccacttgagccgttaagtgctgccaattgtacaatatgcccaggcttgcagaataaagccaactttttattgtgaataataataaggacatatttttcttcagattatgttttatttctttgcattgagtgaggaacataaaatggcttggtaaaagtaataaaatcagtacaatcactaactttcctttgtacatattattttgcagtatagatgaatattactaatcagtttgattattctcagagggtgctgctctttaatgaaaatgaaaattatagctaatgttttttcctcaaactctgctttctgtaaccaatcagtgttttaatgtttgtgtgttcttcataaaatttaaatacaattcgttattctgtttccaatgttagtatgtatgtaaacatgatagtacagccatttttttcatatgtgagtaaaaataaaatagtatttttaaaaatataaaaaaaaaaaaaaaaaaaaaaaacaaaaaaaaaaaaaaaaaaaaaaaaaaaaaaaaaaaaaaaaaaagaggggcgcgcgcgcgcccccacaaaagactaccccagcggggcgcgccacagcccgccgccgccccccacctgtgagaaaaaagcggccgcccccatagaggggcgcataataaacacacacgagccggaccggagggggcgcggcggcgagctataacaaacacacacaccaaagggagcacgaaggggaaacaaacaaaaagaaggcaccgaagggcgaggggagaacaactcacttggaaagagagagagacacccaccaacaaaacatgagtgggggggggagagaagcaacaaacaaaaaatcttggggacacaacacaacaactaacctcagcaccaagaaataatatataaaggagccactcacaagcgagggagaaagataaatataaaacaaaagatcagctagcaggcggtgaaaattagcggggcggtgggccaaaaacaaaaaaggggcgcataatcacgaagcacggcggcggcagaaacaaaaaaacaaacagctggcgccacgacaagcagagaaagacgtatcacatagaacaaaacaccatattatacaaccaagggcgcctaccaatcaaacaggn

SEQ ID NO: 441184 - DNA, 1370 bp, Homo sapiens
agcggaggggaggggcgcggccgccggacgcgccctcgcagcttccgccgggcccctccggaaatcccgtatcgtagggcgacggcggcttagaaagtgcttcctggagcgcagacgaggtcatgaatcatgtgacggtggcttgaggaggaacctgtctttaaagctgtccctgaagtgacagcggagagaaccaggcagcccagaaaccccaggacctaaagcgattcttgtataaaaagttaccaagtgttgaagggctccatgccattgttgtgtcagatagagatggagtacctgttattaaagtggcaaatgacaatgctccagagcatgctttgcgacctggtttcttatccacttttgcccttgcaacagaccaaggaagcaaacttggactttccaaaaataaaagtatcatctgttactataacacctaccaggtggttcaatttaatcgtttacctttggtggtgagtttcatagccagcagcagtgccaatacaggactaattgtcagcctagaaaaggaacttgctccattgtttgaagaactgagacaagttgtggaagtttcttaatctgacagtggtttcagtgtgtaccttatcttcattataacaacacaatatcaatccagcaatctttagactacaataatacttttatccatgtgctcaagaaagggcccctttttccaacttatactaaagagctagcatatagatgtaatttatagatagatcagttgctatattttctggtgtagggtctttcttatttagtgagatctagggataccacagaaatggttcagtctatcacagctcccatggagttagtctggtcaccagatatggatgagagattctattcagtggatcagaatcaaactggtacattgatccacttgagccgttaagtgctgccaattgtacaatatgcccaggcttgcagaataaagccaactttttattgtgaataataataaggacatatttttcttcagattatgttttatttctttgcattgagtgaggaacataaaatggcttggtaaaagtaataaaatcagtacaatcactaactttcctttgtacatattattttgcagtatagatgaatattactaatcagtttgattattctcagagggtgctgctctttaatgaaaatgaaaattatagctaatgttttttcctcaaactctgctttctgtaaccaatcagtgttttaatgtttgtgtgttcttcataaaatttaaatacaattcgttattctgtttccaatgttagtatgtatgtaaacatgatagtacagccatttttttcatatgtgagtaaaaataaaatagtatttttaaaaatata

SEQ ID NO: 441185 - DNA, 1188 bp, Homo sapiens
ggcttcttttccgacaaaacaccaaatggcggatgacctaaagcgattctgtataaaaagttaccaagtgttgaagggctccatgccattgttgtgtcagatagagatggagtacctgttattaaagtggcaaatgacaatgctccagagcatgctttgcgacctggtttcttatccacttttgcccttgcaacagaccaaggaagcaaacttggactttccaaaaataaaagtatcatctgttactataacacctaccaggtggttcaatttaatcgtttacctttggtggtgagtttcatagccagcagcagtgccaatacaggactaattgtcagcctagaaaaggaacttgctccattgtttgaagaactgagacaagttgtggaagtttcttaatctgacagtggtttcagtgtgtaccttatcttcattataacaacacaatatcaatccagcaatctttagactacaataatacttttatccatgtgctcaagaaagggcccctttttccaacttatactaaagagctagcatatagatgtaatttatagatagatcagttgctatattttctggtgtagggtctttcttatttagtgagatctagggataccacagaaatggttcagtctatcacagctcccatggagttagtctggtcaccagatatggatgagagattctattcagtggatcagaatcaaactggtacattgatccacttgagccgttaagtgctgccaattgtacaatatgcccaggcttgcagaataaagccaactttttattgtgaataataataaggacatatttttcttcagattatgttttatttctttgcattgagtgaggaacataaaatggcttggtaaaagtaataaaatcagtacaatcactaactttcctttgtacatattattttgcagtatagatgaatattactaatcagtttgattattctcagagggtgctgctctttaatgaaaatgaaaattatagctaatgttttttcctcaaactctgctttctgtaaccaatcagtgttttaatgtttgtgtgttcttcataaaatttaaatacaattcgttattctgtttccaatgttagtatgtatgtaaacatgatagtacagccatttttttcatatgtgagtaaaaataaaatagtatttttaaaaatata

SEQ ID NO: 441186 - DNA, 4267 bp, Homo sapiens
agcggaggggaggggcgcggccgccggacgcgccctcgcagcttccgccgggcccctccggaaatcccgtatcgtagggcgacggcggcttagaaagtgcttcctggagcgcagacgaggtcatgaatcatgtgacggtggcttgaggaggaacctgtctttaaagctgtccctgaagtgacagcggagagaaccaggcagcccagaaaccccaggcgtggagattgatcctgcgagagaagggggttcatcatggcggatgacctaaagcgattcttgtataaaaagttaccaagtgttgaagggctccatgccattgttgtgtcagatagagatggagtacctgttattaaagagcatgctttgcgacctggtttcttatccacttttgcccttgcaacagaccaaggaagcaaacttggactttccaaaaataaaagtatcatctgttactataacacctaccaggtggttcaatttaatcgtttacctttggtggtgagtttcatagccagcagcagtgccaatacaggactaattgtcagcctagaaaaggaacttgctccattgtttgaagaactgagacaagttgtggaagtttcttaatctgacagtggtttcagtgtgtaccttatcttcattataacaacacaatatcaatccagcaatctttagactacaataatacttttatccatgtgctcaagaaagggcccctttttccaacttatactaaagagctagcatatagatgtaatttatagatagatcagttgctatattttctggtgtagggtctttcttatttagtgagatctagggataccacagaaatggttcagtctatcacagctcccatggagttagtctggtcaccagatatggatgagagattctattcagtggatcagaatcaaactggtacattgatccacttgagccgttaagtgctgccaattgtacaatatgcccaggcttgcagaataaagccaactttttattgtgaataataataaggacatatttttcttcagattatgttttatttctttgcattgagtgaggaacataaaatggcttggtaaaagtaataaaatcagtacaatcactaactttcctttgtacatattattttgcagtatagatgaatattactaatcagtttgattattctcagagggtgctgctctttaatgaaaatgaaaattatagctaatgttttttcctcaaactctgctttctgtaaccaatcagtgttttaatgtttgtgtgttcttcataaaatttaaatacaattcgttattctgtttccaatgttagtatgtatgtaaacatgatagtacagccatttttttcatatgtgagtaaaaataaaatagtatttttaaaaatatagtttgagcactgtataggtcctttttttgttcagactttttccaaaaatctaaacataattaatatactctttcagccacatgaataaataatgagtgtttcttgtaggtattggtttggagattgttttacggtaatatgtactgttaactggaaaagaaacctgagattgcagtcagccaagattgtgccactgcaccccagcctgggcaacagagactccgtctcaaaaacaaaaaagaaaagaaaccaagaaacctcaggcatgaacctaatttaatctccatgaaagaggtactacagttctagaatataccctttatgttcaggaatgcagtctatcattcagagttaatttctttctaggctctttgacaatcagtttttccctggatcagttcagtacatatgcattgagcacctgtgtgccagtcagccgagctatcacattgcacaattctaagaagcaccattcatgtctcatcatatttctatgctctgggagttgcctttcacatagaatatgtgtgattgttatccctagaattgtgcagtgaggcaattggctaggtgctgtgctgctttttctttctttcttttttttttaagagacggagtcttgctgtgttgcccagtctggagtgcagtggtggcatgatcttgcctcactgtaacctctgcctcctgggttcaagctgttctcatgccccattctcccttgtagctgggattacaggcttacaccatcgcacttggcaaatttgtgtatttttagtagagacaggaattcaccatgttggccaggctggtcttgaactcctgacttaaagtgatccacctgctttggcctcccaaaatgctaggattataggtgtgagccactgcaccgggccatgtgctactttttcttccttccatccttcctcccttcttcagtgtaaatatgagattaatttgtgataccttactttaaagaacttagagttcagtaaaggaagcaggtatagaaagtgctatgataaagctatacataggatggtatagaaccacagactaggggcacttaaaatgggcaagaaaatagcctttgtaaataaaatagaggcaagagatataatgctttacctgcaaagagctataaatacagccatgtaccatataatgatgtttcagttagtgaaggaccacatacgagggtggtcagaacagcaggctataccatatagcctaggtgtgtagtaggctataccatatagcctaggtgtgtagtagtaggctataccatatagcctaggtgtgtagtagtaggcgataccatatagcctaggtgtgtagtagtaggctataccatatagcctaggtgtatagtagtaggctataccatatagcctaggtgtgtagtaggctataccatatagcctaggtatgtagtagtaggctataccatatagcctaggtgtgtagtagtaggctataccatctggggttcctgtcagtacagtatgatgttcacataatgatgaaatcacctaacaaagcatgtctcgaaatgtatccacattgttacgtaacacatgactgtagttaattgttacaattgaaatactagatgtactcattgaaatccagaattcccattatctggattatttaatatcgttcaggaaatttttgccagtgcaatggtgcatgaaacaatgtcttttagaaatgaggtggccagatttctatttgcagataataattgtatatctaaaaatcctagaaaaagaaatgataacaaatggagctacttaacctttacatgttgaatgctgccactgttaaaatttctgagggggtataatagataaactatcccatagttcatctggaaaaataaggtggtgaaaattgctaagaaatttttgaaagggtaatgtaaacctagattaactgtttttgaaaggtagtacagaactgaatgcacaactagatatcaatggtatgtactcacccagaaaaaagacttcagtacatacatgtgagggcttaaaacattgttataaagacgggatcacaatgggaaaaggattattcaataagtagggcaggcattctctatgcctgctagggaagtgtgacttgttatactctttatgtacagcaattggcagtctgtgaaacttttaaattcatatacataaccttttgccctgcaattccacttctagaaatttatcctaccaaacaaagcacatagatgtgcaaaagtatgtatttacaagtatattctttgcaacttggtaatgtcaaagaattggaagcaacctaaatatctgccataggtaggataaccatatgctttggctttttgaacactaccagtttatacctgctgttcttggataattattaatagtgctttcattctcaatgtctcactttagataataaattacagaggattggtgaaactaatttgcccaatggaaaaaggaatgaagaagtgctttaggtactgagatgaaaagatctctaaggcataataatgtttattgagaaaagcatggtgtcaaactgtatggcatgctacaattgatgtataagaagaaaaaatgtgtatgtattcctatttgtttgtatatggtagactgtctctgaagacatatatggaagaacctgatcacattggtagtctccaaggagcagaactagatacctgggggataaggatcccaggagtgagccttttcattgtaaacttcattgtactttgagtttttaactgttcaaaaataataaaattagaaataaaatatttcaacaaacaataaaatgggatatttggggaagaaagttgtctcagggctctccaaagaagcagaaccgg

SEQ ID NO: 441187 - DNA, 748 bp, Homo sapiens
agcggaggggaggggcgcggccgccggacgcgccctcgcagcttccgccgggcccctccggaaatcccgtatcgtagggcgacggcggcttagaaagtgcttcctggagcgcagacgaggtcatgaatcatgtgacggtggcttgaggaggaacctgtctttaaagctgtccctgaagtgacagcggagagaaccaggcagcccagaaaccccaggcgtggagattgatcctgcgagagaagggggttcatcatggcggatgacctaaagcgattcttgtataaaaagttaccaagtgttgaagggctccatgccattgttgtgtcagatagagatggagtacctgttattaaagtggcaaatgacaatgctccagagcatgctttgcgacctggtttcttatccacttttgcccttgcaacagaccaaggaagcaaacttggactttccaaaaataaaagtatcatctgttactataacacctaccaggtggttcaatttaatcgtttacctttggtggtgagtttcatagccagcagcagtgccaatacaggactaattgtcagcctagaaaaggaacttgctccattgtttgaagaactgagacaagttgtggaagtttcttaatctgacagtggtttcagtgtgtaccttatcttcattataacaacacaatatcaatccagcaatctttagactacaataatacttttatccatgtgctcaagggctccggaggttaaggctc

SEQ ID NO: 441188 - DNA, 964 bp, Homo sapiens
  misc_feature (799)..(799): n is a, c, g, or t
  misc_feature (824)..(824): n is a, c, g, or t
  misc_feature (962)..(962): n is a, c, g, or t
agcggaggggaggggcgcggccgccggacgcgccctcgcagcttccgccgggcccctccggaaatcccgtatcgtagggcgacggcggcttagaaagtgcttcctggagcgcagacgaggtcatgaatcatgtgacggtggcttgaggaggaacctgtctttaaagctgtccctgaagtgacagcggagagaaccaggcagcccagaaaccccaggacctaaagcgattcttgtataaaaagttaccaagtgttgaagggctccatgccattgttgtgtcagatagagatggagtacctgttattaaagtggcaaatgacaatgctccagagcatgctttgcgacctggtttcttatccacttttgcccttgcaacagaccaaggaagcaaacttggactttccaaaaataaaagtatcatctgttactataacacctaccaggtggttcaatttaatcgtttacctttggtggtgagtttcatagccagcagcagtgccaatacaggactaattgtcagcctagaaaaggaacttgctccattgtttgaagaactgagacaagttgtggaagtttcttaatctgacagtggtttcagtgtgtaccttatcttcattataacaacacaatatcaatccagcaatctttagactacaataatacttttatccatgtgctcaaggaggcctttcactatataggcagcttgtgtatatgtgatcgtgcatattatgtgtggtctctattagtagacaggatcacgatgtcgtttcgcccatggtagttgtacgtatgatanggttatcgtgatcgatcaactgtcntgtcactgagcgtagtgctgcatgtcattgccgctgcgatagcacttatgtatatataggctttctcgttttatctgctagtagatatgctgtagtatatcgtctactactcctgtctatattgcgttgagattctancg

SEQ ID NO: 441189 - DNA, 2102 bp, Homo sapiens
agcggaggggaggggcgcggccgccggacgcgccctcgcagcttccgccgggcccctccggaaatcccgtatcgtagggcgacggcggcttagaaagtgcttcctggagcgcagacgaggtcatgaatcatgtgacggtggcttgaggaggaacctgtctttaaagctgtccctgaagtgacagcggagagaaccaggcagcccagaaaccccaggcgtggagattgatcctgcgagagaagggggttcatcatggcggatgacctaaagcgattcttgtataaaaagttaccaagtgttgaagggctccatgccattgttgtgtcagatagagatggagtacctgttattaaagtggcaaatgacaatgctccagagcatgctttgcgacctggtttcttatccacttttgcccttgcaacagaccaaggaagcaaacttggactttccaaaaataaaagtatcatctgttactataacacctaccaggtggttcaatttaatcgtttacctttggtggtgagtttcatagccagcagcagtgccaatacaggactaattgtcagcctagaaaaggaacttgctccattgtttgaagaactgagacaagttgtggaagtttcttaatctgacagtggtttcagtgtgtaccttatcttcattataacaacacaatatcaatccagcaatctttagactacaataatacttttatccatgtgctcaagaaagggcccctttttccaacttatactaaagagctagcatatagatgtaatttatagatagatcagttgctatattttctggtgtagggtctttcttatttagtgagatctagggataccacagaaatggttcagtctatcacagctcccatggagttagtctggtcaccagatatggatgagagattctattcagtggatcagaatcaaactggtacattgatccacttgagccgttaagtgctgccaattgtacaatatgcccaggcttgcagaataaagccaactttttattgtgaataataataaggacatatttttcttcagattatgttttatttctttgcattgagtgaggaacataaaatggcttggtaaaagtaataaaatcagtacaatcactaactttcctttgtacatattattttgcagtatagatgaatattactaatcagtttgattattctcagagggtgctgctctttaatgaaaatgaaaattatagctaatgttttttcctcaaactctgctttctgtaaccaatcagtgttttaatgtttgtgtgttcttcataaaatttaaatacaattcgttattctgtttccaatgttagtatgtatgtaaacatgatagtacagccatttttttcatatgtgagtaaaaataaaatagtatttttaaaaatatagtttgagcactgtataggtcctttttttgttcagactttttccaaaaatctaaacataattaatatactctttcagccacatgaataaataatgagtgtttcttgtaggtattggtttggagattgttttacggtaatatgtactgttaactggaaaagaaacctgagattgcagtcagccaagattgtgccactgcaccccagcctgggcaacagagactccgtctcaaaaacaaaaaagaaaagaaaccaagaaacctcaggcatgaacctaatttaatctccatgaaagaggtactacagttctagaatataccctttatgttcaggaatgcagtctatcattcagagttaatttctttctaggctctttgacaatcagtttttccctggatcagttcagtacatatgcattgagcacctgtgtgccagtcagccgagctatcacattgcacaattctaagaagcaccattcatgtctcatcatatttctatgctctgggagttgcctttcacatagaatatgtgtgattgttatccctagaattgtgcagtgaggcaattggctaggtgctgtgctgcttttcacatagaatatgtgtgattgttatccctagaattgtgcagtgaggcaacttggctaggtgcacaattctagggataacaatcacatagaatatgtgtgc

SEQ ID NO: 441190 - DNA, 1432 bp, Homo sapiens
  misc_feature (1374)..(1374): n is a, c, g, or t
  misc_feature (1376)..(1376): n is a, c, g, or t
  misc_feature (1380)..(1380): n is a, c, g, or t
agcggaggggaggggcgcggccgccggacgcgccctcgcagcttccgccgggcccctccggaaatcccgtatcgtagggcgacggcggcttagaaagtgcttcctggagcgcagacgaggtcatgaatcatgtgacggtggcttgaggaggaacctgtctttaaagctgtccctgaagtgacagcggagagaaccaggcagcccagaaaccccaggcgtggagattgatcctgcgagagaagggggttcatcatggcggatgacctaaagcgattcttgtataaaaagttaccaagtgttgaagggctccatgccattgttgtgtcagatagagatggagtacctgttattaaagtggcaaatgacaatgctccagagcatgctttgcgacctggtttcttatccacttttgcccttgcaacagaccaaggaagcaaacttggactttccaaaaataaaagtatcatctgttactataacacctaccaggtggttcaatttaatcgtttacctttggtggtgagtttcatagccagcagcagtgccaatacaggactaattgtcagcctagaaaaggaacttgctccattgtttgaagaactgagacaagttgtggaagtttcttaatctgacagtggtttcagtgtgtaccttatcttcattataacaacacaatatcaatccagcaatctttagactacaataatacttttatccatgtgctcaagaaagggcccctttttccaacttatactaaagagctagcatatagatgtaatttatagatagatcagttgctatattttctggtgtagggtctttcttatttagtgagatctagggataccacagaaatggttcagtctatcacagctcccatggagttagtctggtcaccagatatggatgagagattctattcagtggatcagaatcaaactggtacattgatccacttgagccgttaagtgctgccaattgtacaatatgcccaggcttgcagaataaagccaactttttattgtgaataataataaggacatatttttcttcagattatgttttatttctttgcattgagtgaggaacataaaatggcttggtaaaagtaataaaatcagtacaatcactaactttcctttgtacatattattttgcagtatagatgaatattactaatcagtttgattattctcagagggtgctgctctttaatgaaaatgaaaattatagctaatgttttttcctcaaactctgctttctgtaaccaatcagtgttttaatgtttgtgtgttcttcataaaatttaaatacaattcgttattctgtttccaatgttagtatgtatgtaaacatgatagtaccatgcgccantntgtntgttataccagtcagtgggtcgacgctcaacaatataaattactaccgcctc

SEQ ID NO: 441191 - DNA, 4236 bp, Homo sapiens
agcggaggggaggggcgcggccgccggacgcgccctcgcagcttccgccgggcccctccggaaatcccgtatcgtagggcgacggcggcttagaaagtgcttcctggagcgcagacgaggtcatgaatcatgtgacggtggcttgaggaggaacctgtctttaaagctgtccctgaagtgacagcggagagaaccaggcagcccagaaaccccaggcgtggagattgatcctgcgagagaagggggttcatcatggcggatgacctaaagcgattcttgtataaaaagttaccaagtgttgaagggctccatgccattgttgtgtcagatagagatggagtacctgttattaaagtggcaaatgacaatgctccagagcatgctttgcgacctggtttcttatccacttttgcccttgcaacagaccaaggaagcaaacttggactttccaaaaataaaagtatcatctgttactataacacctaccaggtggttcaatttaatcgtttacctttggtggtgagtttcatagccagcagcagtgccaatacagacaagttgtggaagtttcttaatctgacagtggtttcagtgtgtaccttatcttcattataacaacacaatatcaatccagcaatctttagactacaataatacttttatccatgtgctcaagaaagggcccctttttccaacttatactaaagagctagcatatagatgtaatttatagatagatcagttgctatattttctggtgtagggtctttcttatttagtgagatctagggataccacagaaatggttcagtctatcacagctcccatggagttagtctggtcaccagatatggatgagagattctattcagtggatcagaatcaaactggtacattgatccacttgagccgttaagtgctgccaattgtacaatatgcccaggcttgcagaataaagccaactttttattgtgaataataataaggacatatttttcttcagattatgttttatttctttgcattgagtgaggaacataaaatggcttggtaaaagtaataaaatcagtacaatcactaactttcctttgtacatattattttgcagtatagatgaatattactaatcagtttgattattctcagagggtgctgctctttaatgaaaatgaaaattatagctaatgttttttcctcaaactctgctttctgtaaccaatcagtgttttaatgtttgtgtgttcttcataaaatttaaatacaattcgttattctgtttccaatgttagtatgtatgtaaacatgatagtacagccatttttttcatatgtgagtaaaaataaaatagtatttttaaaaatatagtttgagcactgtataggtcctttttttgttcagactttttccaaaaatctaaacataattaatatactctttcagccacatgaataaataatgagtgtttcttgtaggtattggtttggagattgttttacggtaatatgtactgttaactggaaaagaaacctgagattgcagtcagccaagattgtgccactgcaccccagcctgggcaacagagactccgtctcaaaaacaaaaaagaaaagaaaccaagaaacctcaggcatgaacctaatttaatctccatgaaagaggtactacagttctagaatataccctttatgttcaggaatgcagtctatcattcagagttaatttctttctaggctctttgacaatcagtttttccctggatcagttcagtacatatgcattgagcacctgtgtgccagtcagccgagctatcacattgcacaattctaagaagcaccattcatgtctcatcatatttctatgctctgggagttgcctttcacatagaatatgtgtgattgttatccctagaattgtgcagtgaggcaattggctaggtgctgtgctgctttttctttctttcttttttttttaagagacggagtcttgctgtgttgcccagtctggagtgcagtggtggcatgatcttgcctcactgtaacctctgcctcctgggttcaagctgttctcatgccccattctcccttgtagctgggattacaggcttacaccatcgcacttggcaaatttgtgtatttttagtagagacaggaattcaccatgttggccaggctggtcttgaactcctgacttaaagtgatccacctgctttggcctcccaaaatgctaggattataggtgtgagccactgcaccgggccatgtgctactttttcttccttccatccttcctcccttcttcagtgtaaatatgagattaatttgtgataccttactttaaagaacttagagttcagtaaaggaagcaggtatagaaagtgctatgataaagctatacataggatggtatagaaccacagactaggggcacttaaaatgggcaagaaaatagcctttgtaaataaaatagaggcaagagatataatgctttacctgcaaagagctataaatacagccatgtaccatataatgatgtttcagttagtgaaggaccacatacgagggtggtcagaacagcaggctataccatatagcctaggtgtgtagtaggctataccatatagcctaggtgtgtagtagtaggctataccatatagcctaggtgtgtagtagtaggcgataccatatagcctaggtgtgtagtagtaggctataccatatagcctaggtgtatagtagtaggctataccatatagcctaggtgtgtagtaggctataccatatagcctaggtatgtagtagtaggctataccatatagcctaggtgtgtagtagtaggctataccatctggggttcctgtcagtacagtatgatgttcacataatgatgaaatcacctaacaaagcatgtctcgaaatgtatccacattgttacgtaacacatgactgtagttaattgttacaattgaaatactagatgtactcattgaaatccagaattcccattatctggattatttaatatcgttcaggaaatttttgccagtgcaatggtgcatgaaacaatgtcttttagaaatgaggtggccagatttctatttgcagataataattgtatatctaaaaatcctagaaaaagaaatgataacaaatggagctacttaacctttacatgttgaatgctgccactgttaaaatttctgagggggtataatagataaactatcccatagttcatctggaaaaataaggtggtgaaaattgctaagaaatttttgaaagggtaatgtaaacctagattaactgtttttgaaaggtagtacagaactgaatgcacaactagatatcaatggtatgtactcacccagaaaaaagacttcagtacatacatgtgagggcttaaaacattgttataaagacgggatcacaatgggaaaaggattattcaataagtagggcaggcattctctatgcctgctagggaagtgtgacttgttatactctttatgtacagcaattggcagtctgtgaaacttttaaattcatatacataaccttttgccctgcaattccacttctagaaatttatcctaccaaacaaagcacatagatgtgcaaaagtatgtatttacaagtatattctttgcaacttggtaatgtcaaagaattggaagcaacctaaatatctgccataggtaggataaccatatgctttggctttttgaacactaccagtttatacctgctgttcttggataattattaatagtgctttcattctcaatgtctcactttagataataaattacagaggattggtgaaactaatttgcccaatggaaaaaggaatgaagaagtgctttaggtactgagatgaaaagatctctaaggcataataatgtttattgagaaaagcatggtgtcaaactgtatggcatgctacaattgatgtataagaagaaaaaatgtgtatgtattcctatttgtttgtatatggtagactgtctctgaagacatatatggaagaacctgatcacattggtagtctccaaggagcagaactagatacctgggggataaggatcccaggagtgagccttttcattgtaaacttcattgtactttgagtttttaactgttcaaaaataataaaattagaaataaaatatttcaacaaacaataaaatgggatatttggggaagaaagttgtctcagggctctccaaagaagcagaaccgg

SEQ ID NO: 441192 - DNA, 579 bp, Homo sapiens
cgcgcctgacaaccccgtcgtccccgtgccgtcccccgaactccacataccatgcgacgcgcggccagccccccgcccctgcccggctgctgggaggaagtgacagcgccccgcatcccccgctgggcaggccgggcgcgcccagcccctgggacgcagggacacagccgggccgcgctgggccttggcctccgcccgcgggttttccgcggttgcggcggggcggggaaggaggggcgggcggggcggggctgactctgcgactatttcaggccttgcggaacccgggccaggacagtggcggccaggccgggacacggtaagtgacctccgcttccacacgtccattccccgccgctccgcgcggcttctcgcccgcccctaccccgaggccaggccggattccccgaggaaagagcctgtcgccgcggcggggacaggagggggctggacgcttccagggaaactgaggccctggcgcgcccagcgtccgcgcgtccgggcgcagaggggccaaggctggctgagggcccgggcctgccagaggcagggagggcggggctggggcaggcgcagggg

SEQ ID NO: 441193 - DNA, 4727 bp, Homo sapiens
  misc_feature (4408)..(4408): n is a, c, g, or t
  misc_feature (4417)..(4418): n is a, c, g, or t
  misc_feature (4420)..(4420): n is a, c, g, or t
  misc_feature (4569)..(4569): n is a, c, g, or t
  misc_feature (4583)..(4583): n is a, c, g, or t
ttacagcagaaaggccccaggtccggcgtgactccccggccgggcgacacaggccgagtcacttcctcgcccgtgcccgggtgtcctcatcgggggatgggtgcgccttccacatcctgcccaggactgaaggagccgggcccagcgagctcccgggaggtgtgtggacatcagccctgacggggaaggcgagccaggagcctgcaggcctgaaccagggtgatgctgaagatgatgaccttcttccaaggcctctagagccatcagcctgtgccaggcaccctcgacttgcctagaggcccccaaaagttgcagtccacatcagaggcagagtcagaggcctccatgtcggaggcctcctctgaggacctggtgccacccctggaggctggggcagccccatatagggaggaggaagaggcggcgaagaagaagaaggagaagaagaagaagtccaaaggcctggccaatgtgttctgcgtcttcaccaaagggaagaagaagaagggtcagcccagctcagcggagcccgaggacgcagccgggtccaggcaggggctggatggcccgccccccacagtggaggagctgaaggcggcgctggagcgcgggcagctggaggcggcgcggccgctgctggcgctggagcgggagctggcggcggcggcggcggcgggcggtgtgagcgaggaggagctggtgcggcgccagagcaaggtggaggcgctgtacgagctgctgcgcgaccaggtgctgggcgtgctgcggcggccgctggaggcgccgcccgagcggctgcgccaggcgctggccgtggtggcggagcaggagcgcgaggaccgccaggcggcggcggcggggccggggacctcggggctggcggccacgcgcccgcggcgctggctgcagctgtggcggcgcggcgtggcggaggcggccgaggagcgcatgggccagcggccggccgcgggcgccgaggtccccgagagcgtctttctgcacttgggccgcaccatgaaggaggacctggaggccgtggtggagcggctgaagccgctgttccccgccgagttcggcgtcgtggcggcctacgccgagagctaccaccagcacttcgcggcccacctggccgccgtggcgcagttcgagctgtgcgagcgcgacacctacatgctgctgctctgggtggagaacctctaccccaatgacatcatcaacagccccaagctggtgggtgagctgcagggtatggggctcgggagcctcctgccccccaggcagatccgactgctggaggccacattcctgtccagtgaggcggccaatgtgagggagttgatggaccgagctctggagctagaggcacggcgctgggctgaggatgtgcctccccagaggctggacggccactgccacagcgagctggccatcgacatcatccagatcacctcccaggcccaggccaaggccgagagcatcacgctggacttgggctcacagataaagcgggtgctgctggtggagctgcctgcgttcctgaggagctaccagcgcgcctttaatgaatttctggagagaggcaagcagctgacgaattacagggccaatgttattgccaacatcaacaactgcctgtccttccggatgtccatggagcagaattggcaggtaccccaggacaccctgagcctcctgctgggccccctgggtgagctcaagagccacggctttgacaccctgctccagaacctgcatgaggacctgaagccactgttcaagaggttcacgcacacccgctgggcggcccctgtggagaccctggaaaacatcatcgccactgtagacacgaggctgcctgagttctcagagctgcagggctgtttccgggaggagctcatggaggccttgcacctgcacctggtgaaggagtacatcatccaactcagcaaggggcgcctggtcctcaagacggccgagcagcagcagcagctggctgggtacatcctggccaatgctgacaccatccagcacttctgcacccagcacggctccccggcgacctggctgcagcctgctctccctacgctggccgagatcattcgcctgcaggaccccagtgccatcaagattgaggtggccacttatgccacctgctaccctgacttcagcaaaggccacctgagcgctatcctggccatcaaggggaacctatccaacagtgaggtcaagcgcatccggagcatcttggacgtcagcatgggggcgcaggagccctcccggcccctattttcccttataaaggttggttagcttttcctgtggcctgacctgcctgtgagtgcccagcaagccttgggcacaccccgctgggagctgttaagagcagcgctggttctcggttcctcccgggtctcctgtgctctgatgctacttctgcctagccctggcggaggtgcaggccctgtcagctggaactggacagaccttggtttgtttacatgtccgatgggggcaggagctcccatcctgggcagccaaccaggcaacaccaaggactctttgtaaacgatagctgatcgtgtgcacgcaaggaaagaaccaggagggagagtgcagccaggctcagggatccccggacacctctgtccagagcccctccacagtcggcctcatgactgtcctcctcgtgggtggggccgagggccctcttcagctctctggagacaggggccgagcctcacccatctgccctctgcagcccagggccgccgtgagcgggattcagcaatggtggaatggaagacagaactggaagagaaagaaggaaaagatgagctctcgtctggcaggggcttttagggtcctgtggcgagctgtgagcaccgccagcgttagacgtcacatccaggtggccccacggcccctacaggctggccctgcaatggggccctgagccctccctcttcatcccccaaggcctcaactagagggtggtcccccgagggcttggtgtctactaccgaagggcccaagacctcctgggtcctctcaggctcccccttccccaaggcagggacaggccctgggggtgccaccgtgggccctgccacccagaagtctggctgaggtctgggcaggggcagggcaagcttgacctctcactgttgaccctttggcctctgtatttgtttcctattgccgtgacaggtttccacaaacttcgtggatcaaaacgaggtcttccagttctgcgggtcagaaggctgacccggggctcaaatctgggtgtcggcagtcctgcactccttctggaggctctaggggagaattcatttctggccttttcatttttagaggctgaccgtaattcttgacttcaggctcctccatcttcagagccagctgtgggtagttgaatctttttcccgtcacctcattgaggcctcccctctcctgcctccctccaccacttttttttttttttttttgagacagggtcttgctgtgttgcccaggctggagtgcagtggcctggtcatggcatcaaggctcactgcagcctggacctcctggttcaagtgatcctcttgtctcagtcccctgagacaatcccccacgcccagctacatattttttgtggatacagggtctcattctgttgcctaggcttgtctggaactcctgggctcaagggatcttgtagccttagcctcctaaagtgctgggattataggcatgagtcactgtacccggcctgctctaccgcttttaaggacgcttatgatcacattgcgcctacccagagaacccaggtcgtctttctattttcaggtcagctgattagccaccttagttccatctgcaactttagttcccactggctgtgtaacctaacatagtcacaggctctggggactgtcacgtggacatctttgggaggccgttattctgcccaccgcaccctccgttcatcccctgccctgccgggcacctcgctctaccccaggaaaatgtgagctcgttttcctgctcggcatgtgctccccctaaggctctgctcctccctgggcctgaaagttccttctcagcctgagagggggcccttcggatctcaggcatgactcagcccggctgatgcctctgcagtgctgagtcaggatttggggccggctctcttgggtctgtccccttttcccaggtactgccttacaaagctgtggccaggaagtggccggtataaaggatgcccaaggtctttgtacgtgtgtaggagttagcgtgtttgatattgttaatataataataattattttttagagtactgcttttgtatgtatgttgaacaggatccaggtttttatagcttgatataaaacagaattcaaaagtgaaaaaaaaaaaaaaaaanaaaaaaaannanaaaaaaaaaacttattaataattaccaaacccttaaaacccctcaaataccttttatattttaaactaaatataaaccttaatacccattccccttgtatcaccttaccacaattacccccatttaaacttcctttaattttttggccncgcgcctagccganattttctttataatggaagagtccttaaagcgggcccctatatttcaaagcccatgcgcctatttccacttatgggaggggggatacactccccatggggcgggtttttaaaattggggcgggtggaagaacactggggaaccc

SEQ ID NO: 441194 - DNA, 4849 bp, Homo sapiens
  misc_feature (4530)..(4530): n is a, c, g, or t
  misc_feature (4539)..(4540): n is a, c, g, or t
  misc_feature (4542)..(4542): n is a, c, g, or t
  misc_feature (4691)..(4691): n is a, c, g, or t
  misc_feature (4705)..(4705): n is a, c, g, or t
cgcgcctgacaaccccgtcgtccccgtgccgtcccccgaactccacataccatgcgacgcgcggccagccccccgcccctgcccggctgctgggaggaagtgacagcgccccgcatcccccgctgggcaggccgggcgcgcccagcccctgggacgcagggacacagccgggccgcgctgggccttggcctccgcccgcgggttttccgcggttgcggcggggcggggaaggaggggcgggcggggcggggctgactctgcgactatttcaggccttgcggaacccgggccaggacagtggcggccaggccgggacacggagcctgcaggcctgaaccagggtgatgctgaagatgatgaccttcttccaaggcctctagagccatcagcctgtgccaggcaccctcgacttgcctagaggcccccaaaagttgcagtccacatcagaggcagagtcagaggcctccatgtcggaggcctcctctgaggacctggtgccacccctggaggctggggcagccccatatagggaggaggaagaggcggcgaagaagaagaaggagaagaagaagaagtccaaaggcctggccaatgtgttctgcgtcttcaccaaagggaagaagaagaagggtcagcccagctcagcggagcccgaggacgcagccgggtccaggcaggggctggatggcccgccccccacagtggaggagctgaaggcggcgctggagcgcgggcagctggaggcggcgcggccgctgctggcgctggagcgggagctggcggcggcggcggcggcgggcggtgtgagcgaggaggagctggtgcggcgccagagcaaggtggaggcgctgtacgagctgctgcgcgaccaggtgctgggcgtgctgcggcggccgctggaggcgccgcccgagcggctgcgccaggcgctggccgtggtggcggagcaggagcgcgaggaccgccaggcggcggcggcggggccggggacctcggggctggcggccacgcgcccgcggcgctggctgcagctgtggcggcgcggcgtggcggaggcggccgaggagcgcatgggccagcggccggccgcgggcgccgaggtccccgagagcgtctttctgcacttgggccgcaccatgaaggaggacctggaggccgtggtggagcggctgaagccgctgttccccgccgagttcggcgtcgtggcggcctacgccgagagctaccaccagcacttcgcggcccacctggccgccgtggcgcagttcgagctgtgcgagcgcgacacctacatgctgctgctctgggtggagaacctctaccccaatgacatcatcaacagccccaagctggtgggtgagctgcagggtatggggctcgggagcctcctgccccccaggcagatccgactgctggaggccacattcctgtccagtgaggcggccaatgtgagggagttgatggaccgagctctggagctagaggcacggcgctgggctgaggatgtgcctccccagaggctggacggccactgccacagcgagctggccatcgacatcatccagatcacctcccaggcccaggccaaggccgagagcatcacgctggacttgggctcacagataaagcgggtgctgctggtggagctgcctgcgttcctgaggagctaccagcgcgcctttaatgaatttctggagagaggcaagcagctgacgaattacagggccaatgttattgccaacatcaacaactgcctgtccttccggatgtccatggagcagaattggcaggtaccccaggacaccctgagcctcctgctgggccccctgggtgagctcaagagccacggctttgacaccctgctccagaacctgcatgaggacctgaagccactgttcaagaggttcacgcacacccgctgggcggcccctgtggagaccctggaaaacatcatcgccactgtagacacgaggctgcctgagttctcagagctgcagggctgtttccgggaggagctcatggaggccttgcacctgcacctggtgaaggagtacatcatccaactcagcaaggggcgcctggtcctcaagacggccgagcagcagcagcagctggctgggtacatcctggccaatgctgacaccatccagcacttctgcacccagcacggctccccggcgacctggctgcagcctgctctccctacgctggccgagatcattcgcctgcaggaccccagtgccatcaagattgaggtggccacttatgccacctgctaccctgacttcagcaaaggccacctgagcgctatcctggccatcaaggggaacctatccaacagtgaggtcaagcgcatccggagcatcttggacgtcagcatgggggcgcaggagccctcccggcccctattttcccttataaaggttggttagcttttcctgtggcctgacctgcctgtgagtgcccagcaagccttgggcacaccccgctgggagctgttaagagcagcgctggttctcggttcctcccgggtctcctgtgctctgatgctacttctgcctagccctggcggaggtgcaggccctgtcagctggaactggacagaccttggtttgtttacatgtccgatgggggcaggagctcccatcctgggcagccaaccaggcaacaccaaggactctttgtaaacgatagctgatcgtgtgcacgcaaggaaagaaccaggagggagagtgcagccaggctcagggatccccggacacctctgtccagagcccctccacagtcggcctcatgactgtcctcctcgtgggtggggccgagggccctcttcagctctctggagacaggggccgagcctcacccatctgccctctgcagcccagggccgccgtgagcgggattcagcaatggtggaatggaagacagaactggaagagaaagaaggaaaagatgagctctcgtctggcaggggcttttagggtcctgtggcgagctgtgagcaccgccagcgttagacgtcacatccaggtggccccacggcccctacaggctggccctgcaatggggccctgagccctccctcttcatcccccaaggcctcaactagagggtggtcccccgagggcttggtgtctactaccgaagggcccaagacctcctgggtcctctcaggctcccccttccccaaggcagggacaggccctgggggtgccaccgtgggccctgccacccagaagtctggctgaggtctgggcaggggcagggcaagcttgacctctcactgttgaccctttggcctctgtatttgtttcctattgccgtgacaggtttccacaaacttcgtggatcaaaacgaggtcttccagttctgcgggtcagaaggctgacccggggctcaaatctgggtgtcggcagtcctgcactccttctggaggctctaggggagaattcatttctggccttttcatttttagaggctgaccgtaattcttgacttcaggctcctccatcttcagagccagctgtgggtagttgaatctttttcccgtcacctcattgaggcctcccctctcctgcctccctccaccacttttttttttttttttttgagacagggtcttgctgtgttgcccaggctggagtgcagtggcctggtcatggcatcaaggctcactgcagcctggacctcctggttcaagtgatcctcttgtctcagtcccctgagacaatcccccacgcccagctacatattttttgtggatacagggtctcattctgttgcctaggcttgtctggaactcctgggctcaagggatcttgtagccttagcctcctaaagtgctgggattataggcatgagtcactgtacccggcctgctctaccgcttttaaggacgcttatgatcacattgcgcctacccagagaacccaggtcgtctttctattttcaggtcagctgattagccaccttagttccatctgcaactttagttcccactggctgtgtaacctaacatagtcacaggctctggggactgtcacgtggacatctttgggaggccgttattctgcccaccgcaccctccgttcatcccctgccctgccgggcacctcgctctaccccaggaaaatgtgagctcgttttcctgctcggcatgtgctccccctaaggctctgctcctccctgggcctgaaagttccttctcagcctgagagggggcccttcggatctcaggcatgactcagcccggctgatgcctctgcagtgctgagtcaggatttggggccggctctcttgggtctgtccccttttcccaggtactgccttacaaagctgtggccaggaagtggccggtataaaggatgcccaaggtctttgtacgtgtgtaggagttagcgtgtttgatattgttaatataataataattattttttagagtactgcttttgtatgtatgttgaacaggatccaggtttttatagcttgatataaaacagaattcaaaagtgaaaaaaaaaaaaaaaaanaaaaaaaannanaaaaaaaaaacttattaataattaccaaacccttaaaacccctcaaataccttttatattttaaactaaatataaaccttaatacccattccccttgtatcaccttaccacaattacccccatttaaacttcctttaattttttggccncgcgcctagccganattttctttataatggaagagtccttaaagcgggcccctatatttcaaagcccatgcgcctatttccacttatgggaggggggatacactccccatggggcgggtttttaaaattggggcgggtggaagaacactggggaaccc

SEQ ID NO: 441195 - DNA, 3822 bp, Homo sapiens
ttacagcagaaaggccccaggtccggcgtgactccccggccgggcgacacaggccgagtcacttcctcgcccgtgcccgggtgtcctcatcgggggatgggtgcgccttccacatcctgcccaggactgaaggagccgggcccagcgagctcccgggaggtgtgtggacatcagccctgacggggaaggcgagccaggagcctgcaggcctgaaccagggtgatgctgaagatgatgaccttcttccaaggcctctagagccatcagcctgtgccaggcaccctcgacttgcctagaggcccccaaaagttgcagtccacatcagaggcagagtcagaggcctccatgtcggaggcctcctctgaggacctggtgccacccctggaggctggggcagccccatatagggaggaggaagaggcggcgaagaagaagaaggagaagaagaagaagtccaaaggcctggccaatgtgttctgcgtcttcaccaaagggaagaagaagaagggtcagcccagctcagcggagcccgaggacgcagccgggtccaggcaggggctggatggcccgccccccacagtggaggagctgaaggcggcgctggagcgcgggcagctggaggcggcgcggccgctgctggcgctggagcgggagctggcggcggcggcggcggcgggcggtgtgagcgaggaggagctggtgcggcgccagagcaaggtggaggcgctgtacgagctgctgcgcgaccaggtgctgggcgtgctgcggcggccgctggaggcgccgcccgagcggctgcgccaggcgctggccgtggtggcggagcaggagcgcgaggaccgccaggcggcggcggcggggccgaggtccccgagagcgtctttctgcacttgggccgcaccatgaaggaggacctggaggccgtggtggagcggctgaagccgctgttccccgccgagttcggcgtcgtggcggcctacgccgagagctaccaccagcacttcgcggcccacctggccgccgtggcgcagttcgagctgtgcgagcgcgacacctacatgctgctgctctgggtggagaacctctaccccaatgacatcatcaacagccccaagctggtgggtgagctgcagggtatggggctcgggagcctcctgccccccaggcagatccgactgctggaggccacattcctgtccagtgaggcggccaatgtgagggagttgatggaccgagctctggagctagaggcacggcgctgggctgaggatgtgcctccccagaggctggacggccactgccacagcgagctggccatcgacatcatccagatcacctcccaggcccaggccaaggccgagagcatcacgctggacttgggctcacagataaagcgggtgctgctggtggagctgcctgcgttcctgaggagctaccagcgcgcctttaatgaatttctggagagaggcaagcagctgacgaattacagggccaatgttattgccaacatcaacaactgcctgtccttccggatgtccatggagcagaattggcaggtaccccaggacaccctgagcctcctgctgggccccctgggtgagctcaagagccacggctttgacaccctgctccagaacctgcatgaggacctgaagccactgttcaagaggttcacgcacacccgctgggcggcccctgtggagaccctggaaaacatcatcgccactgtagacacgaggctgcctgagttctcagagctgcagggctgtttccgggaggagctcatggaggccttgcacctgcacctggtgaaggagtacatcatccaactcagcaaggggcgcctggtcctcaagacggccgagcagcagcagcagctggctgggtacatcctggccaatgctgacaccatccagcacttctgcacccagcacggctccccggcgacctggctgcagcctgctctccctacgctggccgagatcattcgcctgcaggaccccagtgccatcaagattgaggtggccacttatgccacctgctaccctgacttcagcaaaggccacctgagcgctatcctggccatcaaggggaacctatccaacagtgaggtcaagcgcatccggagcatcttggacgtcagcatgggggcgcaggagccctcccggcccctattttcccttataaagcccagggccgccgtgagcgggattcagcaatggtggaatggaagacagaactggaagagaaagaaggaaaagatgagctctcgtctggcaggggcttttagggtcctgtggcgagctgtgagcaccgccagcgttagacgtcacatccaggtggccccacggcccctacaggctggccctgcaatggggccctgagccctccctcttcatcccccaaggcctcaactagagggtggtcccccgagggcttggtgtctactaccgaagggcccaagacctcctgggtcctctcaggctcccccttccccaaggcagggacaggccctgggggtgccaccgtgggccctgccacccagaagtctggctgaggtctgggcaggggcagggcaagcttgacctctcactgttgaccctttggcctctgtatttgtttcctattgccgtgacaggtttccacaaacttcgtggatcaaaacgaggtcttccagttctgcgggtcagaaggctgacccggggctcaaatctgggtgtcggcagtcctgcactccttctggaggctctaggggagaattcatttctggccttttcatttttagaggctgaccgtaattcttgacttcaggctcctccatcttcagagccagctgtgggtagttgaatctttttcccgtcacctcattgaggcctcccctctcctgcctccctccaccacttttttttttttttttttgagacagggtcttgctgtgttgcccaggctggagtgcagtggcctggtcatggcatcaaggctcactgcagcctggacctcctggttcaagtgatcctcttgtctcagtcccctgagacaatcccccacgcccagctacatattttttgtggatacagggtctcattctgttgcctaggcttgtctggaactcctgggctcaagggatcttgtagccttagcctcctaaagtgctgggattataggcatgagtcactgtacccggcctgctctaccgcttttaaggacgcttatgatcacattgcgcctacccagagaacccaggtcgtctttctattttcaggtcagctgattagccaccttagttccatctgcaactttagttcccactggctgtgtaacctaacatagtcacaggctctggggactgtcacgtggacatctttgggaggccgttattctgcccaccgcaccctccgttcatcccctgccctgccgggcacctcgctctaccccaggaaaatgtgagctcgttttcctgctcggcatgtgctccccctaaggctctgctcctccctgggcctgaaagttccttctcagcctgagagggggcccttcggatctcaggcatgactcagcccggctgatgcctctgcagtgctgagtcaggatttggggccggctctcttgggtctgtccccttttcccaggtactgccttacaaagctgtggccaggaagtggccggtataaaggatgcccaaggtctttgtacgtgtgtaggagttagcgtgtttgatattgttaatataataataattattttttagagtactgcttttgtatgtatgttgaacaggatccaggtttttatagcttgatataaaacagaattcaaaagtga

SEQ ID NO: 441196 - DNA, 2253 bp, Homo sapiens
gctgggctgacaggatgctctctttgccagcaaaggccacctgagcgctatcctggccatcaaggggaacctatccaacagtgaggtcaagcgcatccggagcatcttggacgtcagcatgggggcgcaggagccctcccggcccctattttcccttataaaggttggttagcttttcctgtggcctgacctgcctgtgagtgcccagcaagccttgggcacaccccgctgggagctgttaagagcagcgctggttctcggttcctcccgggtctcctgtgctctgatgctacttctgcctagccctggcggaggtgcaggccctgtcagctggaactggacagaccttggtttgtttacatgtccgatgggggcaggagctcccatcctgggcagccaaccaggcaacaccaaggactctttgtaaacgatagctgatcgtgtgcacgcaaggaaagaaccaggagggagagtgcagccaggctcagggatccccggacacctctgtccagagcccctccacagtcggcctcatgactgtcctcctcgtgggtggggccgagggccctcttcagctctctggagacaggggccgagcctcacccatctgccctctgcagcccagggccgccgtgagcgggattcagcaatggtggaatggaagacagaactggaagagaaagaaggaaaagatgagctctcgtctggcaggggcttttagggtcctgtggcgagctgtgagcaccgccagcgttagacgtcacatccaggtggccccacggcccctacaggctggccctgcaatggggccctgagccctccctcttcatcccccaaggcctcaactagagggtggtcccccgagggcttggtgtctactaccgaagggcccaagacctcctgggtcctctcaggctcccccttccccaaggcagggacaggccctgggggtgccaccgtgggccctgccacccagaagtctggctgaggtctgggcaggggcagggcaagcttgacctctcactgttgaccctttggcctctgtatttgtttcctattgccgtgacaggtttccacaaacttcgtggatcaaaacgaggtcttccagttctgcgggtcagaaggctgacccggggctcaaatctgggtgtcggcagtcctgcactccttctggaggctctaggggagaattcatttctggccttttcatttttagaggctgaccgtaattcttgacttcaggctcctccatcttcagagccagctgtgggtagttgaatctttttcccgtcacctcattgaggcctcccctctcctgcctccctccaccacttttttttttttttttttgagacagggtcttgctgtgttgcccaggctggagtgcagtggcctggtcatggcatcaaggctcactgcagcctggacctcctggttcaagtgatcctcttgtctcagtcccctgagacaatcccccacgcccagctacatattttttgtggatacagggtctcattctgttgcctaggcttgtctggaactcctgggctcaagggatcttgtagccttagcctcctaaagtgctgggattataggcatgagtcactgtacccggcctgctctaccgcttttaaggacgcttatgatcacattgcgcctacccagagaacccaggtcgtctttctattttcaggtcagctgattagccaccttagttccatctgcaactttagttcccactggctgtgtaacctaacatagtcacaggctctggggactgtcacgtggacatctttgggaggccgttattctgcccaccgcaccctccgttcatcccctgccctgccgggcacctcgctctaccccaggaaaatgtgagctcgttttcctgctcggcatgtgctccccctaaggctctgctcctccctgggcctgaaagttccttctcagcctgagagggggcccttcggatctcaggcatgactcagcccggctgatgcctctgcagtgctgagtcaggatttggggccggctctcttgggtctgtccccttttcccaggtactgccttacaaagctgtggccaggaagtggccggtataaaggatgcccaaggtctttgtacgtgtgtaggagttagcgtgtttgatattgttaatataataataattattttttagagtactgcttttgtatgtatgttgaacaggatccaggtttttatagcttgatataaaacagaattcaaaagtga

SEQ ID NO: 441197 - DNA, 1597 bp, Homo sapiens
ttacagcagaaaggccccaggtccggcgtgactccccggccgggcgacacaggccgagtcacttcctcgcccgtgcccgggtgtcctcatcgggggatgggtgcgccttccacatcctgcccaggactgaaggagccgggcccagcgagctcccgggaggtgtgtggacatcagccctgacggggaaggcgagccaggagcctgcaggcctgaaccagggtgatgctgaagatgatgaccttcttccaaggcctctagagccatcagcctgtgccaggcaccctcgacttgcctagaggcccccaaaagttgcagtccacatcagaggcagagtcagaggcctccatgtcggaggcctcctctgaggacctggtgccacccctggaggctggggcagccccatatagggaggaggaagaggcggcgaagaagaagaaggagaagaagaagaagtccaaaggcctggccaatgtgttctgcgtcttcaccaaagggaagaagaagaagggtcagcccagctcagcggagcccgaggacgcagccgggtccaggcaggggctggatggcccgccccccacagtggaggagctgaaggcggcgctggagcgcgggcagctggaggcggcgcggccgctgctggcgctggagcgggagctggcggcggcggcggcggcgggcggtgtgagcgaggaggagctggtgcggcgccagagcaaggtggaggcgctgtacgagctgctgcgcgaccaggtgctgggcgtgctgcggcggccgctggaggcgccgcccgagcggctgcgccaggcgctggccgtggtggcggagcaggagcgcgaggaccgccaggcggcggcggcggggccgaggtccccgagagcgtctttctgcacttgggccgcaccatgaaggaggacctggaggccgtggtggagcggctgaagccgctgttccccgccgagttcggcgtcgtggcggcctacgccgagagctaccaccagcacttcgcggcccacctggccgccgtggcgcagttcgagctgtgcgagcgcgacacctacatgctgctgctctgggtggagaacctctaccccaatgacatcatcaacagccccaagctggtgggtgagctgcagggtatggggctcgggagcctcctgccccccaggcagatccgactgctggaggccacattcctgtccagtgaggcggccaatgtgagggagttgatggaccgagctctggagctagaggcacggcgctgggctgaggatgtgcctccccagaggctggacggccactgccacagcgagctggccatcgacatcatccagatcacctcccaggcccaggccaaggccgagagcatcacgctggacttgggctcacagataaagcgggtgctgctggtggagctgcctgcgttcctgaggagctaccagcgcgcctttaatgaatttctggagagaggcaagcagctgacgaattacagggccaatgttattgccaacatcaacaactgcctgtccttccggatgtccatggagcagaattggcagtaccccgaggatcactgagcccaggcatcctctagacgact

SEQ ID NO: 441198 - DNA, 776 bp, Homo sapiens
  misc_feature (457)..(457): n is a, c, g, or t
  misc_feature (466)..(467): n is a, c, g, or t
  misc_feature (469)..(469): n is a, c, g, or t
  misc_feature (618)..(618): n is a, c, g, or t
  misc_feature (632)..(632): n is a, c, g, or t
tgccagtgtcctccaggcactcaaacctagcccttctgaagccgacctcacgtgacctcacagcccctcctgaaggcgcctcactgatgacggtgggtggaataacagcccccagagatgtccaggtttggaaccccaggacgtgggaaagtgttaccttgcgtggcaaaagggacccggctgatgcctctgcagtgctgagtcaggatttggggccggctctcttgggtctgtccccttttcccaggtactgccttacaaagctgtggccaggaagtggccggtataaaggatgcccaaggtctttgtacgtgtgtaggagttagcgtgtttgatattgttaatataataataattattttttagagtactgcttttgtatgtatgttgaacaggatccaggtttttatagcttgatataaaacagaattcaaaagtgaaaaaaaaaaaaaaaaanaaaaaaaannanaaaaaaaaaacttattaataattaccaaacccttaaaacccctcaaataccttttatattttaaactaaatataaaccttaatacccattccccttgtatcaccttaccacaattacccccatttaaacttcctttaattttttggccncgcgcctagccganattttctttataatggaagagtccttaaagcgggcccctatatttcaaagcccatgcgcctatttccacttatgggaggggggatacactccccatggggcgggtttttaaaattggggcgggtggaagaacactggggaaccc

SEQ ID NO: 441199 - DNA, 4686 bp, Homo sapiens
  misc_feature (4408)..(4408): n is a, c, g, or t
  misc_feature (4417)..(4418): n is a, c, g, or t
  misc_feature (4420)..(4420): n is a, c, g, or t
  misc_feature (4559)..(4559): n is a, c, g, or t
ttacagcagaaaggccccaggtccggcgtgactccccggccgggcgacacaggccgagtcacttcctcgcccgtgcccgggtgtcctcatcgggggatgggtgcgccttccacatcctgcccaggactgaaggagccgggcccagcgagctcccgggaggtgtgtggacatcagccctgacggggaaggcgagccaggagcctgcaggcctgaaccagggtgatgctgaagatgatgaccttcttccaaggcctctagagccatcagcctgtgccaggcaccctcgacttgcctagaggcccccaaaagttgcagtccacatcagaggcagagtcagaggcctccatgtcggaggcctcctctgaggacctggtgccacccctggaggctggggcagccccatatagggaggaggaagaggcggcgaagaagaagaaggagaagaagaagaagtccaaaggcctggccaatgtgttctgcgtcttcaccaaagggaagaagaagaagggtcagcccagctcagcggagcccgaggacgcagccgggtccaggcaggggctggatggcccgccccccacagtggaggagctgaaggcggcgctggagcgcgggcagctggaggcggcgcggccgctgctggcgctggagcgggagctggcggcggcggcggcggcgggcggtgtgagcgaggaggagctggtgcggcgccagagcaaggtggaggcgctgtacgagctgctgcgcgaccaggtgctgggcgtgctgcggcggccgctggaggcgccgcccgagcggctgcgccaggcgctggccgtggtggcggagcaggagcgcgaggaccgccaggcggcggcggcggggccggggacctcggggctggcggccacgcgcccgcggcgctggctgcagctgtggcggcgcggcgtggcggaggcggccgaggagcgcatgggccagcggccggccgcgggcgccgaggtccccgagagcgtctttctgcacttgggccgcaccatgaaggaggacctggaggccgtggtggagcggctgaagccgctgttccccgccgagttcggcgtcgtggcggcctacgccgagagctaccaccagcacttcgcggcccacctggccgccgtggcgcagttcgagctgtgcgagcgcgacacctacatgctgctgctctgggtggagaacctctaccccaatgacatcatcaacagccccaagctggtgggtgagctgcagggtatggggctcgggagcctcctgccccccaggcagatccgactgctggaggccacattcctgtccagtgaggcggccaatgtgagggagttgatggaccgagctctggagctagaggcacggcgctgggctgaggatgtgcctccccagaggctggacggccactgccacagcgagctggccatcgacatcatccagatcacctcccaggcccaggccaaggccgagagcatcacgctggacttgggctcacagataaagcgggtgctgctggtggagctgcctgcgttcctgaggagctaccagcgcgcctttaatgaatttctggagagaggcaagcagctgacgaattacagggccaatgttattgccaacatcaacaactgcctgtccttccggatgtccatggagcagaattggcaggtaccccaggacaccctgagcctcctgctgggccccctgggtgagctcaagagccacggctttgacaccctgctccagaacctgcatgaggacctgaagccactgttcaagaggttcacgcacacccgctgggcggcccctgtggagaccctggaaaacatcatcgccactgtagacacgaggctgcctgagttctcagagctgcagggctgtttccgggaggagctcatggaggccttgcacctgcacctggtgaaggagtacatcatccaactcagcaaggggcgcctggtcctcaagacggccgagcagcagcagcagctggctgggtacatcctggccaatgctgacaccatccagcacttctgcacccagcacggctccccggcgacctggctgcagcctgctctccctacgctggccgagatcattcgcctgcaggaccccagtgccatcaagattgaggtggccacttatgccacctgctaccctgacttcagcaaaggccacctgagcgctatcctggccatcaaggggaacctatccaacagtgaggtcaagcgcatccggagcatcttggacgtcagcatgggggcgcaggagccctcccggcccctattttcccttataaaggttggttagcttttcctgtggcctgacctgcctgtgagtgcccagcaagccttgggcacaccccgctgggagctgttaagagcagcgctggttctcggttcctcccgggtctcctgtgctctgatgctacttctgcctagccctggcggaggtgcaggccctgtcagctggaactggacagaccttggtttgtttacatgtccgatgggggcaggagctcccatcctgggcagccaaccaggcaacaccaaggactctttgtaaacgatagctgatcgtgtgcacgcaaggaaagaaccaggagggagagtgcagccaggctcagggatccccggacacctctgtccagagcccctccacagtcggcctcatgactgtcctcctcgtgggtggggccgagggccctcttcagctctctggagacaggggccgagcctcacccatctgccctctgcagcccagggccgccgtgagcgggattcagcaatggtggaatggaagacagaactggaagagaaagaaggaaaagatgagctctcgtctggcaggggcttttagggtcctgtggcgagctgtgagcaccgccagcgttagacgtcacatccaggtggccccacggcccctacaggctggccctgcaatggggccctgagccctccctcttcatcccccaaggcctcaactagagggtggtcccccgagggcttggtgtctactaccgaagggcccaagacctcctgggtcctctcaggctcccccttccccaaggcagggacaggccctgggggtgccaccgtgggccctgccacccagaagtctggctgaggtctgggcaggggcagggcaagcttgacctctcactgttgaccctttggcctctgtatttgtttcctattgccgtgacaggtttccacaaacttcgtggatcaaaacgaggtcttccagttctgcgggtcagaaggctgacccggggctcaaatctgggtgtcggcagtcctgcactccttctggaggctctaggggagaattcatttctggccttttcatttttagaggctgaccgtaattcttgacttcaggctcctccatcttcagagccagctgtgggtagttgaatctttttcccgtcacctcattgaggcctcccctctcctgcctccctccaccacttttttttttttttttttgagacagggtcttgctgtgttgcccaggctggagtgcagtggcctggtcatggcatcaaggctcactgcagcctggacctcctggttcaagtgatcctcttgtctcagtcccctgagacaatcccccacgcccagctacatattttttgtggatacagggtctcattctgttgcctaggcttgtctggaactcctgggctcaagggatcttgtagccttagcctcctaaagtgctgggattataggcatgagtcactgtacccggcctgctctaccgcttttaaggacgcttatgatcacattgcgcctacccagagaacccaggtcgtctttctattttcaggtcagctgattagccaccttagttccatctgcaactttagttcccactggctgtgtaacctaacatagtcacaggctctggggactgtcacgtggacatctttgggaggccgttattctgcccaccgcaccctccgttcatcccctgccctgccgggcacctcgctctaccccaggaaaatgtgagctcgttttcctgctcggcatgtgctccccctaaggctctgctcctccctgggcctgaaagttccttctcagcctgagagggggcccttcggatctcaggcatgactcagcccggctgatgcctctgcagtgctgagtcaggatttggggccggctctcttgggtctgtccccttttcccaggtactgccttacaaagctgtggccaggaagtggccggtataaaggatgcccaaggtctttgtacgtgtgtaggagttagcgtgtttgatattgttaatataataataattattttttagagtactgcttttgtatgtatgttgaacaggatccaggtttttatagcttgatataaaacagaattcaaaagtgaaaaaaaaaaaaaaaaanaaaaaaaannanaaaaaaaaaaaaaaaaaaaaaaaaaaaaaaaaaaaaaaaaaaaaaaaaaaaaaaaaaaaaaaaaaataaaaaaaaataataatttttaaaaaaataaaaattatttaatttttattaattttactatttaaattatttnttattattaatattttacaatatttaattccttttctttaaaattcttaatttttctaatttcatttaattctataacatatctatttaatctctatttccctattattaaatttcttttactaact

SEQ ID NO: 441200 - DNA, 4279 bp, Homo sapiens
ttacagcagaaaggccccaggtccggcgtgactccccggccgggcgacacaggccgagtcacttcctcgcccgtgcccgggtgtcctcatcgggggatgggtgcgccttccacatcctgcccaggactgaaggagccgggcccagcgagctcccgggaggtgtgtggacatcagccctgacggggaaggcgagccaggagcctgcaggcctgaaccagggtgatgctgaagatgatgaccttcttccaaggcctctagagccatcagcctgtgccaggcaccctcgacttgcctagaggcccccaaaagttgcagtccacatcagaggcagagtcagaggcctccatgtcggaggcctcctctgaggacctggtgccacccctggaggctggggcagccccatatagggaggaggaagaggcggcgaagaagaagaaggagaagaagaagaagtccaaaggcctggccaatgtgttctgcgtcttcaccaaagggaagaagaagaagggtcagcccagctcagcggagcccgaggacgcagccgggtccaggcaggggctggatggcccgccccccacagtggaggagctgaaggcggcgctggagcgcgggcagctggaggcggcgcggccgctgctggcgctggagcgggagctggcggcggcggcggcggcgggcggtgtgagcgaggaggagctggtgcggcgccagagcaaggtggaggcgctgtacgagctgctgcgcgaccaggtgctgggcgtgctgcggcggccgctggaggcgccgcccgagcggctgcgccaggcgctggccgtggtggcggagcaggagcgcgaggaccgccaggcggcggcggcggggccgaggtccccgagagcgtctttctgcacttgggccgcaccatgaaggaggacctggaggccgtggtggagcggctgaagccgctgttccccgccgagttcggcgtcgtggcggcctacgccgagagctaccaccagcacttcgcggcccacctggccgccgtggcgcagttcgagctgtgcgagcgcgacacctacatgctgctgctctgggtggagaacctctaccccaatgacatcatcaacagccccaagctggtgggtgagctgcagggtatggggctcgggagcctcctgccccccaggcagatccgactgctggaggccacattcctgtccagtgaggcggccaatgtgagggagttgatggaccgagctctggagctagaggcacggcgctgggctgaggatgtgcctccccagaggctggacggccactgccacagcgagctggccatcgacatcatccagatcacctcccaggcccaggccaaggccgagagcatcacgctggacttgggctcacagataaagcgggtgctgctggtggagctgcctgcgttcctgaggagctaccagcgcgcctttaatgaatttctggagagaggcaagcagctgacgaattacagggccaatgttattgccaacatcaacaactgcctgtccttccggatgtccatggagcagaattggcaggtaccccaggacaccctgagcctcctgctgggccccctgggtgagctcaagagccacggctttgacaccctgctccagaacctgcatgaggacctgaagccactgttcaagaggttcacgcacacccgctgggcggcccctgtggagaccctggaaaacatcatcgccactgtagacacgaggctgcctgagttctcagagctgcagggctgtttccgggaggagctcatggaggccttgcacctgcacctggtgaaggagtacatcatccaactcagcaaggggcgcctggtcctcaagacggccgagcagcagcagcagctggctgggtacatcctggccaatgctgacaccatccagcacttctgcacccagcacggctccccggcgacctggctgcagcctgctctccctacgctggccgagatcattcgcctgcaggaccccagtgccatcaagattgaggtggccacttatgccacctgctaccctgacttcagcaaaggccacctgagcgctatcctggccatcaaggggaacctatccaacagtgaggtcaagcgcatccggagcatcttggacgtcagcatgggggcgcaggagccctcccggcccctattttcccttataaaggttggttagcttttcctgtggcctgacctgcctgtgagtgcccagcaagccttgggcacaccccgctgggagctgttaagagcagcgctggttctcggttcctcccgggtctcctgtgctctgatgctacttctgcctagccctggcggaggtgcaggccctgtcagctggaactggacagaccttggtttgtttacatgtccgatgggggcaggagctcccatcctgggcagccaaccaggcaacaccaaggactctttgtaaacgatagctgatcgtgtgcacgcaaggaaagaaccaggagggagagtgcagccaggctcagggatccccggacacctctgtccagagcccctccacagtcggcctcatgactgtcctcctcgtgggtggggccgagggccctcttcagctctctggagacaggggccgagcctcacccatctgccctctgcagcccagggccgccgtgagcgggattcagcaatggtggaatggaagacagaactggaagagaaagaaggaaaagatgagctctcgtctggcaggggcttttagggtcctgtggcgagctgtgagcaccgccagcgttagacgtcacatccaggtggccccacggcccctacaggctggccctgcaatggggccctgagccctccctcttcatcccccaaggcctcaactagagggtggtcccccgagggcttggtgtctactaccgaagggcccaagacctcctgggtcctctcaggctcccccttccccaaggcagggacaggccctgggggtgccaccgtgggccctgccacccagaagtctggctgaggtctgggcaggggcagggcaagcttgacctctcactgttgaccctttggcctctgtatttgtttcctattgccgtgacaggtttccacaaacttcgtggatcaaaacgaggtcttccagttctgcgggtcagaaggctgacccggggctcaaatctgggtgtcggcagtcctgcactccttctggaggctctaggggagaattcatttctggccttttcatttttagaggctgaccgtaattcttgacttcaggctcctccatcttcagagccagctgtgggtagttgaatctttttcccgtcacctcattgaggcctcccctctcctgcctccctccaccacttttttttttttttttttgagacagggtcttgctgtgttgcccaggctggagtgcagtggcctggtcatggcatcaaggctcactgcagcctggacctcctggttcaagtgatcctcttgtctcagtcccctgagacaatcccccacgcccagctacatattttttgtggatacagggtctcattctgttgcctaggcttgtctggaactcctgggctcaagggatcttgtagccttagcctcctaaagtgctgggattataggcatgagtcactgtacccggcctgctctaccgcttttaaggacgcttatgatcacattgcgcctacccagagaacccaggtcgtctttctattttcaggtcagctgattagccaccttagttccatctgcaactttagttcccactggctgtgtaacctaacatagtcacaggctctggggactgtcacgtggacatctttgggaggccgttattctgcccaccgcaccctccgttcatcccctgccctgccgggcacctcgctctaccccaggaaaatgtgagctcgttttcctgctcggcatgtgctccccctaaggctctgctcctccctgggcctgaaagttccttctcagcctgagagggggcccttcggatctcaggcatgactcagcccggctgatgcctctgcagtgctgagtcaggatttggggccggctctcttgggtctgtccccttttcccaggtactgccttacaaagctgtggccaggaagtggccggtataaaggatgcccaaggtctttgtacgtgtgtaggagttagcgtgtttgatattgttaatataataataattattttttagagtactgcttttgtatgtatgttgaacaggatccaggtttttatagcttgatataaaacagaattcaaaagtga

SEQ ID NO: 441201 - DNA, 2681 bp, Homo sapiens
ttacagcagaaaggccccaggtccggcgtgactccccggccgggcgacacaggccgagtcacttcctcgcccgtgcccgggtgtcctcatcgggggatgggtgcgccttccacatcctgcccaggactgaaggagccgggcccagcgagctcccgggaggtgtgtggacatcagccctgacggggaaggcgagccaggagcctgcaggcctgaaccagggtgatgctgaagatgatgaccttcttccaaggcctctagagccatcagcctgtgccaggcaccctcgacttgcctagaggcccccaaaagttgcagtccacatcagaggcagagtcagaggcctccatgtcggaggcctcctctgaggacctggtgccacccctggaggctggggcagccccatatagggaggaggaagaggcggcgaagaagaagaaggagaagaagaagaagtccaaaggcctggccaatgtgttctgcgtcttcaccaaagggaagaagaagaagggtcagcccagctcagcggagcccgaggacgcagccgggtccaggcaggggctggatggcccgccccccacagtggaggagctgaaggcggcgctggagcgcgggcagctggaggcggcgcggccgctgctggcgctggagcgggagctggcggcggcggcggcggcgggcggtgtgagcgaggaggagctggtgcggcgccagagcaaggtggaggcgctgtacgagctgctgcgcgaccaggtgctgggcgtgctgcggcggccgctggaggcgccgcccgagcggctgcgccaggcgctggccgtggtggcggagcaggagcgcgaggaccgccaggcggcggcggcggggccgaggtccccgagagcgtctttctgcacttgggccgcaccatgaaggaggacctggaggccgtggtggagcggctgaagccgctgttccccgccgagttcggcgtcgtggcggcctacgccgagagctaccaccagcacttcgcggcccacctggccgccgtggcgcagttcgagctgtgcgagcgcgacacctacatgctgctgctctgggtggagaacctctaccccaatgacatcatcaacagccccaagctggtgggtgagctgcagggtatggggctcgggagcctcctgccccccaggcagatccgactgctggaggccacattcctgtccagtgaggcggccaatgtgagggagttgatggaccgagctctggagctagaggcacggcgctgggctgaggatgtgcctccccagaggctggacggccactgccacagcgagctggccatcgacatcatccagatcacctcccaggcccaggccaaggccgagagcatcacgctggacttgggctcacagataaagcgggtgctgctggtggagctgcctgcgttcctgaggagctaccagcgcgcctttaatgaatttctggagagaggcaagcagctgacgaattacagggccaatgttattgccaacatcaacaactgcctgtccttccggatgtccatggagcagaattggcaggtaccccaggacaccctgagcctcctgctgggccccctgggtgagctcaagagccacggctttgacaccctgctccagaacctgcatgaggacctgaagccactgttcaagaggttcacgcacacccgctgggcggcccctgtggagaccctggaaaacatcatcgccactgtagacacgaggctgcctgagttctcagagctgcagggctgtttccgggaggagctcatggaggccttgcacctgcacctggtgaaggagtacatcatccaactcagcaaggggcgcctggtcctcaagacggccgagcagcagcagcagctggctgggtacatcctggccaatgctgacaccatccagcacttctgcacccagcacggctccccggcgacctggctgcagcctgctctccctacgctggccgagatcattcgcctgcaggaccccagtgccatcaagattgaggtggccacttatgccacctgctaccctgacttcaggtgagaacctggggcacctcaggaccactgtcacatcactgtggccaaggcctcacagggctggcattgggaacccagatcctggcagctgcccacgtgccagtcactgtgtgaacctcaccaggggctcattcttgtggccttcaccacagcactacgaggacaatacttcccattcccgtttcacagaggaggcctggagagctcacaggatgtgtccaaggtgacacggctagttagtgtctggctgcatggcccacactcttagctttacctgacactgcctctcacaggggagactgagaccagagaggccagcttcacccagcctggggggcctctgcggcctaggcctatgctctgggaccagggctcatattcgggagtggaggcttagcccttggctgcctgaagttctggtgggccagggacattgtttcttcctgggctgggtcctctgacatgttagggtaagtttgaatgggtcttgacagggttgaccccagcttcgccaagtccagtccctgtctgatccattccacccattcattcattcacccaccatacaagcacccatctgctcatccacccattccttcacccatctgctatccgtctatcttct

SEQ ID NO: 441202 - DNA, 2966 bp, Homo sapiens
tgtattgtgactatcagcattctggtgcaaatgaacttttctccatcatcgactgtggaaaattgatacttttaaagcatattcttctatgagcacaggtcctcctagtgaagcttagtttgacaaagggtgtcatatgctttcctaacctgatttgtagttaacattcacagagcctacattttctcattagggttatgatgctcagtatctttccaagtgccaggcacgggcttccttttctgatcaaacataccattttttgtatttcacaactatagacagtcacttctgcagtcccaatttaaaaatgcagaactgctttatccaagaatgctgaaaaatactgttctatccaggtttcctaaactataaaagcagattttgcttttgtttgttaatcataggcatggccgagcattgtggattagcctgaggcttaaaatcagatgcatgtctggtaagatgaccactgtctcactatcaagagcctgcagagccattttccagacctgtgattgcccagaacacatagtccccacgtttctaatttggagcaaatctaaaaggtgctgagggattggacagctctgactttcctcgagactatggatatagtccttctcagattagctggaaatggggacagagttctcatttatcccagatatatacattggcttttttggaatctatagattgagattttgatgaatttatattggttttaatgagacccaaatgactctctcttaacaattcaagcagtagacaaagttgctcacaaatacagaaaacatctttttgtctacttcgcaagtctcaaaacgtgataatatttaagcccatttgtagaagaaatcttgtatatactattattacaccttgatatctatacaaaacatcacttgtattaaaatatatagataactttctggcatttagaattttgttccattcatttgatttgttcatctgagaattttttttttttgcctgaaaacccattaaaagaaaacgtgccttctgtataagtttatgtttattcctacattttattcatttttaatgtatgggtaattggtggcacgtgactttacataatgactttctagactctgaaaaaaatgcttttatcatttttgcaattcagacaagggtaaacattttactttatgtaattgccacatcccaagatgtaaaacggcagtaatttatgaccacatatggaagaaattcttcaaatagctaccttacatttctgcgtatatatgaaaactgagtgatatttctcagtgtatttgcttgcatttgaatggttcaattctgttgtgtttatgtagaaaattcacaaatctgttcatttaattttttaatttgagaatttttatttcttttgactgaaaacacattagaacctatgagtaaattctgaaggttttaagatttacttcagcttgtcaccagtttcaaataaatccctaataggtaacaagtaaaatacaaattcttgtctactttcatgtggttttaaatggcagggacttcgctgagtcagtaagtataatcactctagtttattcaaggatgtgtggcaactttcaacttccatacgtatatatgtatgtatggaaggccatgtcaatactagtatcattggatataactttgattcttaatcagagggcaaattcattagagaagaatctttagtagatacacagactaatatttgtgtggaggttcttttgaccaattttattcctaagaataaacaaacccctacagttaaaatgcaaagatgcctgtcatctaagtattgaaagaatttttgcctttcaagagttgttttttaaaaatttaataaattcataaaaaagactcatatctttgcaaacaaaagaagggcagatactgggcttctacatgctatccttaagagcttctccccctcacccattcctagtgctcttggtatacacttgggaaaataatgtcctccaggagaaagtgttagagggaactaacattttaggaatgcttattcagaaaaaaatcctagagttgattcattgttttcctccatcctgcaaaagaagatccctttgttaagcagctcacttggaaatatgattcttggagtcaatgatctctaaacaaactggattatcaactatttacaacgtctatacagtataaactacctcacttgcctttcttgggaaaaaaaaaatgaatggactttaacaattgttgttacaaactgtgcctgaatcttattatttaaatcacttcagttagctttcagtgtatgtttaataatatacatttaatgatgaaaaatattttcagcaaagctttaaaaccagaaatactgtgtaactgtgatctatgtggtatactctgagagaattctgtgtcctgctcattgtcttgagtttctaaccatgtgcagatgcaagcgttcgggagtaggaattaatgtccatcttttctttcaggcattttcatctgctgtccacgtatttcacttgactgaaagctcatatgagttaaaatgtcccttcttcctagcgagcatatttcaactgttcttcataaatgtttatgtgccttaaaagactttatgttaaaggattaaatagtttctctgacaggcagtttttaactgttttccacaaataaaaataatatgtcatgggattaaaatgtttgttttcaagcatttttaacagttttacacacttacatacaccttaattaaaaattttttttctgtcagacatttaccattttctaaaactaatttgacaaatcatgacactagaaaacgccaatgttttatgtctttgcccatctcaaaagctaatattgattcttctgtcccatcagctttcattgttaagtagaatatgtatgttgcattttatccataagaaataaagagaaaaaaactaaaaaaaaaa

SEQ ID NO: 441203 - DNA, 161 bp, Homo sapiens
  misc_feature (10)..(11): n is a, c, g, or t
actatacggnngcgagaagaccacagaatggggactatggaagacagcaggagctcatttcctctgcacattttggctgttagacctgtgtgtgtgtttaaaaaaagagaagtcagtgctcactttttgtatttaaatattaaaaatgattccaactcaaa

SEQ ID NO: 441204 - DNA, 1110 bp, Homo sapiens
ggacgcgtgggtcgacccacgcgtcggacccacgcgatggctgccgccgtcgctgctgccggtgcaggggaaccccagtccccggacgaattgctcccgaaaggcgacgcggagaagcctgaggaggagctggaggaggacgacgatgaggagctagatgagaccctgtcggagagactatggggcctgacggagatgtttccggagagggtccggtccgcggccggagccacttttgatctttccctctttgtggctcagaaaatgtacaggttttccagggcagccttgtggattgggaccacttcctttatgatcctggttcttcccgttgtctttgagacggagaagttgcaaatggagcaacagcagcaactgcagcagcggcagatacttctaggacctaacacagggctctcaggaggaatgccaggggctctaccctcacttcctggaaagatctagattgttattgctgtttgagctgtctcagtgggataagtttgaaattcaagtgtttgaactgctgataatttggattttttttttttttaactttggcacattgatctatctaaacctggtggggagaattatccccacattgtctcatggaaagactcaacttgcaactgtgccctccacactatccttacttctgtctccactctgataccagagtgcagccatgcagatggttattccagctctggtcacccgactcctttcaccaaattgctcctaactggaagatctcactttccccttgtggggtaggaaccgatgccagtgggagggatgtgcccctgaccattaacgactgttttttttttttttttttaaagaatggagttgttggggcaggacatgcacacaatgtgaaacagacaaaatgcattacacctgtagtgtaaagtggccactatgaatccctatgtatgagaggagggaggcaggctgcagcttcagccacagaatggggactatggaagacagcaggagctcatttcctctgcacattttggctgttagacctgtgtgtgtgtttaaaaaaagagaagtcagtgctcactttttgtatttaaatattaaaaatgattccaactcaaa

SEQ ID NO: 441205 - DNA, 1513 bp, Homo sapiens
  misc_feature (1378)..(1378): n is a, c, g, or t
acctccgagcgcgcttccggtgtcccctacagtcatggctgccgccgtcgctgctgccggtgcaggggaaccccagtccccggacgaattgctcccgaaaggcgacgcggagaagcctgaggaggagctggaggaggacgacgatgaggagctagatgagaccctgtcggagagactatggggcctgacggagatgtttccggagagggtccggtccgcggccggagccacttttgatctttccctctttgtggctcagaaaatgtacaggttttccagggcagccttgtggattgggaccacttcctttatgatcctggttcttcccgttgtctttgagacggagaagttgcaaatggagcaacagcagcaactgcagcagcggcagatacttctaggacctaacacagggctctcaggaggaatgccaggggctctaccctcacttcctggaaagatctagattgttattgctgtttgagctgtctcagtgggataagtttgaaattcaagtgtttgaactgctgataatttggattttttttttttttaactttggcacattgatctatctaaacctggtggggagaattatccccacattgtctcatggaaagactcaacttgcaactgtgccctccacactatccttacttctgtctccactctgataccagagtgcagccatgcagatggttattccagctctggtcacccgactcctttcaccaaattgctcctaactggaagatctcactttccccttgtggggtaggaaccgatgccagtgggagggatgtgcccctgaccattaacgactgttttttttttttttttttaaagaatggagttgttggggcaggacatgcacacaatgtgaaacagacaaaatgcattacacctgtagtgtaaagtggccactatgaatccctatgtatgagaggagggaggcaggctgcagcttcagccacagaatggggactatggaagacagcaggagctcatttcctctgcacattttggctgttagacctgtgtgtgtgtttaaaaaaagagaagtcagtgctcactttttgtatttaaatattaaaaatgattccaactcaaaaaaaaaaaaaaaaaaaaaaaaaaaaaatttttggggggcctgggcccggagaaagagttttttctaaaaccctttgcgttgtgggggcgcgggggccccacgttaggtgttcagagtgtgaacccgtggggtcctataacggtgttttcctcgtagagggagaatccgcggggtccataggaaacatgaggcgcgctggggatattctctcccacctatataaaaaaaagagcgccgcgcgggggacaaccgcgcgaggcgtttttttgngaaaacatatatcccgagagaggggaggtttgcgaggagggtacaataacggggggggcttctttaccaccgagggagagtccacaaaggagaaattctccgatattttcaatttaaggcccccatccctggtgg

SEQ ID NO: 441206 - DNA, 1191 bp, Homo sapiens
acctccgagcgcgcttccggtgtcccctacagtcatggctgccgccgtcgctgctgccggtgcaggggaaccccagtccccggacgaattgctcccgaaaggcgacgcggagaagcctgaggaggagctggaggaggacgacgatgaggagctagatgagaccctgtcggagagactatggggcctgacggagatgtttccggagagggtccggtccgcggccggagccacttttgatctttccctctttgtggctcagaaaatgtacaggttttccagggcagccttgtggattgggaccacttcctttatgatcctggttcttcccgttgtctttgagacggagaagttgcaaatggagcaacagcagcaactgcagcagcggcagatacttctaggacctaacacagggctctcaggaggaatgccaggggctctaccctcacttcctggaaagatctagattgttattgctgtttgagctgtctcagtgggataagtttgaaattcaagtgtttgaactgctgataatttggattttttttttttttaactttggcacattgatctatctaaacctggtggggagaattatccccacattgtctcatggaaagactcaacttgcaactgtgccctccacactatccttacttctgtctccactctgataccagagtgcagccatgcagatggttattccagctctggtcacccgactcctttcaccaaattgctcctaactggaagatctcactttccccttgtggggtaggaaccgatgccagtgggagggatgtgcccctgaccattaacgacttttaaaaaaagggatttgtgggggcagagaattgcccccatggtggaaacagccaacaaagtgggcgttttaccacgcgtgggtagttgtataaagaggtggccacttattaaaatctccctttgtgttattgaagaagggcggggaacggcagggcgtgcagcttttcgagcccccagagatgaggggggccactagtggacagaacgagcggggagccctacatttcctctctgcaccatttgggggcgtgtaacacccgtggtgtgtgttggtgtcttcacaaaaaagagaagaacgctgggtggcccccccttttgtgggatttacaacttttttaaacactgtgatctcccccctgtgataaaaac

SEQ ID NO: 441207 - DNA, 1108 bp, Homo sapiens
agcgaagcggctgctttgggaggcggggttaggggccctgctgggccctgggtgccctagctccagtggggctcggcggctcccagtgccgcagcggggccaggaatggatgtcgctttttcggctaagacccgcgtctactccaccacagctagatgagaccctgtcggagagactatggggcctgacggagatgtttccggagagggtccggtccgcggccggagccacttttgatctttccctctttgtggctcagaaaatgtacaggttttccagggcagccttgtggattgggaccacttcctttatgatcctggttcttcccgttgtctttgagacggagaagttgcaaatggagcaacagcagcaactgcagcagcggcagatacttctaggacctaacacagggctctcaggaggaatgccaggggctctaccctcacttcctggaaagatctagattgttattgctgtttgagctgtctcagtgggataagtttgaaattcaagtgtttgaactgctgataatttggattttttttttttttaactttggcacattgatctatctaaacctggtggggagaattatccccacattgtctcatggaaagactcaacttgcaactgtgccctccacactatccttacttctgtctccactctgataccagagtgcagccatgcagatggttattccagctctggtcacccgactcctttcaccaaattgctcctaactggaagatctcactttccccttgtggggtaggaaccgatgccagtgggagggatgtgcccctgaccattaacgactgttttttttttttttttttaaagaatggagttgttggggcaggacatgcacacaatgtgaaacagacaaaatgcattacacctgtagtgtaaagtggccactatgaatccctatgtatgagaggagggaggcaggctgcagcttcagccacagaatggggactatggaagacagcaggagctcatttcctctgcacattttggctgttagacctgtgtgtgtgtttaaaaaaagagaagtcagtgctcactttttgtatttaaatattaaaaatgattccaactcaaa

SEQ ID NO: 441208 - DNA, 528 bp, Homo sapiens
  misc_feature (448)..(449): n is a, c, g, or t
acctccgagcgcgcttccggtgtcccctacagtcatggctgccgccgtcgctgctgccggtgcaggggaaccccagtccccggacgaattgctcccgaaaggcgacgcggagaagcctgaggaggagctggaggaggacgacgatgaggagctagatgagaccctgtcggagagactatggggcctgacggagatgtttccggagagggtccggtccgcggccggagccacttttgatctttccctctttgtggctcagaaaatgtacaggttttccagggcagccttgtggattgggaccacttcctttatgatcctggttcttcccgttgtctttgagacggagaagttgcaaatggagcaacagcagcaactgcagcagcggcagatacttctaggacctaacacagggcttctcagtgaggatatggccaggtgctttcttacnncctcatcttctcttgggaaaaaaggattccgtaggatatgccctactttggaatagtctttgaagaagttctttgtata

SEQ ID NO: 441209 - DNA, 509 bp, Homo sapiens
agctctctaggcctgtatgatgccttacacccctccttttcttttccagatacttctaggacctaacacagggctctcaggaggaatgccaggggctctaccctcacttcctggaaagatctagattgttattgctgtttgagctgtctcagtgggataagtttgaaattcaagtgtttgaactgctgataatttggattttttttttttttaactttggcacattgatctatctaaacctggtggggagaattatccccacattgtctcatggaaagactcaacttgcaactgtgccctccacactatccttacttctgtctccactctgataccagagtgcagccatgcagatggttattccagctctggtcacccgactcctttcaccaaattgctcctaactggaagatctcactttccccttgtggggtaggaaccgatgccagtgggagggatgtgcccctgaccattaacgactgttttttttttttttttttaaagaatgg

SEQ ID NO: 441210 - DNA, 575 bp, Homo sapiens
aatttggattttttttttttttaactttggcacattgatctatctaaacctggtggggagaattatccccacattgtctcatggaaagactcaacttgcaactgtgccctccacactatccttacttctgtctccactctgataccagagtgcagccatgcagatggttattccagctctggtcacccgactcctttcaccaaattgctcctaactggaagatctcactttccccttgtggggtaggaaccgatgccagtgggagggatgtgcccctgaccattaacgactgttttttttttttttttttaaagaatggagttgttggggcaggacatgcacacaatgtgaaacagacaaaatgcattacacctgtagtgtaaagtggccactatgaatccctatgtatgagaggagggaggcaggctgcagcttcagccacagaatggggactatggaagacagcaggagctcatttcctctgcacattttggctgttagacctgtgtgtgtgtttaaaaaaagagaagtcagtgctcactttttgtatttaaatattaaaaatgattccaact

SEQ ID NO: 441211 - DNA, 1108 bp, Homo sapiens
acctccgagcgcgcttccggtgtcccctacagtcatggctgccgccgtcgctgctgccggtgcaggggaaccccagtccccggacgaattgctcccgaaaggcgacgcggagaagcctgaggaggagctggaggaggacgacgatgaggagctagatgagaccctgtcggagagactatggggcctgacggagatgtttccggagagggtccggtccgcggccggagccacttttgatctttccctctttgtggctcagaaaatgtacaggttttccagggcagccttgtggattgggaccacttcctttatgatcctggttcttcccgttgtctttgagacggagaagttgcaaatggagcaacagcagcaactgcagcagcggcagatacttctaggacctaacacagggctctcaggaggaatgccaggggctctaccctcacttcctggaaagatctagattgttattgctgtttgagctgtctcagtgggataagtttgaaattcaagtgtttgaactgctgataatttggattttttttttttttaactttggcacattgatctatctaaacctggtggggagaattatccccacattgtctcatggaaagactcaacttgcaactgtgccctccacactatccttacttctgtctccactctgataccagagtgcagccatgcagatggttattccagctctggtcacccgactcctttcaccaaattgctcctaactggaagatctcactttccccttgtggggtaggaaccgatgccagtgggagggatgtgcccctgaccattaacgactgttttttttttttttttttaaagaatggagttgttggggcaggacatgcacacaatgtgaaacagacaaaatgcattacacctgtagtgtaaagtggccactatgaatccctatgtatgagaggagggaggcaggctgcagcttcagccacagaatggggactatggaagacagcaggagctcatttcctctgcacattttggctgttagacctgtgtgtgtgtttaaaaaaagagaagtcagtgctcactttttgtatttaaatattaaaaatgattccaactcaaa

SEQ ID NO: 441212 - DNA, 1379 bp, Homo sapiens
acctccgagcgcgcttccggtgtcccctacagtcatggctgccgccgtcgctgctgccggtgcaggggaaccccagtccccggacgaattgctcccgaaaggcgacgcggagaagcctgaggaggagctggaggaggacgacgatgaggagctagatgagaccctgtcggagagactatggggcctgacggagatgtttccggagagggtccggtccgcggccggagccacttttgatctttccctctttgtggctcagaaaatgtacaggttttccagggcagccttgtggattgggaccacttcctttatgatcctggttcttcccgttgtctttgagacggagaagttgcaaatggagcaacagcagcaactgcagcagcggcagatacttctaggacctaacacagggctctcaggaggaatgccaggggctctaccctcacttcctggaaagatctagattgttattgctgtttgagctgtctcagtgggataagtttgaaattcaagtgtttgaactgctgataatttggattttttttttttttaactttggcacattgatctatctaaacctggtggggagaattatccccacattgtctcatggaaagactcaacttgcaactgtgccctccacactatccttacttctgtctccactctgataccagagtgcagccatgcagatggttattccagctctggtcacccgactcctttcaccaaattgctcctaactggaagatctcactttccccttgtggggtaggaaccgatgccagtgggagggatgtgcccctgaccattaacgactgttttttttttttttttttaaagaatggagttgttggggcaggacatgcacacaatgtgaaacagacaaaatgcattacacctgtagtgtaaagtggccactatgaatccctatgtatgagaggagggaggcaggctgcagcttcagccacagaatggggactatggaagacagcaggagctcatttcctctgcacattttggctgttagacctgtgtgtgtgtttaaaaaaagagaagtcagtgctcactttttgtatttaaatattaaaaatgattccaactcaaagtgtcatcctaagtaccttgaaatgagaccacgtcagagacatgtactgcccctcacattttctcacctaaaccagcagcacctccatcttaacagccataggcccaaattgtttccaagtgaaaattcatttttagccaagtacttcatagcaatctttgccctgaatttaggcagtcactttgagatccatcagcctaaaacaaaggattgggtctatgtacttctttagtctataatgacactgtgtaattataaagtatttgtaggg

SEQ ID NO: 441213 - DNA, 950 bp, Homo sapiens
acctccgagcgcgcttccggtgtcccctacagtcatggctgccgccgtcgctgctgccggtgcaggggaaccccagtccccggacgaattgctcccgaaaggcgacgcggagaagcctgaggaggagctggaggaggacgacgatgaggagctagatgagaccctgtcggagagactatggggcctgacggagatgtttccggagagggtccggtccgcggccggagccacttttgatctttccctctttgtggctcagaaaatgtacaggttttccagggcagccttgtggattgggaccacttcctttatgatcctggttcttcccgttgtctttgagacggagaagttgcaaatggagcaacagcagcaactgcagcagcggcagatacttctaggacctaacacagggctctcaggaggaatgccaggggctctaccctcacttcctggaaagatctagattgttattgctgtttgagctgtctcagtgggataagtttgaaattcaagtgtttgaactgctgataatttggattttttttttttttaactttggcacattgatctatctaaacctggtggggagaattatccccacattgtctcatggaaagactcaacttgcaactgtgccctccacactatccttacttctgtctccactctgataccagagtgcagccatgcagatggttattccagctctggtcacccgactcctttcaccaaattgctcctaactggaagatctcactttccccttgtggggtaggaaccgatgccagtgggagggatgtgcccctgaccattaacgactgttttttttttttttttttaaagaatggagttgttggggcaggacatgcacacaatgtgaaacagacaaaatgcattacactacaggtgtaatgcatttggtagacgcggccgggaaatttagtaagtag

SEQ ID NO: 441214 - DNA, 879 bp, Homo sapiens
ccctggaacacctgtcttttctgagccacaaagagggaaagatcaaaagtggctccggccgcggaccggaccacttcctttatgatcctggttcttcccgttgtctttgagacggagaagttgcaaatggagcaacagcagcaactgcagcagcggcagatacttctaggacctaacacagggctctcaggaggaatgccaggggctctaccctcacttcctggaaagatctagattgttattgctgtttgagctgtctcagtgggataagtttgaaattcaagtgtttgaactgctgataatttggattttttttttttttaactttggcacattgatctatctaaacctggtggggagaattatccccacattgtctcatggaaagactcaacttgcaactgtgccctccacactatccttacttctgtctccactctgataccagagtgcagccatgcagatggttattccagctctggtcacccgactcctttcaccaaattgctcctaactggaagatctcactttccccttgtggggtaggaaccgatgccagtgggagggatgtgcccctgaccattaacgactgttttttttttttttttttaaagaatggagttgttggggcaggacatgcacacaatgtgaaacagacaaaatgcattacacctgtagtgtaaagtggccactatgaatccctatgtatgagaggagggaggcaggctgcagcttcagccacagaatggggactatggaagacagcaggagctcatttcctctgcacattttggctgttagacctgtgtgtgtgtttaaaaaaagagaagtcagtgctcactttttgtatttaaatattaaaaatgattccaactcaaa

SEQ ID NO: 441215 - DNA, 2289 bp, Homo sapiens
cagtcaggggagaggtttaagaaatctatttctaatgcagctccctcaaaggaagcttttaagatgcgcagcctcaggaaaggtaaggaccgaacagtggctgaaggtgaggaatgtgccagggagatgggtgtggacatcattgccaggagcgagtctctgggccccatcagtgagctctactctgatgagctcagtgaaccagaacacgaggcagccaggccggtgtatcctccccatgaaggaagggaaatccccacccccgagcctttaaaagttacttttaaatctcaggtgaaagtagaggatgatgaatctcttttgttagatttaaagcactcatcgtaaagaggaattaagtatatcctaaatatgaatctcctaatcatgcagttttagtttgaatagtgtagtcgtctacatttctgtgccatgtaggaaaacataaatgtattttttttcttatatttaaaatcttgaagataatataaatattattatcactctttctcatggcagctgtggattttttagttcctttctcttgtccaccagaaaaatagtttcctaggttgggccagttacgtgtttggtaagggcaactttgcggccgtcatttgcaggagaactctaaatattggttaggattaatattgtggccagcctcaaaggggaataactcatgtgtgggttatatcgtccagatgttcagatcaacagatttgttagtaaattagcagtcacaccccttttttgatgctttcacattaaaaaattgaagttttggacttgagcatttggctctagtatcatagctttacttataagaaaaccctgggcaagtcatctgcttattctcatcagtaaaaatggagagggttggcctctgctgcctgcctcagaggactgttgtgatgatcaaaggaaatggtacacattctgggggaacaagaagcacacccagagaaaacaagcctcatcagttcctccaaaacagaatggaaagagttacaccttctgaaaaagccctcagcaccaatcaataaggtcctaggttggagagaaactaaagctggtcttcagaagccttttcacagaatcaagagtgaaaaataagtaaatgtttgggtgaccactttttcatcagactaactatatcttgggttttagttgggtctcaaaatgttccccagccagaccctttctaatttccttttgattaagatctttggtggactatagcactaaatttgtttaagcagtatgaggcataaaattgtgactatgtttctaaagtcggccctgatgcattgggtttggaaatgaccacaaatattcctgttttcctgagtgtacccttcagggtccagctgtccaaaacagtgttgataggagttcatcatagctgctttgggaggaagccagattctccttatcttttagctttagatcgtggaatccaggaagtagaacaatgtctattgttgctaaagaaagaaagaaatgggccgggtgtggtggctcacggggagtaatcccagcactttgcgaggccgaggtgggtgaatcacctgaggtcagaagttcacgaccagcctgaccaacatggcgaaaccctgactctactgaaaatacaaaaattagctgggcatggtgcatgcgcctgtcccagctactcaggaggctgagacaggagaattgcctgaacccaggaggcggaggttgcagtgagccgagattgtgccactgcactcaagcctgggcaaaagagccagactctgtttcaaaaaaaaagaaaaaaagaaaagaaagaaatggtagtactgattctgtacttgaaggatgtttaatgtagcatggtgttgtaatagagaagaaatgatgaaattgttgaatttgaagagttgggacaacgatcagctatcccactttttttctcactttcagatcagtttttggataatcatatggtagttaaaataataagtgtacacatatacacacaggcatacataaatcggctttaaaatatttgactcagttactcagatgtttgggtttgggagtctgattcagcatcatttcctcttcaccttgcatgaatacatgaaatcataatatcgttcatgttgttacctttttatattgaaaactaaagtgtatacaacattggataacactttcaaatgaataattttaaaatgtttttatgacattttggaaagatcttgggtgcctaatcacatattttcttaagaaccataataaatttgaatttaagaaaatgtt

SEQ ID NO: 441216 - DNA, 496 bp, Homo sapiens
gtaccccaccgcggggtggtgctctgactgcgggaaccgttgaagagctgcccccggggagtcagcgaggcgccactggtctcttagacatcttctcaagattatgctaagagaaatgactgcacccttttcctgagctatggcagtcagacctggcagtggtaactactctacagaactcccaaacctggcaaggatggtgcagattttggcagattatggctttgtccccacccagcactgatgatattatgaaatatgacaccttcaagtataagcaaccaaagaaaactagataaattggacctcataaagtaaaacaaacaaaaaccttttgcttcaaaggataccactaagcaagcgaaaagacaacacatagaatgtgagaaaaaggttgtaaatcctatatatgacaaggcacctgtatccagaataaagaacctcttaaaactcaacaataaaaacacaaataatctaattgtaaaatagcttacaa

SEQ ID NO: 441217 - DNA, 523 bp, Homo sapiens
tccccgcttgcttccctgcccgccctgtgtgatctaactgcaagccctttcccttaagagttggagcctgtttgtccaaccttgtgatcatttccttgtggtctcttagacatcttctcaagattatgctaagagaaatgactgcacccttttcctgagctatggcagtcagacctggcagtggtaactactctacagaactcccaaacctggcaaggatggtgcagattttggcagattatggctttgtccccacccagcactgatgatattatgaaacctatactacaagaaatgataatggaagttcttcaactgagcaagaaatgatattaacagaaaacttggatcttcagaagcaaatgaagaacatcagaaatgtagcaacagctgctgagaagagatgactaaaagctgaaaagtgaagaattaacactgatttcttggcagaagcagaagcttcaggactcctgaattgagggaatgatctaaattccaaggattatctctcagtgagaacaag

SEQ ID NO: 441218 - DNA, 5714 bp, Homo sapiens
  misc_feature (336)..(336): n is a, c, g, or t
  misc_feature (962)..(962): n is a, c, g, or t
atcagaacatggagactttcaccaaaggaattgctatataaaggaatcagtatgcagacagtttggggaaagataccttctccattgttgaatgggtttttccagtgtttaccttaattatgattgggtttcattaatcagtttatattcaagaggttagtcttcatccaggagacaacgggaagtcactgaaggagtttaggcaggggtggggtataatcagatctctgtttttgaaagatgtggtggtatgaaaactgtattagagggaacataagcaggaagccaaggcaacatttatgaatcagttctagtagtccacataatgactaatgnttgataaatagggataaagtttaaagaacaaaatctaatagggattgattcgatctatgttaccgctactcagattcccaccatatagctcatgtcgtttttctacatcaagtatcttattttctttataaagaagtgttccttaaaacggagtttagatttttccagaatggacaggacaaagaactttgtctttgcctaaacattgtcccgttagttctgtgactttcattttattgcagaaatacttgtatgaataagttcatatcaatttaaacagaaaagggcttggccaggaattggacaagcagtgtcagtgcagttgtttaaaatatagagcaaagaaaaagagcaaaggaacccatgtttgctgtaggttctctcttcttcagagaccagtttttactgaatgattccagagaggtgaaaatctccatattagagttctgaagtggggagacaattgcttttgccttagaagaagcaggttcacagttttatataaaataagataattatttcatctttacttgtgtgggttatgttttagtttgctttagaaacctgatagaattctcatttgagaagttaaaagatactcttggactatcccaagcactattctngtataagtatctttaaaagttgaacgaatgccaagctatttacacaaatacaagtctgctctttaggtgcaattggcacttgatattggtaaggtgtaatttttaacagcctttgaaacctgttatagtggcttcccctttcaaggaagatttcatttggatacatacaaaacagatatgacaacacagatttgtttttggaaggtagatccagctttcttaattgtctgagtttccttaaattcaacctttttacatttctgttctttaggtctgccaaaatgtctgaaagatcagatctccttcacttcaagtttgaaaattatggagattcaatgttacaaaaaatgaacaaattaagagaagagaataaattttgtgatgttacagttctcatagatgatattgaggtacagggacataaaattgtgtttgctgcaggttcccccttcttaagagaccaatttttactgaatgattccagagaggtgaaaatctccatattacagagttccgaagtggggagacaattgctcttatcctgttatagtggtgtgctggaattccctgagatggaactggtaaattacttgactgctgcaagttttcttcagatgagccacattgtagaacggtgcacacaggccctgtggaagtttataaagccaaaacaaccaatggatagtaaagagggatgtgaaccacagagtgcttctccccagtcaaaagaacagcagggagatgccagaggctccccaaagcaggactcaccttgtattcatccatctgaagacagtatggatatggaggacagtgatattcagattgttaaggtagaatctattggggatgtatcagaggttagaagtaaaaaagatcagaaccagtttatttcttctgaacccactgctttacattcatcagagccccagcactccctgataaattcaactgtggaaaacagagtaagtgaaatagaacaaaaccatctccacaattatgccctttcttatacaggcagtgataacatcatcatggcctcaaaagatgtctttggccctaatattcgaggtgtagacaaaggcctacagtggcatcaccagtgcccaaagtgtaccagggtgtttcgtcacctggagaactacgccaaccatttaaaaatgcacaaactctttatgtgtctactctgcggcaagactttcactcagaaaggcaaccttcatcgacacatgcgtgtgcatgccggaattaaacctttccagtgtaaaatctgtgggaaaaccttttctcagaagtgttccttacaggatcatcttaaccttcacagtggagataagccccataaatgtaactattgtgatatggtttttgcacataaaccagttttgaggaaacaccttaaacagctgcatggcaaaaacagctttgataatgccaatgagagaaatgtacaagacctcacagtggattttgattcttttgcatgtacaacagtcacagactctaaagggtgtcagccacaacccgatgcaacacaggtcctggatgcaggtaaactggcccaagctgtcctgaacttaagaaatgatagtacttgtgtgaattgagtaggggcttcatgctcacaactcgaactgactgacaatgtggcaatagtcttagtctttttaggagtgattttgctagtttgacttctccaaagcctctgtgtaggtggtagggagtgagtcaaagcactaatagaccaggcaacttaccacttggagtggatttgccttacttttgccctctcccattttctgttttgagttatttatcttgtaaagtctgttttcctttcccaaggaataattccttttgtctacctaacattgacttatgtcttagactgacactgttttaggcttttcactaggcacattccgaaggtaccaacaagttaataacatcacctactctccactaatagatgctatgctaagagaagtgaataatctttctttggtagaaaataggctgagatataaggtgatattgctattgacctgaaaatgtgatagaacttctggttgcctattgattattcctccatgtctgataaatgaatctgcttcctaccatttgtacttgtcttggagctggctataaagaagtatgctggtttgttatgtactcttttcaacagtatcatagcccaacttcatctcattgaattgttcacatataccagagtactctctcttgaggaacacctgcaggcagatagttagggatgaccatgaggagcataatcaacagggatagaagtacacttatacaacagcacttacatgggcggtttctctggtagcatgtcccataagaggccatatgcttataattaatgtgtaacttgttgatgcttttgagatcaggactgctccaggcacgctaaaaatgtgctaaagtatagtgggctctctaaaaagaggctatttgggagtctctgaattttgtttcagagtttagccatcagaaaggtgagtttggccatcagagttttgtcctgtgcaccataaaagtctctgaattttcgtttcctcatgtaccttaatttctaaaacggatgataaaagttaggttggacacagaaggggcaatcaaatttctgtattcagatacctcttaaaggtacactgtgccaccttgctgcctttgattgcaaatacaaagttaattttcaaaaaggaaaaacaaaacagctctttttcctaaaacacatgttgtacttcagacctaaaattctaagtcttatttgtttctcacccatgagttagatttaggtaatagtattagtagagtccttagagaatcttaagaggtcatttactccacctctttcattttaaattggggtatccaaagcctgaagaggtggcctggccaatattgaccaaggtataactaaatatgagctagcatcttcttccttcttctcgctatcccttggctttaaaagatttagtacatgaagaataatgcattagcaaaaagctcctagtttgtgtttcccctttgtgtctccctgttggctttctgagacaacctgaattttgccaacaaaatatcgcagagggatttatattaattattttttagttagatgaatattatattcttcccatccaagtgagtgatttgctaggtttgtttagggagggaaaaagcaagaataatgtgagaagaatctaaatgcgaagttgattttgtgtggaaaactgtttattagtttccatcaggattttctgtttttatttttgagctatgagagtgcatgcagatttgaaaaattaggcttgcatagtcagaggggatcttcaattgttatatttgatacgtttacatgtatcattgttatcatatgtaaattatcatcatgtgagtcagatgtgaagtatgatttttgtcttttgttcaaatatttaaaatgataatacagttgagtggtaagactaataggtaccttatgcctaacatcactcattatatggtctaatgatgcttcctagcattgtgatttttacatgatccagccaaagagtaccaattctatgcaatagtgagactctaccctgtcaaccaaacagcattttttggtattttctgtcaacatcatttcttcacagggaaatttcaagttggagtgcttcgtttgctcacattcatgtcttgtttttgttactggtttgaagactaaaaggcacgggttcaaataagattggtctctttggttggagactatttctgggttcattcagttgttcaagaaacattagttaagcacctactgttgctagacactatgctagatactgaggataatgaaggtaagattgatatagtccctgccctcatggagcttatagtctcatgtggtcttagtgaaacaaagtctcaatttgcttttatactagaaataataaagaaagctgccttgctgtattcgatcagttaaaatcagcaactttgtgcttttgtatcagtaaaacatttagttctcaccttttgaaaatgcaaaccactgaagtgatttacagtctcctccatttttggctggagaggtgttctgtttctgtgagacatttttctaatttttgtggaacttcactttcctccttctttgcttatacgtgtttgttagattatattgcaaagaagtcaagttactgatatccagtattttacagaggaagatgactttcaaaactagtcatatttctgtagaggaggaagatttttaaaacctttatcattcagcatttgtattttatggatccccaggagaactaaaaaggagatgactctctaccatagtttggtttaaaaaaaaattactctgtcagttatttatttattatttaatactaaactccaaactgaagtggctctgaggtaaatcagatatgattttaatttaagtttctttattagcagatctataaatggaaggtgaccaatgtcactgcttctaaaatactgtcctaaacaacccagaagattttatttcagctcatgaatagctgttctaaatctgttgtatgttagacatactatgaactacctcttcacttattatggggaagtttccttaataaaagtgtgacgattaagctctggtgtcattggttattttctcactctcccctccttctattcttttttaattgctttactttgaatacaggaaggtcttctttatgtatagtcttaaaa

SEQ ID NO: 441219 - DNA, 919 bp, Homo sapiens
acatgagactataagctccatgagggcaggactatatcaatcttaccttcattatcctcatggagcttatagtctcatgtggtcttagtgaaacaaagtctcaatttgcttttatactagaaataataaagaaagctgccttgctgtattcgatcagttaaaatcagcaactttgtgcttttgtatcagtaaaacatttagttctcaccttttgaaaatgcaaaccactgaagtgatttacagtctcctccatttttggctggagaggtgttctgtttctgtgagacatttttctaatttttgtggaacttcactttcctccttctttgcttatacgtgtttgttagattatattgcaaagaagtcaagttactgatatccagtattttacagaggaagatgactttcaaaactagtcatatttctgtagaggaggaagatttttaaaacctttatcattcagcatttgtattttatggatccccaggagaactaaaaaggagatgactctctaccatagtttggtttaaaaaaaaattactctgtcagttatttatttattatttaatactaaactccaaactgaagtggctctgaggtaaatcagatatgattttaatttaagtttctttattagcagatctataaatggaaggtgaccaatgtcactgcttctaaaatactgtcctaaacaacccagaagattttatttcagctcatgaatagctgttctaaatctgttgtatgttagacatactatgaactacctcttcacttattatggggaagtttccttaataaaagtgtgacgattaagctctggtgtcattggttattttctcactctcccctccttctattcttttttaattgctttactttgaatacaggaaggtcttctttatgtatagtcttaaaa

SEQ ID NO: 441220 - DNA, 4545 bp, Homo sapiens
cggagccccgaggggccggagctcctggcggtgccggatcctgacggcggcttcccccgggtctgtctgccaaaatgtctgaaagatcagatctccttcacttcaagtttgaaaattatggagattcaatgttacaaaaaatgaacaaattaagagaagagaataaattttgtgatgttacagttctcatagatgatattgaggtacagggacataaaattgtgtttgctgcaggttcccccttcttaagagaccaatttttactgaatgattccagagaggtgaaaatctccatattacagagttccgaagtggggagacaattgctcttatcctgttatagtggtgtgctggaattccctgagatggaactggtaaattacttgactgctgcaagttttcttcagatgagccacattgtagaacggtgcacacaggccctgtggaagtttataaagccaaaacaaccaatggatagtaaagagggatgtgaaccacagagtgcttctccccagtcaaaagaacagcagggagatgccagaggctccccaaagcaggactcaccttgtattcatccatctgaagacagtatggatatggaggacagtgatattcagattgttaaggtagaatctattggggatgtatcagaggttagaagtaaaaaagatcagaaccagtttatttcttctgaacccactgctttacattcatcagagccccagcactccctgataaattcaactgtggaaaacagagtaagtgaaatagaacaaaaccatctccacaattatgccctttcttatacaggcagtgataacatcatcatggcctcaaaagatgtctttggccctaatattcgaggtgtagacaaaggcctacagtggcatcaccagtgcccaaagtgtaccagggtgtttcgtcacctggagaactacgccaaccatttaaaaatgcacaaactctttatgtgtctactctgcggcaagactttcactcagaaaggcaaccttcatcgacacatgcgtgtgcatgccggaattaaacctttccagtgtaaaatctgtgggaaaaccttttctcagaagtgttccttacaggatcatcttaaccttcacagtggagataagccccataaatgtaactattgtgatatggtttttgcacataaaccagttttgaggaaacaccttaaacagctgcatggcaaaaacagctttgataatgccaatgagagaaatgtacaagacctcacagtggattttgattcttttgcatgtacaacagtcacagactctaaagggtgtcagccacaacccgatgcaacacaggtcctggatgcaggtaaactggcccaagctgtcctgaacttaagaaatgatagtacttgtgtgaattgagtaggggcttcatgctcacaactcgaactgactgacaatgtggcaatagtcttagtctttttaggagtgattttgctagtttgacttctccaaagcctctgtgtaggtggtagggagtgagtcaaagcactaatagaccaggcaacttaccacttggagtggatttgccttacttttgccctctcccattttctgttttgagttatttatcttgtaaagtctgttttcctttcccaaggaataattccttttgtctacctaacattgacttatgtcttagactgacactgttttaggcttttcactaggcacattccgaaggtaccaacaagttaataacatcacctactctccactaatagatgctatgctaagagaagtgaataatctttctttggtagaaaataggctgagatataaggtgatattgctattgacctgaaaatgtgatagaacttctggttgcctattgattattcctccatgtctgataaatgaatctgcttcctaccatttgtacttgtcttggagctggctataaagaagtatgctggtttgttatgtactcttttcaacagtatcatagcccaacttcatctcattgaattgttcacatataccagagtactctctcttgaggaacacctgcaggcagatagttagggatgaccatgaggagcataatcaacagggatagaagtacacttatacaacagcacttacatgggcggtttctctggtagcatgtcccataagaggccatatgcttataattaatgtgtaacttgttgatgcttttgagatcaggactgctccaggcacgctaaaaatgtgctaaagtatagtgggctctctaaaaagaggctatttgggagtctctgaattttgtttcagagtttagccatcagaaaggtgagtttggccatcagagttttgtcctgtgcaccataaaagtctctgaattttcgtttcctcatgtaccttaatttctaaaacggatgataaaagttaggttggacacagaaggggcaatcaaatttctgtattcagatacctcttaaaggtacactgtgccaccttgctgcctttgattgcaaatacaaagttaattttcaaaaaggaaaaacaaaacagctctttttcctaaaacacatgttgtacttcagacctaaaattctaagtcttatttgtttctcacccatgagttagatttaggtaatagtattagtagagtccttagagaatcttaagaggtcatttactccacctctttcattttaaattggggtatccaaagcctgaagaggtggcctggccaatattgaccaaggtataactaaatatgagctagcatcttcttccttcttctcgctatcccttggctttaaaagatttagtacatgaagaataatgcattagcaaaaagctcctagtttgtgtttcccctttgtgtctccctgttggctttctgagacaacctgaattttgccaacaaaatatcgcagagggatttatattaattattttttagttagatgaatattatattcttcccatccaagtgagtgatttgctaggtttgtttagggagggaaaaagcaagaataatgtgagaagaatctaaatgcgaagttgattttgtgtggaaaactgtttattagtttccatcaggattttctgtttttatttttgagctatgagagtgcatgcagatttgaaaaattaggcttgcatagtcagaggggatcttcaattgttatatttgatacgtttacatgtatcattgttatcatatgtaaattatcatcatgtgagtcagatgtgaagtatgatttttgtcttttgttcaaatatttaaaatgataatacagttgagtggtaagactaataggtaccttatgcctaacatcactcattatatggtctaatgatgcttcctagcattgtgatttttacatgatccagccaaagagtaccaattctatgcaatagtgagactctaccctgtcaaccaaacagcattttttggtattttctgtcaacatcatttcttcacagggaaatttcaagttggagtgcttcgtttgctcacattcatgtcttgtttttgttactggtttgaagactaaaaggcacgggttcaaataagattggtctctttggttggagactatttctgggttcattcagttgttcaagaaacattagttaagcacctactgttgctagacactatgctagatactgaggataatgaaggtaagattgatatagtccctgccctcatggagcttatagtctcatgtggtcttagtgaaacaaagtctcaatttgcttttatactagaaataataaagaaagctgccttgctgtattcgatcagttaaaatcagcaactttgtgcttttgtatcagtaaaacatttagttctcaccttttgaaaatgcaaaccactgaagtgatttacagtctcctccatttttggctggagaggtgttctgtttctgtgagacatttttctaatttttgtggaacttcactttcctccttctttgcttatacgtgtttgttagattatattgcaaagaagtcaagttactgatatccagtattttacagaggaagatgactttcaaaactagtcatatttctgtagaggaggaagatttttaaaacctttatcattcagcatttgtattttatggatccccaggagaactaaaaaggagatgactctctaccatagtttggtttaaaaaaaaattactctgtcagttatttatttattatttaatactaaactccaaactgaagtggctctgaggtaaatcagatatgattttaatttaagtttctttattagcagatctataaatggaaggtgaccaatgtcactgcttctaaaatactgtcctaaacaacccagaagattttatttcagctcatgaatagctgttctaaatctgttgtatgttagacatactatgaactacctcttcacttattatggggaagtttccttaataaaagtgtgacgattaagctctggtgtcattggttattttctcactctcccctccttctattcttttttaattgctttactttgaatacaggaaggtcttctttatgtatagtcttaaaa

SEQ ID NO: 441221 - DNA, 1103 bp, Homo sapiens
agcattgcacctttaataggcttttctctctctctttttcctgagccctggaggcttcctggattgagacctagcctaggtctgcataagcacctttccatcttgttaatgtttaacactgcctctgctggaaaacagctctcacctcctctctttctgtctcttattttttgcctttgcagatgagttttgatcatcctgagaaaaatgggccttggcctgcagacccaataaaccttccctcccatggataatagtgctaattcctgaggacctgaagggcctgccgcccctgggggattagccagaagcaggtaaggaacacacagaggcatgggctagcaaaggggtacattcctgagtaaaagctggtgtggcagatgtcctggcagggaatctcaggatctcagtatctggctccagctttgctgttttctttttgtatgtattttttagtcctctttaactgctgattcaatgtgggtttcattggggggtgtagagaaatggcttgtccatttctattaactatataagatttaagttattctgtatttcagtcaaccattctgagtacctactacctgccacgaatgcaactggtactgagtatgtcatgacgggtgggtcgggacaggatttccttgctttgagcattgatttctgccggttcagtgttggccagttctttgaaggtgatgatgcaagtcgctgtgttcttcctctagaagcctcgtgatgattgtaaagattctctgatacaattgcatcagttcaataatctttcattgagtatccgctctggtccaggcactgtgctgggtactagggtttcagaaaggataccaggaggagttttccttgagcagcaaagtcaggcatgaaaagcaagcattacaaagcactggctggcagcaaaggggagcagggatagtgcggaaggggaggtggcctccactgaccttcagaagcagaaaggtgatgctgtcagagctggcaggcacatggacaaggagaaagagtgcagcagtgcagacacctggaggcttaacacagtctggtgtaattggaaaattcaaagcttagtgtgtttttccaaaaca

SEQ ID NO: 441222 - DNA, 865 bp, Homo sapiens
cctcaggttcctaaatggaacgcctgggggttgtcttggatgccatagttaaatcctgtccatttgctgagcactgcatgcttttcaaagtgcaatggggtcctttgcacttgtgggatacactgaacatatggtagtgttttcatttttctgacagagatagaaatataatctactggtgataccaagagaatatctggtttgctgctttgataactggagtagctactccactgtaagtagcacactggctttgttcacttttctgtgtgcccaggcacaagcgaatgtctttgaatgggtttcaggaatgccacagtatggcccccttcagcccttacagtggctggcagacaggtggtcatctctgcctaggagctttacctgagcaccacacaaatactgccatttcgccctgtggatcatgatggggtaaagatggggaagcattattcccttgccccctcccccgcctctcgtctttctctttttctgcatattgccagtgctcatcacctcttttctgtttctttgtggtttatagatgatcatgacgcagtcctgaggtttaatggggcacccacagccaacttccaacaagatgtgggcacaaaaactaccattcgcctgatgaactctcaggtaaaatttcttctgtgcagctatggagtaagagaaggaccacagtgtgggctctaatgtggaatgtatctactgggagcatatctaggctgccaattaagtctcttgatcttcctgagttcctgattcctcactggagaagaagacaatgattccatgacccaactgatgatgtgttttttaaagaaaaaccctttagtattagtgtctgctaatggaggtg

SEQ ID NO: 441223 - DNA, 270 bp, Homo sapiens
gtggtacttaagctccaagaacttacggcacacctgcttgagtggatcatgggtgagctggagaacctgaagtagcaaaggcaagaaggcaacgacgttccatctgtggaaggacctaccaaccaggtatctctggtgacagggctcatctcataggtggcccactgtacatcataccctgatgttttctttgcatgacgtgctatagaattccaggctcatgcacacctttctgctctcctgttttgcaaatgtctgcactctagagtc

SEQ ID NO: 441224 - DNA, 374 bp, Homo sapiens
cattttttcaacaaatatatgccatggaaaagaagaagtaagggagcgaggaactcttctagataagagagaattgaaaatggcacatcatccagtcatccaaacaaaatgtcctgtccttgtttggatccccttttgagcaggttagtgtaaaagacattattgagagaattggtaaacatttaaaggtgggttggatattgggtgatattggcattgtgatcatattgaattattatttatattcatatattctctggcagaacctggtgcgtgtgtgtgtgtgtgtgtgtgtgtgtgtgtgtctgtgtgtgtgtgtctcacagtgtagagaatctgagggtctacgttctcaattctcccaggggtggtac

SEQ ID NO: 441225 - DNA, 4283 bp, Homo sapiens
ggaggaggttcctgtagggcggcacaaccagggagggcgtggaagctctgcatcccttctcccataccttgctctacacatctcttcatctgtatcctctgcagcatccttgatgataaaccagtaaatatgagttttgatcatcctgagaaaaatgggccttggcctgcagacccaataaaccttccctcccatggataatagtgctaattcctgaggacctgaagggcctgccgcccctgggggattagccagaagcaggcttgttttcctgctcagaacaaagtgacttccctgaacacatcttcattatgattcacaccaacctgaagaaaaagttcagctgctgcgtcctggtctttcttctgtttgcagtcatctgtgtgtggaaggaaaagaagaaagggagttactatgattcctttaaattgcaaaccaaggaattccaggtgttaaagagtctggggaaattggccatggggtctgattcccagtctgtatcctcaagcagcacccaggacccccacaggggccgccagaccctcggcagtctcagaggcctagccaaggccaaaccagaggcctccttccaggtgtggaacaaggacagctcttccaaaaaccttatccctaggctgcaaaagatctggaagaattacctaagcatgaacaagtacaaagtgtcctacaaggggccaggaccaggcatcaagttcagtgcagaggccctgcgctgccacctccgggaccatgtgaatgtatccatggtagaggtcacagattttcccttcaatacctctgaatgggagggttatctgcccaaggagagcattaggaccaaggctgggccttggggcaggtgtgctgttgtgtcgtcagcgggatctctgaagtcctcccaactaggcagagaaatcgatgatcatgacgcagtcctgaggtttaatggggcacccacagccaacttccaacaagatgtgggcacaaaaactaccattcgcctgatgaactctcagttggttaccacagagaagcgcttcctcaaagacagtttgtacaatgaaggaatcctaattgtatgggacccatctgtataccactcagatatcccaaagtggtaccagaatccggattataatttctttaacaactacaagacttatcgtaagctgcaccccaatcagcccttttacatcctcaagccccagatgccttgggagctatgggacattcttcaagaaatctccccagaagagattcagccaaaccccccatcctctgggatgcttggtatcatcatcatgatgacgctgtgtgaccaggtggatatttatgagttcctcccatccaagcgcaagactgacgtgtgctactactaccagaagttcttcgatagtgcctgcacgatgggtgcctaccacccgctgctctatgagaagaatttggtgaagcatctcaaccagggcacagatgaggacatctacctgcttggaaaagccacactgcctggcttccggaccattcactgctaagcacaggctcctcactcttctccatcaggcattaaatgaatggtctcttggccaccccagcctgggaagaacattttcctgaacaattccagcctgctccttttactctaggggcctctgtcagcaagaccatggggacttcaagagcctgtggtcaggaaatcaggtccagccttccctgtagccagacagtttatgagcccagagcctcctgccacacacatgcacacatatctagcattctttccagacagcatcctccccgccttccaccttggtagatgcaaggtctatctctcccatcagggctgccaaagctgggctttgtttttcccagcagaatgatgccattctcacaaaccaatgctctatattgcttgaagtctgcatctaaatattgatttcacgttttaaagaaattctcttaaattacaattgtgcccaatgcagggtggctctggggggcaagtaggtggtacaggggattggaaacatgctccgcgcctccagagaaaagttgctcccgaggtccatgcccctggaacgtgttcctatcactctggctggttgggctggtccttagactgggtgcttatgattaaagggtcttggttagcccactttccctctccatgtggagatggaaggtagagaaggatacagtgtctatcctcaagttgctacggttcagtgagagaggcagacatctgaacaggcaggtaggattcagtgtgctcagtgcactggggatttggagagagatgggcttgctctctctgtgcacccaggagggccacgcacttaaaactgtgtttgtggatcagagaaggctttatagcacagggggcattcagatgagtcttagaggaagagaagaaacatggcaagcagattacatctgagccgtttgaattgtgtttttctttcttcccatgtttattttctaagatctacctgaacttagagactcaagatatttttttaggaaacctcctacccatgtctgaggtagcaagtgcagcctcacgacagataccaggcaatccagagccacaaaacgtgattcctccaggctctgcctggcctgaccctgtcctgtcagctgggtttacataccagtcccattcttccttttcaatacctacccccaaatcttctcctaaccaccatctgttttttttttttaaaagcattttttgctttaaaagcatcctgaccccaatttctttgagctcacgggccttttgctgaaggtctctcagggtgtagtggtgtggctctctggacttaacgtcactctcagaggtcagaaccttggagatcagaactgattctcaccaggtgtgagaggtgtggtagcagattgcaatgctctgcacctcttccttgcaagtgagcaacttcaggctctctgggcagaggctggcccactgtagtttgcagacatgctctccagatggttttactaagtcccctctccctgatagggaatcctgctggaccagcgcagccctggtgtggagaggttaaaagacttgcacaggatcaccaagtcatgctgtagagccaggattcctagacccagggctctgcactctcaaggctggccccatgtgctcaaggggatctaatgtttgggctccaaactaaccatctcggagctgggctcctcatttactgccaaaccctcagcttatgtagctagaaagggccctggagtgagaaagcctggattttcaaattgatgctcccctactgactagctgtgccactctgggcaaatgctcttccttgagcctgtttccacacctgtaaagtggggatgatgatcctatctcactgcttttgtgaggattacaggaaagcacctgtcctggctctgtacctggcacgtagtaggtgctcagttcatgctggtttccttcctgcctttagtagggacctgctctgtgctcacacctcggctgcatgcaccctgctgtgacggaggctagtgtggaagaggtcctgtcctcagggaattaactgtcttattgggagacaacaactgtcctccttggaacacccaagaaaccatgcaaagcagtggacaacacagaacacgccctcctcctcgctgcctgcagctccaatctgattctgcttgggaatgggcggagcacgtgggctgcttaactgctgtataggacaagccccttacccctctctgggcccatgaattcctggcttggtttatgttctgatttgacacactgattttaatcttcgaatcatgacactgagtgcagaggaggtggcattccgacagcaggacatacatgttggtgtgaagactgggacgacactgggtagaatctagtttttaattattattaatataaaggatcaaattaatttaaatatgattctgaagtctacagaacttttagttctgtgctgtctatgtggacactttggtaaaatgcaaattatgatatggacgttatcattggtctggtgagatgtttcatatttgtgacagttaatttaaaaattatgagttaatgctgcctgtgtctatggggttctgtcttctttgatagccatctattcatctggatcatgggaccctctctaatccttccaccaatcaaataagctattgctattggtttggagttgagatatcagtctcggaaacttctgaaaaatgctaataattacccaaggattatgtcaaattttaaaataaatgtgtgtgtgtttctttaa

SEQ ID NO: 441226 - DNA, 4458 bp, Homo sapiens
ggaggaggttcctgtagggcggcacaaccagggagggcgtggaagctctgcatcccttctcccataccttgctctacacatctcttcatctgtatcctctgcagcatccttgatgataaaccagtaaatatgagttttgatcatcctgagaaaaatgggccttggcctgcagacccaataaaccttccctcccatggataatagtgctaattcctgaggacctgaagggcctgccgcccctgggggattagccagaagcaggcttgttttcctgctcagaacaaagtgacttccctgaacacatcttcattatgattcacaccaacctgaagaaaaagttcagctgctgcgtcctggtctttcttctgtttgcagtcatctgtgtgtggaaggaaaagaagaaagggagttactatgattcctttaaattgcaaaccaaggaattccaggtgttaaagagtctggggaaattggccatggggtctgattcccagtctgtatcctcaagcagcacccaggacccccacaggggccgccagaccctcggcagtctcagaggcctagccaaggccaaaccagaggcctccttccaggtgtggaacaaggacagctcttccaaaaaccttatccctaggctgcaaaagatctggaagaattacctaagcatgaacaagtacaaagtgtcctacaaggggccaggaccaggcatcaagttcagtgcagaggccctgcgctgccacctccgggaccatgtgaatgtatccatggtagaggtcacagattttcccttcaatacctctgaatgggagggttatctgcccaaggagagcattaggaccaaggctgggccttggggcaggtgtgctgttgtgtcgtcagcgggatctctgaagtcctcccaactaggcagagaaatcgatgatcatgacgcagtcctgaggtttaatggggcacccacagccaacttccaacaagatgtgggcacaaaaactaccattcgcctgatgaactctcagttggttaccacagagaagcgcttcctcaaagacagtttgtacaatgaaggaatcctaattgtatgggacccatctgtataccactcagatatcccaaagtggtaccagaatccggattataatttctttaacaactacaagacttatcgtaagctgcaccccaatcagcccttttacatcctcaagccccagatgccttgggagctatgggacattcttcaagaaatctccccagaagagattcagccaaaccccccatcctctgggatgcttggtatcatcatcatgatgacgctgtgtgaccaggtggatatttatgagttcctcccatccaagcgcaagactgacgtgtgctactactaccagaagttcttcgatagtgcctgcacgatgggtgcctaccacccgctgctctatgagaagaatttggtgaagcatctcaaccagggcacagatgaggacatctacctgcttggaaaagccacactgcctggcttccggaccattcactgctaagcacaggctcctcactcttctccatcaggcattaaatgaatggtctcttggccaccccagcctgggaagaacattttcctgaacaattccagcctgctccttttactctaggggcctctgtcagcaagaccatggggacttcaagagcctgtggtcaggaaatcaggtccagccttccctgtagccagacagtttatgagcccagagcctcctgccacacacatgcacacatatctagcattctttccagacagcatcctccccgccttccaccttggtagatgcaaggtctatctctcccatcagggctgccaaagctgggctttgtttttcccagcagaatgatgccattctcacaaaccaatgctctatattgcttgaagtctgcatctaaatattgatttcacgttttaaagaaattctcttaaattacaattgtgcccaatgcagggtggctctggggggcaagtaggtggtacaggggattggaaacatgctccgcgcctccagagaaaagttgctcccgaggtccatgcccctggaacgtgttcctatcactctggctggttgggctggtccttagactgggtgcttatgattaaagggtcttggttagcccactttccctctccatgtggagatggaaggtagagaaggatacagtgtctatcctcaagttgctacggttcagtgagagaggcagacatctgaacaggcaggtaggattcagtgtgctcagtgcactggggatttggagagagatgggcttgctctctctgtgcacccaggagggccacgcacttaaaactgtgtttgtggatcagagaaggctttatagcacagggggcattcagatgagtcttagaggaagagaagaaacatggcaagcagattacatctgagccgtttgaattgtgtttttctttcttcccatgtttattttctaagatctacctgaacttagagactcaagatatttttttaggaaacctcctacccatgtctgaggtagcaagtgcagcctcacgacagataccaggcaatccagagccacaaaacgtgattcctccaggctctgcctggcctgaccctgtcctgtcagctgggtttacataccagtcccattcttccttttcaatacctacccccaaatcttctcctaaccaccatctgttttttttttttaaaagcattttttgctttaaaagcatcctgaccccaatttctttgagctcacgggccttttgctgaaggtctctcagggtgtagtggtgtggctctctggacttaacgtcactctcagaggtcagaaccttggagatcagaactgattctcaccaggtgtgagaggtgtggtagcagattgcaatgctctgcacctcttccttgcaagtgagcaacttcaggctctctgggcagaggctggcccactgtagtttgcagacatgctctccagatggttttactaagtcccctctccctgatagggaatcctgctggaccagcgcagccctggtgtggagaggttaaaagacttgcacaggatcaccaagtcatgctgtagagccaggattcctagacccagggctctgcactctcaaggctggccccatgtgctcaaggggatctaatgtttgggctccaaactaaccatctcggagctgggctcctcatttactgccaaaccctcagcttatgtagctagaaagggccctggagtgagaaagcctggattttcaaattgatgctcccctactgactagctgtgccactctgggcaaatgctcttccttgagcctgtttccacacctgtaaagtggggatgatgatcctatctcactgcttttgtgaggattacaggaaagcacctgtcctggctctgtacctggcacgtagtaggtgctcagttcatgctggtttccttcctgcctttagtagggacctgctctgtgctcacacctcggctgcatgcaccctgctgtgacggaggctagtgtggaagaggtcctgtcctcagggaattaactgtcttattgggagacaacaactgtcctccttggaacacccaagaaaccatgcaaagcagtggacaacacagaacacgccctcctcctcgctgcctgcagctccaatctgattctgcttgggaatgggcggagcacgtgggctgcttaactgctgtataggacaagccccttacccctctctgggcccatgaattcctggcttggtttatgttctgatttgacacactgattttaatcttcgaatcatgacactgagtgcagaggaggtggcattccgacagcaggacatacatgttggtgtgaagactgggacgacactgggtagaatctagtttttaattattattaatataaaggatcaaattaatttaaatatgattctgaagtctacagaacttttagttctgtgctgtctatgtggacactttggtaaaatgcaaattatgatatggacgttatcattggtctggtgagatgtttcatatttgtgacagttaatttaaaaattatgagttaatgctgcctgtgtctatggggttctgtcttctttgatagccatctattcatctggatcatgggaccctctctaatccttccaccaatcaaataagctattgctattggtttggagttgagatatcagtctcggaaacttctgaaaaatgctaataattacccaaggattatgtcaaattttaaaataaatgtgtgtgtgtttctttaaaaagacacaaagagaaacaacacacaaaaacaaaactagacgcgaccctagggagcggagacaaagcaacaaaaaacacatggaccgcccggtagagaaacaacaaaatgtgggggggcgcggaggatacaaaaatgggggggggggagaaaggggggtcccaaacaggcggagg

SEQ ID NO: 441227 - DNA, 4230 bp, Homo sapiens
ggaggaggttcctgtagggcggcacaaccagggagggcgtggaagctctgcatcccttctcccataccttgctctacacatctcttcatctgtatcctctgcagcatccttgatgataaaccagtaaatatgagttttgatcatcctgagaaaaatgggccttggcctgcagacccaataaaccttccctcccatggataatagtgctaattcctgaggacctgaagggcctgccgcccctgggggattagccagaagcaggcttgttttcctgctcagaacaaagtgacttccctgaacacatcttcattatgattcacaccaacctgaagaaaaagttcagctgctgcgtcctggtctttcttctgtttgcagtcatctgtgtgtggaaggaaaagaagaaagggagttactatgattcctttaaattgcaaaccaaggaattccaggtgttaaagagtctggggaaattggccatggggtctgattcccagtctgtatcctcaagcagcacccaggacccccacaggggccgccagaccctcggcagtctcagaggcctagccaaggccaaaccagaggcctccttccaggtgtggaacaaggacagctcttccaaaaaccttatccctaggctgcaaaagatctggaagaattacctaagcatgaacaagtacaaagtgtcctacaaggggccaggaccaggcatcaagttcagtgcagaggccctgcgctgccacctccgggaccatgtgaatgtatccatggtagaggtcacagattttcccttcaatacctctgaatgggagggttatctgcccaaggagagcattaggaccaaggctgggccttggggcaggtgtgctgttgtgtcgtcagcgggatctctgaagtcctcccaactaggcagagaaatcgatgatcatgacgcagtcctgaggtttaatggggcacccacagccaacttccaacaagatgtgggcacaaaaactaccattcgcctgatgaactctcagttggttaccacagagaagcgcttcctcaaagacagtttgtacaatgaaggaatcctaattgtatgggacccatctgtataccactcagatatcccaaagtggtaccagaatccggattataatttctttaacaactacaagacttatcgtaagctgcaccccaatcagcccttttacatcctcaagccccagatgccttgggagctatgggacattcttcaagaaatctccccagaagagattcagccaaaccccccatcctctgggatgcttggtatcatcatcatgatgacgctgtgtgaccaggtggatatttatgagttcctcccatccaagcgcaagactgacgtgtgctactactaccagaagttcttcgatagtgcctgcacgatgggtgcctaccacccgctgctctatgagaagaatttggtgaagcatctcaaccagggcacagatgaggacatctacctgcttggaaaagccacactgcctggcttccggaccattcactgctaagcacaggctcctcactcttctccatcaggcattaaatgaatggtctcttggccaccccagcctgggaagaacattttcctgaacaattccagcctgctccttttactctaggggcctctgtcagcaagaccatggggacttcaagagcctgtggtcaggaaatcaggtccagccttccctgtagccagacagtttatgagcccagagcctcctgccacacacatgcacacatatctagcattctttccagacagcatcctccccgccttccaccttggtagatgcaaggtctatctctcccatcagggctgccaaagctgggctttgtttttcccagcagaatgatgccattctcacaaaccaatgctctatattgcttgaagtctgcatctaaatattgatttcacgttttaaagaaattctcttaaattacaattgtgcccaatgcagggtggctctggggggcaagtaggtggtacaggggattggaaacatgctccgcgcctccagagaaaagttgctcccgaggtccatgcccctggaacgtgttcctatcactctggctggttgggctggtccttagactgggtgcttatgattaaagggtcttggttagcccactttccctctccatgtggagatggaaggtagagaaggatacagtgtctatcctcaagttgctacggttcagtgagagaggcagacatctgaacaggcaggtaggattcagtgtgctcagtgcactggggatttggagagagatgggcttgctctctctgtgcacccaggagggccacgcacttaaaactgtgtttgtggatcagagaaggctttatagcacagggggcattcagatgagtcttagaggaagagaagaaacatggcaagcagattacatctgagccgtttgaattgtgtttttctttcttcccatgtttattttctaagatctacctgaacttagagactcaagatatttttttaggaaacctcctacccatgtctgaggtagcaagtgcagcctcacgacagataccaggcaatccagagccacaaaacgtgattcctccaggctctgcctggcctgaccctgtcctgtcagctgggtttacataccagtcccattcttccttttcaatacctacccccaaatcttctcctaaccaccatctgttttttttttttaaaagcattttttgctttaaaagcatcctgaccccaatttctttgagctcacgggccttttgctgaaggtctctcagggtgtagtggtgtggctctctggacttaacgtcactctcagaggtcagaaccttggagatcagaactgattctcaccaggtgtgagaggtgtggtagcagattgcaatgctctgcacctcttccttgcaagtgagcaacttcaggctctctgggcagaggctggcccactgtagtttgcagacatgctctccagatggttttactaagtcccctctccctgatagggaatcctgctggaccagcgcagccctggtgtggagaggttccagggctctgcactctcaaggctggccccatgtgctcaaggggatctaatgtttgggctccaaactaaccatctcggagctgggctcctcatttactgccaaaccctcagcttatgtagctagaaagggccctggagtgagaaagcctggattttcaaattgatgctcccctactgactagctgtgccactctgggcaaatgctcttccttgagcctgtttccacacctgtaaagtggggatgatgatcctatctcactgcttttgtgaggattacaggaaagcacctgtcctggctctgtacctggcacgtagtaggtgctcagttcatgctggtttccttcctgcctttagtagggacctgctctgtgctcacacctcggctgcatgcaccctgctgtgacggaggctagtgtggaagaggtcctgtcctcagggaattaactgtcttattgggagacaacaactgtcctccttggaacacccaagaaaccatgcaaagcagtggacaacacagaacacgccctcctcctcgctgcctgcagctccaatctgattctgcttgggaatgggcggagcacgtgggctgcttaactgctgtataggacaagccccttacccctctctgggcccatgaattcctggcttggtttatgttctgatttgacacactgattttaatcttcgaatcatgacactgagtgcagaggaggtggcattccgacagcaggacatacatgttggtgtgaagactgggacgacactgggtagaatctagtttttaattattattaatataaaggatcaaattaatttaaatatgattctgaagtctacagaacttttagttctgtgctgtctatgtggacactttggtaaaatgcaaattatgatatggacgttatcattggtctggtgagatgtttcatatttgtgacagttaatttaaaaattatgagttaatgctgcctgtgtctatggggttctgtcttctttgatagccatctattcatctggatcatgggaccctctctaatccttccaccaatcaaataagctattgctattggtttggagttgagatatcagtctcggaaacttctgaaaaatgctaataattacccaaggattatgtcaaattttaaaataaatgtgtgtgtgtttctttaa

SEQ ID NO: 441228 - DNA, 4228 bp, Homo sapiens
ggaggaggttcctgtagggcggcacaaccagggagggcgtggaagctctgcatcccttctcccataccttgctctacacatctcttcatctgtatcctctgcagcatccttgatgataaaccagtaaatatgagttttgatcatcctgagaaaaatgggccttggcctgcagacccaataaaccttccctcccatggataatagtgctaattcctgaggacctgaagggcctgccgcccctgggggattagccagaagcaggcttgttttcctgctcagaacaaagtgacttccctgaacacatcttcattatgattcacaccaacctgaagaaaaagttcagctgctgcgtcctggtctttcttctgtttgcagtcatctgtgtgtggaaggaaaagaagaaagggagttactatgattcctttaaattgcaaaccaaggaattccaggtgttaaagagtctggggaaattggccatggggtctgattcccagtctgtatcctcaagcagcacccaggacccccacaggggccgccagaccctcggcagtctcagaggcctagccaaggccaaaccagaggcctccttccaggtgtggaacaaggacagctcttccaaaaaccttatccctaggctgcaaaagatctggaagaattacctaagcatgaacaagtacaaagtgtcctacaaggggccaggaccaggcatcaagttcagtgcagaggccctgcgctgccacctccgggaccatgtgaatgtatccatggtagaggtcacagattttcccttcaatacctctgaatgggagggttatctgcccaaggagagcattaggaccaaggctgggccttggggcaggtgtgctgttgtgtcgtcagcgggatctctgaagtcctcccaactaggcagagaaatcgatgatcatgacgcagtcctgaggtttaatggggcacccacagccaacttccaacaagatgtgggcacaaaaactaccattcgcctgatgaactctcagttggttaccacagagaagcgcttcctcaaagacagtttgtacaatgaaggaatcctaattgtatgggacccatctgtataccactcagatatcccaaagtggtaccagaatccggattataatttctttaacaactacaagacttatcgtaagctgcaccccaatcagcccttttacatcctcaagccccagatgccttgggagctatgggacattcttcaagaaatctccccagaagagattcagccaaaccccccatcctctgggatgcttggtatcatcatcatgatgacgctgtgtgaccaggtggatatttatgagttcctcccatccaagcgcaagactgacgtgtgctactactaccagaagttcttcgatagtgcctgcacgatgggtgcctaccacccgctgctctatgagaagaatttggtgaagcatctcaaccagggcacagatgaggacatctacctgcttggaaaagccacactgcctggcttccggaccattcactgctaagcacaggctcctcactcttctccatcaggcattaaatgaatggtctcttggccaccccagcctgggaagaacattttcctgaacaattccagcctgctccttttactctaggggcctctgtcagcaagaccatggggacttcaagagcctgtggtcaggaaatcaggtccagccttccctgtagccagacagtttatgagcccagagcctcctgccacacacatgcacacatatctagcattctttccagacagcatcctccccgccttccaccttggtagatgcaaggtctatctctcccatcagggctgccaaagctgggctttgtttttcccagcagaatgatgccattctcacaaaccaatgctctatattgcttgaagtctgcatctaaatattgatttcacgttttaaagaaattctcttaaattacaattgtgcccaatgcagggtggctctggggggcaagtaggtggtacaggggattggaaacatgctccgcgcctccagagaaaagttgctcccgaggtccatgcccctggaacgtgttcctatcactctggctggttgggctggtccttagactgggtgcttatgattaaagggtcttggttagcccactttccctctccatgtggagatggaaggtagagaaggatacagtgtctatcctcaagttgctacggttcagtgagagaggcagacatctgaacaggcaggtaggattcagtgtgctcagtgcactggggatttggagagagatgggcttgctctctctgtgcacccaggagggccacgcacttaaaactgtgtttgtggatcagagaaggctttatagcacagggggcattcagatgagtcttagaggaagagaagaaacatggcaagcagattacatctgagccgtttgaattgtgtttttctttcttcccatgtttattttctaagatctacctgaacttagagactcaagatatttttttaggaaacctcctacccatgtctgaggtagcaagtgcagcctcacgacagataccaggcaatccagagccacaaaacgtgattcctccaggctctgcctggcctgaccctgtcctgtcagctgggtttacataccagtcccattcttccttttcaatacctacccccaaatcttctcctaaccaccatctgttttttttttttaaaagcattttttgtctctcagggtgtagtggtgtggctctctggacttaacgtcactctcagaggtcagaaccttggagatcagaactgattctcaccaggtgtgagaggtgtggtagcagattgcaatgctctgcacctcttccttgcaagtgagcaacttcaggctctctgggcagaggctggcccactgtagtttgcagacatgctctccagatggttttactaagtcccctctccctgatagggaatcctgctggaccagcgcagccctggtgtggagaggttaaaagacttgcacaggatcaccaagtcatgctgtagagccaggattcctagacccagggctctgcactctcaaggctggccccatgtgctcaaggggatctaatgtttgggctccaaactaaccatctcggagctgggctcctcatttactgccaaaccctcagcttatgtagctagaaagggccctggagtgagaaagcctggattttcaaattgatgctcccctactgactagctgtgccactctgggcaaatgctcttccttgagcctgtttccacacctgtaaagtggggatgatgatcctatctcactgcttttgtgaggattacaggaaagcacctgtcctggctctgtacctggcacgtagtaggtgctcagttcatgctggtttccttcctgcctttagtagggacctgctctgtgctcacacctcggctgcatgcaccctgctgtgacggaggctagtgtggaagaggtcctgtcctcagggaattaactgtcttattgggagacaacaactgtcctccttggaacacccaagaaaccatgcaaagcagtggacaacacagaacacgccctcctcctcgctgcctgcagctccaatctgattctgcttgggaatgggcggagcacgtgggctgcttaactgctgtataggacaagccccttacccctctctgggcccatgaattcctggcttggtttatgttctgatttgacacactgattttaatcttcgaatcatgacactgagtgcagaggaggtggcattccgacagcaggacatacatgttggtgtgaagactgggacgacactgggtagaatctagtttttaattattattaatataaaggatcaaattaatttaaatatgattctgaagtctacagaacttttagttctgtgctgtctatgtggacactttggtaaaatgcaaattatgatatggacgttatcattggtctggtgagatgtttcatatttgtgacagttaatttaaaaattatgagttaatgctgcctgtgtctatggggttctgtcttctttgatagccatctattcatctggatcatgggaccctctctaatccttccaccaatcaaataagctattgctattggtttggagttgagatatcagtctcggaaacttctgaaaaatgctaataattacccaaggattatgtcaaattttaaaataaatgtgtgtgtgtttctttaa

SEQ ID NO: 441229 - DNA, 4551 bp, Homo sapiens
gctcttcttccttccttctccagtcccttccactgtgcgtcttctgtcccccgttcttccccagcggacccctctttcgagactccctagtggggtccccagctcccgggcgatcctgcccttgccgagcgcgttttctggagtcacctgggggaggggagtcctgggcagggccgggctggggaagacgcctggggcactgcccggcgttaacaaagggagccgataccgaccggcgtgggcgcggagcgggcggccgccaccgagcgtgctgagcaaccgcagcctccgcggccgagagtgcagcgagcaaggggagagccagttgcgcagagccctgcaaccagcagtccagggagaagtggtgaatgtcatggagcccagctgaaatggactggcccccttgagcctgtcccaagccctggtgccaggtgtccatccccgtgctgagatgagttttgatcatcctgagaaaaatgggccttggcctgcagacccaataaaccttccctcccatggataatagtgctaattcctgaggacctgaagggcctgccgcccctgggggattagccagaagcaggcttgttttcctgctcagaacaaagtgacttccctgaacacatcttcattatgattcacaccaacctgaagaaaaagttcagctgctgcgtcctggtctttcttctgtttgcagtcatctgtgtgtggaaggaaaagaagaaagggagttactatgattcctttaaattgcaaaccaaggaattccaggtgttaaagagtctggggaaattggccatggggtctgattcccagtctgtatcctcaagcagcacccaggacccccacaggggccgccagaccctcggcagtctcagaggcctagccaaggccaaaccagaggcctccttccaggtgtggaacaaggacagctcttccaaaaaccttatccctaggctgcaaaagatctggaagaattacctaagcatgaacaagtacaaagtgtcctacaaggggccaggaccaggcatcaagttcagtgcagaggccctgcgctgccacctccgggaccatgtgaatgtatccatggtagaggtcacagattttcccttcaatacctctgaatgggagggttatctgcccaaggagagcattaggaccaaggctgggccttggggcaggtgtgctgttgtgtcgtcagcgggatctctgaagtcctcccaactaggcagagaaatcgatgatcatgacgcagtcctgaggtttaatggggcacccacagccaacttccaacaagatgtgggcacaaaaactaccattcgcctgatgaactctcagttggttaccacagagaagcgcttcctcaaagacagtttgtacaatgaaggaatcctaattgtatgggacccatctgtataccactcagatatcccaaagtggtaccagaatccggattataatttctttaacaactacaagacttatcgtaagctgcaccccaatcagcccttttacatcctcaagccccagatgccttgggagctatgggacattcttcaagaaatctccccagaagagattcagccaaaccccccatcctctgggatgcttggtatcatcatcatgatgacgctgtgtgaccaggtggatatttatgagttcctcccatccaagcgcaagactgacgtgtgctactactaccagaagttcttcgatagtgcctgcacgatgggtgcctaccacccgctgctctatgagaagaatttggtgaagcatctcaaccagggcacagatgaggacatctacctgcttggatcttctccatcaggcattaaatgaatggtctcttggccaccccagcctgggaagaacattttcctgaacaattccagcctgctccttttactctaggggcctctgtcagcaagaccatggggacttcaagagcctgtggtcaggaaatcaggtccagccttccctgtagccagacagtttatgagcccagagcctcctgccacacacatgcacacatatctagcattctttccagacagcatcctccccgccttccaccttggtagatgcaaggtctatctctcccatcagggctgccaaagctgggctttgtttttcccagcagaatgatgccattctcacaaaccaatgctctatattgcttgaagtctgcatctaaatattgatttcacgttttaaagaaattctcttaaattacaattgtgcccaatgcagggtggctctggggggcaagtaggtggtacaggggattggaaacatgctccgcgcctccagagaaaagttgctcccgaggtccatgcccctggaacgtgttcctatcactctggctggttgggctggtccttagactgggtgcttatgattaaagggtcttggttagcccactttccctctccatgtggagatggaaggtagagaaggatacagtgtctatcctcaagttgctacggttcagtgagagaggcagacatctgaacaggcaggtaggattcagtgtgctcagtgcactggggatttggagagagatgggcttgctctctctgtgcacccaggagggccacgcacttaaaactgtgtttgtggatcagagaaggctttatagcacagggggcattcagatgagtcttagaggaagagaagaaacatggcaagcagattacatctgagccgtttgaattgtgtttttctttcttcccatgtttattttctaagatctacctgaacttagagactcaagatatttttttaggaaacctcctacccatgtctgaggtagcaagtgcagcctcacgacagataccaggcaatccagagccacaaaacgtgattcctccaggctctgcctggcctgaccctgtcctgtcagctgggtttacataccagtcccattcttccttttcaatacctacccccaaatcttctcctaaccaccatctgttttttttttttaaaagcattttttgctttaaaagcatcctgaccccaatttctttgagctcacgggccttttgctgaaggtctctcagggtgtagtggtgtggctctctggacttaacgtcactctcagaggtcagaaccttggagatcagaactgattctcaccaggtgtgagaggtgtggtagcagattgcaatgctctgcacctcttccttgcaagtgagcaacttcaggctctctgggcagaggctggcccactgtagtttgcagacatgctctccagatggttttactaagtcccctctccctgatagggaatcctgctggaccagcgcagccctggtgtggagaggttaaaagacttgcacaggatcaccaagtcatgctgtagagccaggattcctagacccagggctctgcactctcaaggctggccccatgtgctcaaggggatctaatgtttgggctccaaactaaccatctcggagctgggctcctcatttactgccaaaccctcagcttatgtagctagaaagggccctggagtgagaaagcctggattttcaaattgatgctcccctactgactagctgtgccactctgggcaaatgctcttccttgagcctgtttccacacctgtaaagtggggatgatgatcctatctcactgcttttgtgaggattacaggaaagcacctgtcctggctctgtacctggcacgtagtaggtgctcagttcatgctggtttccttcctgcctttagtagggacctgctctgtgctcacacctcggctgcatgcaccctgctgtgacggaggctagtgtggaagaggtcctgtcctcagggaattaactgtcttattgggagacaacaactgtcctccttggaacacccaagaaaccatgcaaagcagtggacaacacagaacacgccctcctcctcgctgcctgcagctccaatctgattctgcttgggaatgggcggagcacgtgggctgcttaactgctgtataggacaagccccttacccctctctgggcccatgaattcctggcttggtttatgttctgatttgacacactgattttaatcttcgaatcatgacactgagtgcagaggaggtggcattccgacagcaggacatacatgttggtgtgaagactgggacgacactgggtagaatctagtttttaattattattaatataaaggatcaaattaatttaaatatgattctgaagtctacagaacttttagttctgtgctgtctatgtggacactttggtaaaatgcaaattatgatatggacgttatcattggtctggtgagatgtttcatatttgtgacagttaatttaaaaattatgagttaatgctgcctgtgtctatggggttctgtcttctttgatagccatctattcatctggatcatgggaccctctctaatccttccaccaatcaaataagctattgctattggtttggagttgagatatcagtctcggaaacttctgaaaaatgctaataattacccaaggattatgtcaaattttaaaataaatgtgtgtgtgtttctttaa

SEQ ID NO: 441230 - DNA, 4280 bp, Homo sapiens
gtggtacttaagctccaagaacttacggcacacctgcttgagtggatcatgggtgagctggagaacctgaagtagcaaaggcaagaaggcaacgacgttccatctgtggaaggacctaccaaccagatgagttttgatcatcctgagaaaaatgggccttggcctgcagacccaataaaccttccctcccatggataatagtgctaattcctgaggacctgaagggcctgccgcccctgggggattagccagaagcaggcttgttttcctgctcagaacaaagtgacttccctgaacacatcttcattatgattcacaccaacctgaagaaaaagttcagctgctgcgtcctggtctttcttctgtttgcagtcatctgtgtgtggaaggaaaagaagaaagggagttactatgattcctttaaattgcaaaccaaggaattccaggtgttaaagagtctggggaaattggccatggggtctgattcccagtctgtatcctcaagcagcacccaggacccccacaggggccgccagaccctcggcagtctcagaggcctagccaaggccaaaccagaggcctccttccaggtgtggaacaaggacagctcttccaaaaaccttatccctaggctgcaaaagatctggaagaattacctaagcatgaacaagtacaaagtgtcctacaaggggccaggaccaggcatcaagttcagtgcagaggccctgcgctgccacctccgggaccatgtgaatgtatccatggtagaggtcacagattttcccttcaatacctctgaatgggagggttatctgcccaaggagagcattaggaccaaggctgggccttggggcaggtgtgctgttgtgtcgtcagcgggatctctgaagtcctcccaactaggcagagaaatcgatgatcatgacgcagtcctgaggtttaatggggcacccacagccaacttccaacaagatgtgggcacaaaaactaccattcgcctgatgaactctcagttggttaccacagagaagcgcttcctcaaagacagtttgtacaatgaaggaatcctaattgtatgggacccatctgtataccactcagatatcccaaagtggtaccagaatccggattataatttctttaacaactacaagacttatcgtaagctgcaccccaatcagcccttttacatcctcaagccccagatgccttgggagctatgggacattcttcaagaaatctccccagaagagattcagccaaaccccccatcctctgggatgcttggtatcatcatcatgatgacgctgtgtgaccaggtggatatttatgagttcctcccatccaagcgcaagactgacgtgtgctactactaccagaagttcttcgatagtgcctgcacgatgggtgcctaccacccgctgctctatgagaagaatttggtgaagcatctcaaccagggcacagatgaggacatctacctgcttggaaaagccacactgcctggcttccggaccattcactgctaagcacaggctcctcactcttctccatcaggcattaaatgaatggtctcttggccaccccagcctgggaagaacattttcctgaacaattccagcctgctccttttactctaggggcctctgtcagcaagaccatggggacttcaagagcctgtggtcaggaaatcaggtccagccttccctgtagccagacagtttatgagcccagagcctcctgccacacacatgcacacatatctagcattctttccagacagcatcctccccgccttccaccttggtagatgcaaggtctatctctcccatcagggctgccaaagctgggctttgtttttcccagcagaatgatgccattctcacaaaccaatgctctatattgcttgaagtctgcatctaaatattgatttcacgttttaaagaaattctcttaaattacaattgtgcccaatgcagggtggctctggggggcaagtaggtggtacaggggattggaaacatgctccgcgcctccagagaaaagttgctcccgaggtccatgcccctggaacgtgttcctatcactctggctggttgggctggtccttagactgggtgcttatgattaaagggtcttggttagcccactttccctctccatgtggagatggaaggtagagaaggatacagtgtctatcctcaagttgctacggttcagtgagagaggcagacatctgaacaggcaggtaggattcagtgtgctcagtgcactggggatttggagagagatgggcttgctctctctgtgcacccaggagggccacgcacttaaaactgtgtttgtggatcagagaaggctttatagcacagggggcattcagatgagtcttagaggaagagaagaaacatggcaagcagattacatctgagccgtttgaattgtgtttttctttcttcccatgtttattttctaagatctacctgaacttagagactcaagatatttttttaggaaacctcctacccatgtctgaggtagcaagtgcagcctcacgacagataccaggcaatccagagccacaaaacgtgattcctccaggctctgcctggcctgaccctgtcctgtcagctgggtttacataccagtcccattcttccttttcaatacctacccccaaatcttctcctaaccaccatctgttttttttttttaaaagcattttttgctttaaaagcatcctgaccccaatttctttgagctcacgggccttttgctgaaggtctctcagggtgtagtggtgtggctctctggacttaacgtcactctcagaggtcagaaccttggagatcagaactgattctcaccaggtgtgagaggtgtggtagcagattgcaatgctctgcacctcttccttgcaagtgagcaacttcaggctctctgggcagaggctggcccactgtagtttgcagacatgctctccagatggttttactaagtcccctctccctgatagggaatcctgctggaccagcgcagccctggtgtggagaggttaaaagacttgcacaggatcaccaagtcatgctgtagagccaggattcctagacccagggctctgcactctcaaggctggccccatgtgctcaaggggatctaatgtttgggctccaaactaaccatctcggagctgggctcctcatttactgccaaaccctcagcttatgtagctagaaagggccctggagtgagaaagcctggattttcaaattgatgctcccctactgactagctgtgccactctgggcaaatgctcttccttgagcctgtttccacacctgtaaagtggggatgatgatcctatctcactgcttttgtgaggattacaggaaagcacctgtcctggctctgtacctggcacgtagtaggtgctcagttcatgctggtttccttcctgcctttagtagggacctgctctgtgctcacacctcggctgcatgcaccctgctgtgacggaggctagtgtggaagaggtcctgtcctcagggaattaactgtcttattgggagacaacaactgtcctccttggaacacccaagaaaccatgcaaagcagtggacaacacagaacacgccctcctcctcgctgcctgcagctccaatctgattctgcttgggaatgggcggagcacgtgggctgcttaactgctgtataggacaagccccttacccctctctgggcccatgaattcctggcttggtttatgttctgatttgacacactgattttaatcttcgaatcatgacactgagtgcagaggaggtggcattccgacagcaggacatacatgttggtgtgaagactgggacgacactgggtagaatctagtttttaattattattaatataaaggatcaaattaatttaaatatgattctgaagtctacagaacttttagttctgtgctgtctatgtggacactttggtaaaatgcaaattatgatatggacgttatcattggtctggtgagatgtttcatatttgtgacagttaatttaaaaattatgagttaatgctgcctgtgtctatggggttctgtcttctttgatagccatctattcatctggatcatgggaccctctctaatccttccaccaatcaaataagctattgctattggtttggagttgagatatcagtctcggaaacttctgaaaaatgctaataattacccaaggattatgtcaaattttaaaataaatgtgtgtgtgtttctttaa

SEQ ID NO: 441231 - DNA, 4655 bp, Homo sapiens
gctcttcttccttccttctccagtcccttccactgtgcgtcttctgtcccccgttcttccccagcggacccctctttcgagactccctagtggggtccccagctcccgggcgatcctgcccttgccgagcgcgttttctggagtcacctgggggaggggagtcctgggcagggccgggctggggaagacgcctggggcactgcccggcgttaacaaagggagccgataccgaccggcgtgggcgcggagcgggcggccgccaccgagcgtgctgagcaaccgcagcctccgcggccgagagtgcagcgagcaaggggagagccagttgcgcagagccctgcaaccagcagtccagggagaagtggtgaatgtcatggagcccagctgaaatggactggcccccttgagcctgtcccaagccctggtgccaggtgtccatccccgtgctgagatgagttttgatcatcctgagaaaaatgggccttggcctgcagacccaataaaccttccctcccatggataatagtgctaattcctgaggacctgaagggcctgccgcccctgggggattagccagaagcagttggctacatgtctgctatcttacccagaattcctagcctctatcatgaggcttgttttcctgctcagaacaaagtgacttccctgaacacatcttcattatgattcacaccaacctgaagaaaaagttcagctgctgcgtcctggtctttcttctgtttgcagtcatctgtgtgtggaaggaaaagaagaaagggagttactatgattcctttaaattgcaaaccaaggaattccaggtgttaaagagtctggggaaattggccatggggtctgattcccagtctgtatcctcaagcagcacccaggacccccacaggggccgccagaccctcggcagtctcagaggcctagccaaggccaaaccagaggcctccttccaggtgtggaacaaggacagctcttccaaaaaccttatccctaggctgcaaaagatctggaagaattacctaagcatgaacaagtacaaagtgtcctacaaggggccaggaccaggcatcaagttcagtgcagaggccctgcgctgccacctccgggaccatgtgaatgtatccatggtagaggtcacagattttcccttcaatacctctgaatgggagggttatctgcccaaggagagcattaggaccaaggctgggccttggggcaggtgtgctgttgtgtcgtcagcgggatctctgaagtcctcccaactaggcagagaaatcgatgatcatgacgcagtcctgaggtttaatggggcacccacagccaacttccaacaagatgtgggcacaaaaactaccattcgcctgatgaactctcagttggttaccacagagaagcgcttcctcaaagacagtttgtacaatgaaggaatcctaattgtatgggacccatctgtataccactcagatatcccaaagtggtaccagaatccggattataatttctttaacaactacaagacttatcgtaagctgcaccccaatcagcccttttacatcctcaagccccagatgccttgggagctatgggacattcttcaagaaatctccccagaagagattcagccaaaccccccatcctctgggatgcttggtatcatcatcatgatgacgctgtgtgaccaggtggatatttatgagttcctcccatccaagcgcaagactgacgtgtgctactactaccagaagttcttcgatagtgcctgcacgatgggtgcctaccacccgctgctctatgagaagaatttggtgaagcatctcaaccagggcacagatgaggacatctacctgcttggaaaagccacactgcctggcttccggaccattcactgctaagcacaggctcctcactcttctccatcaggcattaaatgaatggtctcttggccaccccagcctgggaagaacattttcctgaacaattccagcctgctccttttactctaggggcctctgtcagcaagaccatggggacttcaagagcctgtggtcaggaaatcaggtccagccttccctgtagccagacagtttatgagcccagagcctcctgccacacacatgcacacatatctagcattctttccagacagcatcctccccgccttccaccttggtagatgcaaggtctatctctcccatcagggctgccaaagctgggctttgtttttcccagcagaatgatgccattctcacaaaccaatgctctatattgcttgaagtctgcatctaaatattgatttcacgttttaaagaaattctcttaaattacaattgtgcccaatgcagggtggctctggggggcaagtaggtggtacaggggattggaaacatgctccgcgcctccagagaaaagttgctcccgaggtccatgcccctggaacgtgttcctatcactctggctggttgggctggtccttagactgggtgcttatgattaaagggtcttggttagcccactttccctctccatgtggagatggaaggtagagaaggatacagtgtctatcctcaagttgctacggttcagtgagagaggcagacatctgaacaggcaggtaggattcagtgtgctcagtgcactggggatttggagagagatgggcttgctctctctgtgcacccaggagggccacgcacttaaaactgtgtttgtggatcagagaaggctttatagcacagggggcattcagatgagtcttagaggaagagaagaaacatggcaagcagattacatctgagccgtttgaattgtgtttttctttcttcccatgtttattttctaagatctacctgaacttagagactcaagatatttttttaggaaacctcctacccatgtctgaggtagcaagtgcagcctcacgacagataccaggcaatccagagccacaaaacgtgattcctccaggctctgcctggcctgaccctgtcctgtcagctgggtttacataccagtcccattcttccttttcaatacctacccccaaatcttctcctaaccaccatctgttttttttttttaaaagcattttttgctttaaaagcatcctgaccccaatttctttgagctcacgggccttttgctgaaggtctctcagggtgtagtggtgtggctctctggacttaacgtcactctcagaggtcagaaccttggagatcagaactgattctcaccaggtgtgagaggtgtggtagcagattgcaatgctctgcacctcttccttgcaagtgagcaacttcaggctctctgggcagaggctggcccactgtagtttgcagacatgctctccagatggttttactaagtcccctctccctgatagggaatcctgctggaccagcgcagccctggtgtggagaggttaaaagacttgcacaggatcaccaagtcatgctgtagagccaggattcctagacccagggctctgcactctcaaggctggccccatgtgctcaaggggatctaatgtttgggctccaaactaaccatctcggagctgggctcctcatttactgccaaaccctcagcttatgtagctagaaagggccctggagtgagaaagcctggattttcaaattgatgctcccctactgactagctgtgccactctgggcaaatgctcttccttgagcctgtttccacacctgtaaagtggggatgatgatcctatctcactgcttttgtgaggattacaggaaagcacctgtcctggctctgtacctggcacgtagtaggtgctcagttcatgctggtttccttcctgcctttagtagggacctgctctgtgctcacacctcggctgcatgcaccctgctgtgacggaggctagtgtggaagaggtcctgtcctcagggaattaactgtcttattgggagacaacaactgtcctccttggaacacccaagaaaccatgcaaagcagtggacaacacagaacacgccctcctcctcgctgcctgcagctccaatctgattctgcttgggaatgggcggagcacgtgggctgcttaactgctgtataggacaagccccttacccctctctgggcccatgaattcctggcttggtttatgttctgatttgacacactgattttaatcttcgaatcatgacactgagtgcagaggaggtggcattccgacagcaggacatacatgttggtgtgaagactgggacgacactgggtagaatctagtttttaattattattaatataaaggatcaaattaatttaaatatgattctgaagtctacagaacttttagttctgtgctgtctatgtggacactttggtaaaatgcaaattatgatatggacgttatcattggtctggtgagatgtttcatatttgtgacagttaatttaaaaattatgagttaatgctgcctgtgtctatggggttctgtcttctttgatagccatctattcatctggatcatgggaccctctctaatccttccaccaatcaaataagctattgctattggtttggagttgagatatcagtctcggaaacttctgaaaaatgctaataattacccaaggattatgtcaaattttaaaataaatgtgtgtgtgtttctttaa

SEQ ID NO: 441232 - DNA, 3909 bp, Homo sapiens
cctcaggttcctaaatggaacgcctgggggttgtcttggatgccatagttaaatcctgtccatttgctgagcactgcatgcttttcaaagtgcaatggggtcctttgcacttgtgggatacactgaacatatggtagtgttttcatttttctgacagagatagaaatataatctactggtgataccaagagaatatctggtttgctgctttgataactggagtagctactccactgtaagtagcacactggctttgttcacttttctgtgtgcccaggcacaagcgaatgtctttgaatgggtttcaggaatgccacagtatggcccccttcagcccttacagtggctggcagacaggtggtcatctctgcctaggagctttacctgagcaccacacaaatactgccatttcgccctgtggatcatgatggggtaaagatggggaagcattattcccttgccccctcccccgcctctcgtctttctctttttctgcatattgccagtgctcatcacctcttttctgtttctttgtggtttatagatgatcatgacgcagtcctgaggtttaatggggcacccacagccaacttccaacaagatgtgggcacaaaaactaccattcgcctgatgaactctcagttggttaccacagagaagcgcttcctcaaagacagtttgtacaatgaaggaatcctaattgtatgggacccatctgtataccactcagatatcccaaagtggtaccagaatccggattataatttctttaacaactacaagacttatcgtaagctgcaccccaatcagcccttttacatcctcaagccccagatgccttgggagctatgggacattcttcaagaaatctccccagaagagattcagccaaaccccccatcctctgggatgcttggtatcatcatcatgatgacgctgtgtgaccaggtggatatttatgagttcctcccatccaagcgcaagactgacgtgtgctactactaccagaagttcttcgatagtgcctgcacgatgggtgcctaccacccgctgctctatgagaagaatttggtgaagcatctcaaccagggcacagatgaggacatctacctgcttggaaaagccacactgcctggcttccggaccattcactgctaagcacaggctcctcactcttctccatcaggcattaaatgaatggtctcttggccaccccagcctgggaagaacattttcctgaacaattccagcctgctccttttactctaggggcctctgtcagcaagaccatggggacttcaagagcctgtggtcaggaaatcaggtccagccttccctgtagccagacagtttatgagcccagagcctcctgccacacacatgcacacatatctagcattctttccagacagcatcctccccgccttccaccttggtagatgcaaggtctatctctcccatcagggctgccaaagctgggctttgtttttcccagcagaatgatgccattctcacaaaccaatgctctatattgcttgaagtctgcatctaaatattgatttcacgttttaaagaaattctcttaaattacaattgtgcccaatgcagggtggctctggggggcaagtaggtggtacaggggattggaaacatgctccgcgcctccagagaaaagttgctcccgaggtccatgcccctggaacgtgttcctatcactctggctggttgggctggtccttagactgggtgcttatgattaaagggtcttggttagcccactttccctctccatgtggagatggaaggtagagaaggatacagtgtctatcctcaagttgctacggttcagtgagagaggcagacatctgaacaggcaggtaggattcagtgtgctcagtgcactggggatttggagagagatgggcttgctctctctgtgcacccaggagggccacgcacttaaaactgtgtttgtggatcagagaaggctttatagcacagggggcattcagatgagtcttagaggaagagaagaaacatggcaagcagattacatctgagccgtttgaattgtgtttttctttcttcccatgtttattttctaagatctacctgaacttagagactcaagatatttttttaggaaacctcctacccatgtctgaggtagcaagtgcagcctcacgacagataccaggcaatccagagccacaaaacgtgattcctccaggctctgcctggcctgaccctgtcctgtcagctgggtttacataccagtcccattcttccttttcaatacctacccccaaatcttctcctaaccaccatctgttttttttttttaaaagcattttttgctttaaaagcatcctgaccccaatttctttgagctcacgggccttttgctgaaggtctctcagggtgtagtggtgtggctctctggacttaacgtcactctcagaggtcagaaccttggagatcagaactgattctcaccaggtgtgagaggtgtggtagcagattgcaatgctctgcacctcttccttgcaagtgagcaacttcaggctctctgggcagaggctggcccactgtagtttgcagacatgctctccagatggttttactaagtcccctctccctgatagggaatcctgctggaccagcgcagccctggtgtggagaggttaaaagacttgcacaggatcaccaagtcatgctgtagagccaggattcctagacccagggctctgcactctcaaggctggccccatgtgctcaaggggatctaatgtttgggctccaaactaaccatctcggagctgggctcctcatttactgccaaaccctcagcttatgtagctagaaagggccctggagtgagaaagcctggattttcaaattgatgctcccctactgactagctgtgccactctgggcaaatgctcttccttgagcctgtttccacacctgtaaagtggggatgatgatcctatctcactgcttttgtgaggattacaggaaagcacctgtcctggctctgtacctggcacgtagtaggtgctcagttcatgctggtttccttcctgcctttagtagggacctgctctgtgctcacacctcggctgcatgcaccctgctgtgacggaggctagtgtggaagaggtcctgtcctcagggaattaactgtcttattgggagacaacaactgtcctccttggaacacccaagaaaccatgcaaagcagtggacaacacagaacacgccctcctcctcgctgcctgcagctccaatctgattctgcttgggaatgggcggagcacgtgggctgcttaactgctgtataggacaagccccttacccctctctgggcccatgaattcctggcttggtttatgttctgatttgacacactgattttaatcttcgaatcatgacactgagtgcagaggaggtggcattccgacagcaggacatacatgttggtgtgaagactgggacgacactgggtagaatctagtttttaattattattaatataaaggatcaaattaatttaaatatgattctgaagtctacagaacttttagttctgtgctgtctatgtggacactttggtaaaatgcaaattatgatatggacgttatcattggtctggtgagatgtttcatatttgtgacagttaatttaaaaattatgagttaatgctgcctgtgtctatggggttctgtcttctttgatagccatctattcatctggatcatgggaccctctctaatccttccaccaatcaaataagctattgctattggtttggagttgagatatcagtctcggaaacttctgaaaaatgctaataattacccaaggattatgtcaaattttaaaataaatgtgtgtgtgtttctttaa

SEQ ID NO: 441233 - DNA, 4404 bp, Homo sapiens
ggaggaggttcctgtagggcggcacaaccagggagggcgtggaagctctgcatcccttctcccataccttgctctacacatctcttcatctgtatcctctgcagcatccttgatgataaaccagtaaatatgagttttgatcatcctgagaaaaatgggccttggcctgcagacccaataaaccttccctcccatggataatagtgctaattcctgaggacctgaagggcctgccgcccctgggggattagccagaagcaggcttgttttcctgctcagaacaaagtgacttccctgaacacatcttcattatgattcacaccaacctgaagaaaaagttcagctgctgcgtcctggtctttcttctgtttgcagtcatctgtgtgtggaaggaaaagaagaaagggagttactatgattcctttaaattgcaaaccaaggaattccaggtgttaaagagtctggggaaattggccatggggtctgattcccagtctgtatcctcaagcagcacccaggacccccacaggggccgccagaccctcggcagtctcagaggcctagccaaggccaaaccagaggcctccttccaggtgtggaacaaggacagctcttccaaaaaccttatccctaggctgcaaaagatctggaagaattacctaagcatgaacaagtacaaagtgtcctacaaggggccaggaccaggcatcaagttcagtgcagaggccctgcgctgccacctccgggaccatgtgaatgtatccatggtagaggtcacagattttcccttcaatacctctgaatgggagggttatctgcccaaggagagcattaggaccaaggctgggccttggggcaggtgtgctgttgtgtcgtcagcgggatctctgaagtcctcccaactaggcagagaaatcgatgatcatgacgcagtcctgaggtttaatggggcacccacagccaacttccaacaagatgtgggcacaaaaactaccattcgcctgatgaactctcagttggttaccacagagaagcgcttcctcaaagacagtttgtacaatgaaggaatcctaattgtatgggacccatctgtataccactcagatatcccaaagtggtaccagaatccggattataatttctttaacaactacaagacttatcgtaagctgcaccccaatcagcccttttacatcctcaagccccagatgccttgggagctatgggacattcttcaagaaatctccccagaagagattcagccaaaccccccatcctctgggatgcttggtatcatcatcatgatgacgctgtgtgaccaggtggatatttatgagttcctcccatccaagcgcaagactgacgtgtgctactactaccagaagttcttcgatagtgcctgcacgatgggtgcctaccacccgctgctctatgagaagaatttggtgaagcatctcaaccagggcacagatgaggacatctacctgcttggaaaagccacactgcctggcttccggaccattcactgctaagcacaggctcctcactcttctccatcaggcattaaatgaatggtctcttggccaccccagcctgggaagaacattttcctgaacaattccagcctgctccttttactctaggggcctctgtcagcaagaccatggggacttcaagagcctgtggtcaggaaatcaggtccagccttccctgtagccagacagtttatgagcccagagcctcctgccacacacatgcacacatatctagcattctttccagacagcatcctccccgccttccaccttggtagatgcaaggtctatctctcccatcagggctgccaaagctgggctttgtttttcccagcagaatgatgccattctcacaaaccaatgctctatattgcttgaagtctgcatctaaatattgatttcacgttttaaagaaattctcttaaattacaattgtgcccaatgcagggtggctctggggggcaagtaggtggtacaggggattggaaacatgctccgcgcctccagagaaaagttgctcccgaggtccatgcccctggaacgtgttcctatcactctggctggttgggctggtccttagactgggtgcttatgattaaagggtcttggttagcccactttccctctccatgtggagatggaaggtagagaaggatacagtgtctatcctcaagttgctacggttcagtgagagaggcagacatctgaacaggcaggtaggattcagtgtgctcagtgcactggggatttggagagagatgggcttgctctctctgtgcacccaggagggccacgcacttaaaactgtgtttgtggatcagagaaggctttatagcacagggggcattcagatgagtcttagaggaagagaagaaacatggcaagcagattacatctgagccgtttgaattgtgtttttctttcttcccatgtttattttctaagatctacctgaacttagagactcaagatatttttttaggaaacctcctacccatgtctgaggtagcaagtgcagcctcacgacagataccaggcaatccagagccacaaaacgtgattcctccaggctctgcctggcctgaccctgtcctgtcagctgggtttacataccagtcccattcttccttttcaatacctacccccaaatcttctcctaaccaccatctgttttttttttttaaaagcattttttgctttaaaagcatcctgaccccaatttctttgagctcacgggccttttgctgaaggtctctcagggtgtagtggtgtggctctctggacttaacgtcactctcagaggtcagaaccttggagatcagaactgattctcaccaggtgtgagaggtgtggtagcagattgcaatgctctgcacctcttccttgcaagtgagcaacttcaggctctctgggcagaggctggcccactgtagtttgcagacatgctctccagatggttttactaagtcccctctccctgatagggaatcctgctggaccagcgcagccctggtgtggagaggttaaaagacttgcacaggatcaccaagtcatgctgtagagccaggattcctagacccagggctctgcactctcaaggctggccccatgtgctcaaggggatctaatgtttgggctccaaactaaccatctcggagctgggctcctcatttactgccaaaccctcagcttatgtagctagaaagggccctggagtgagaaagcctggattttcaaattgatgctcccctactgactagctgtgccactctgggcaaatgctcttccttgagcctgtttccacacctgtaaagtggggatgatgatcctatctcactgcttttgtgaggattacaggaaagcacctgtcctggctctgtacctggcacgtagtaggtgctcagttcatgctggtttccttcctgcctttagtagggacctgctctgtgctcacacctcggctgcatgcaccctgctgtgacggaggctagtgtggaagaggtcctgtcctcagggaattaactgtcttattgggagacaacaactgtcctccttggaacacccaagaaaccatgcaaagcagtggacaacacagaacacgccctcctcctcgctgcctgcagctccaatctgattctgcttgggaatgggcggagcacgtgggctgcttaactgctgtataggacaagccccttacccctctctgggcccatgaattcctggcttggtttatgttctgatttgacacactgattttaatcttcgaatcatgacactgagtgcagaggaggtggcattccgacagcaggacatacatgttggtgtgaagactgggacgacactgggtagaatctagtttttaattattattaatataaaggatcaaattaatttaaatatgattctgaagtctacagaacttttagttctgtgctgtctatgtggacactttggtaaaatgcaaattatgatatggacgttatcattggtctggtgagatgtttcatatttgtgacagttaatttacatctattcatctggatcatgggaccctctctaatccttccaccaatcaaataagctattgctattggtttggagttgagatatcagtctcggaaacttctgaaaaatgctaataattacccaaggattatgtcaaattttaaaataaatgtgtgtgtgtttctttaaaaagacacaaagagaaacaacacacaaaaacaaaactagacgcgaccctagggagcggagacaaagcaacaaaaaacacatggaccgcccggtagagaaacaacaaaatgtgggggggcgcggaggatacaaaaatgggggggggggagaaaggggggtcccaaacaggcggagg

SEQ ID NO: 441234 - DNA, 2439 bp, Homo sapiens
ggctgcaggattcggcacgagagatgcaaggtctatctctcccatcagggctgccaaagctgggctttgtttttcccagcagaatgatgccattctcacaaaccaatgctctatattgcttgaagtctgcatctaaatattgatttcacgttttaaagaaattctcttaaattacaattgtgcccaatgcagggtggctctggggggcaagtaggtggtacaggggattggaaacatgctccgcgcctccagaggttgggctggtccttagactgggtgcttatgattaaagggtcttggttagcccactttccctctccatgtggagatggaaggtagagaaggatacagtgtctatcctcaagttgctacggttcagtgagagaggcagacatctgaacaggcaggtaggattcagtgtgctcagtgcactggggatttggagagagatgggcttgctctctctgtgcacccaggagggccacgcacttaaaactgtgtttgtggatcagagaaggctttatagcacagggggcattcagatgagtcttagaggaagagaagaaacatggcaagcagattacatctgagccgtttgaattgtgtttttctttcttcccatgtttattttctaagatctacctgaacttagagactcaagatatttttttaggaaacctcctacccatgtctgaggtagcaagtgcagcctcacgacagataccaggcaatccagagccacaaaacgtgattcctccaggctctgcctggcctgaccctgtcctgtcagctgggtttacataccagtcccattcttccttttcaatacctacccccaaatcttctcctaaccaccatctgttttttttttttaaaagcattttttgctttaaaagcatcctgaccccaatttctttgagctcacgggccttttgctgaaggtctctcagggtgtagtggtgtggctctctggacttaacgtcactctcagaggtcagaaccttggagatcagaactgattctcaccaggtgtgagaggtgtggtagcagattgcaatgctctgcacctcttccttgcaagtgagcaacttcaggctctctgggcagaggctggcccactgtagtttgcagacatgctctccagatggttttactaagtcccctctccctgatagggaatcctgctggaccagcgcagccctggtgtggagaggttaaaagacttgcacaggatcaccaagtcatgctgtagagccaggattcctagacccagggctctgcactctcaaggctggccccatgtgctcaaggggatctaatgtttgggctccaaactaaccatctcggagctgggctcctcatttactgccaaaccctcagcttatgtagctagaaagggccctggagtgagaaagcctggattttcaaattgatgctcccctactgactagctgtgccactctgggcaaatgctcttccttgagcctgtttccacacctgtaaagtggggatgatgatcctatctcactgcttttgtgaggattacaggaaagcacctgtcctggctctgtacctggcacgtagtaggtgctcagttcatgctggtttccttcctgcctttagtagggacctgctctgtgctcacacctcggctgcatgcaccctgctgtgacggaggctagtgtggaagaggtcctgtcctcagggaattaactgtcttattgggagacaacaactgtcctccttggaacacccaagaaaccatgcaaagcagtggacaacacagaacacgccctcctcctcgctgcctgcagctccaatctgattctgcttgggaatgggcggagcacgtgggctgcttaactgctgtataggacaagccccttacccctctctgggcccatgaattcctggcttggtttatgttctgatttgacacactgattttaatcttcgaatcatgacactgagtgcagaggaggtggcattccgacagcaggacatacatgttggtgtgaagactgggacgacactgggtagaatctagtttttaattattattaatataaaggatcaaattaatttaaatatgattctgaagtctacagaacttttagttctgtgctgtctatgtggacactttggtaaaatgcaaattatgatatggacgttatcattggtctggtgagatgtttcatatttgtgacagttaatttaaaaattatgagttaatgctgcctgtgtctatggggttctgtcttctttgatagccatctattcatctggatcatgggaccctctctaatccttccaccaatcaaataagctattgctattggtttggagttgagatatcagtctcggaaacttctgaaaaatgctaataattacccaaggattatgtcaaattttaaaataaatgtgtgtgtgtttctttaa

SEQ ID NO: 441235 - DNA, 2496 bp, Homo sapiens
ggaggaggttcctgtagggcggcacaaccagggagggcgtggaagctctgcatcccttctcccataccttgctctacacatctcttcatctgtatcctctgcagcatccttgatgataaaccagtaaatatgagttttgatcatcctgagaaaaatgggccttggcctgcagacccaataaaccttccctcccatggataatagtgctaattcctgaggacctgaagggcctgccgcccctgggggattagccagaagcaggcttgttttcctgctcagaacaaagtgacttccctgaacacatcttcattatgattcacaccaacctgaagaaaaagttcagctgctgcgtcctggtctttcttctgtttgcagtcatctgtgtgtggaaggaaaagaagaaagggagttactatgattcctttaaattgcaaaccaaggaattccaggtgttaaagagtctggggaaattggccatggggtctgattcccagtctgtatcctcaagcagcacccaggacccccacaggggccgccagaccctcggcagtctcagaggcctagccaaggccaaaccagaggcctccttccaggtgtggaacaaggacagctcttccaaaaaccttatccctaggctgcaaaagatctggaagaattacctaagcatgaacaagtacaaagtgtcctacaaggggccaggaccaggcatcaagttcagtgcagaggccctgcgctgccacctccgggaccatgtgaatgtatccatggtagaggtcacagattttcccttcaatacctctgaatgggagggttatctgcccaaggagagcattaggaccaaggctgggccttggggcaggtgtgctgttgtgtcgtcagcgggatctctgaagtcctcccaactaggcagagaaatcgatgatcatgacgcagtcctgaggtttaatggggcacccacagccaacttccaacaagatgtgggcacaaaaactaccattcgcctgatgaactctcagttggttaccacagagaagcgcttcctcaaagacagtttgtacaatgaaggaatcctaattgtatgggacccatctgtataccactcagatatcccaaagtggtaccagaatccggattataatttctttaacaactacaagacttatcgtaagctgcaccccaatcagcccttttacatcctcaagccccagatgccttgggagctatgggacattcttcaagaaatctccccagaagagattcagccaaaccccccatcctctgggatgcttggtatcatcatcatgatgacgctgtgtgaccaggtggatatttatgagttcctcccatccaagcgcaagactgacgtgtgctactactaccagaagttcttcgatagtgcctgcacgatgggtgcctaccacccgctgctctatgagaagaatttggtgaagcatctcaaccagggcacagatgaggacatctacctgcttggaaaagccacactgcctggcttccggaccattcactgctaagcacaggctcctcactcttctccatcaggcattaaatgaatggtctcttggccaccccagcctgggaagaacattttcctgaacaattccagcctgctccttttactctaggggcctctgtcagcaagaccatggggacttcaagagcctgtggtcaggaaatcaggtccagccttccctgtagccagacagtttatgagcccagagcctcctgccacacacatgcacacatatctagcattcttattgggagacaacaactgtcctccttggaacacccaagaaaccatgcaaagcagtggacaacacagaacacgccctcctcctcgctgcctgcagctccaatctgattctgcttgggaatgggcggagcacgtgggctgcttaactgctgtataggacaagccccttacccctctctgggcccatgaattcctggcttggtttatgttctgatttgacacactgattttaatcttcgaatcatgacactgagtgcagaggaggtggcattccgacagcaggacatacatgttggtgtgaagactgggacgacactgggtagaatctagtttttaattattattaatataaaggatcaaattaatttaaatatgattctgaagtctacagaacttttagttctgtgctgtctatgtggacactttggtaaaatgcaaattatgatatggacgttatcattggtctggtgagatgtttcatatttgtgacagttaatttaaaaattatgagttaatgctgcctgtgtctatggggttctgtcttctttgatagccatctattcatctggatcatgggaccctctctaatccttccaccaatcaaataagctattgctattggtttggagttgagatatcagtctcggaaacttctgaaaaatgctaataattacccaaggattatgtcaaattttaaaataaatgtgtgtgtgtttctttaa

SEQ ID NO: 441236 - DNA, 1632 bp, Homo sapiens
gctcttcttccttccttctccagtcccttccactgtgcgtcttctgtcccccgttcttccccagcggacccctctttcgagactccctagtggggtccccagctcccgggcgatcctgcccttgccgagcgcgttttctggagtcacctgggggaggggagtcctgggcagggccgggctggggaagacgcctggggcactgcccggcgttaacaaagggagccgataccgaccggcgtgggcgcggagcgggcggccgccaccgagcgtgctgagcaaccgcagcctccgcggccgagagtgcagcgagcaaggggagagccagttgcgcagagccctgcaaccagcagttcccctctccctgatagggaatcctgctggaccagcgcagccctggtgtggagaggttaaaagacttgcacaggatcaccaagtcatgctgtagagccaggattcctagacccagggctctgcactctcaaggctggccccatgtgctcaaggggatctaatgtttgggctccaaactaaccatctcggagctgggctcctcatttactgccaaaccctcagcttatgtagctagaaagggccctggagtgagaaagcctggattttcaaattgatgctcccctactgactagctgtgccactctgggcaaatgctcttccttgagcctgtttccacacctgtaaagtggggatgatgatcctatctcactgcttttgtgaggattacaggaaagcacctgtcctggctctgtacctggcacgtagtaggtgctcagttcatgctggtttccttcctgcctttagtagggacctgctctgtgctcacacctcggctgcatgcaccctgctgtgacggaggctagtgtggaagaggtcctgtcctcagggaattaactgtcttattgggagacaacaactgtcctccttggaacacccaagaaaccatgcaaagcagtggacaacacagaacacgccctcctcctcgctgcctgcagctccaatctgattctgcttgggaatgggcggagcacgtgggctgcttaactgctgtataggacaagccccttacccctctctgggcccatgaattcctggcttggtttatgttctgatttgacacactgattttaatcttcgaatcatgacactgagtgcagaggaggtggcattccgacagcaggacatacatgttggtgtgaagactgggacgacactgggtagaatctagtttttaattattattaatataaaggatcaaattaatttaaatatgattctgaagtctacagaacttttagttctgtgctgtctatgtggacactttggtaaaatgcaaattatgatatggacgttatcattggtctggtgagatgtttcatatttgtgacagttaatttaaaaattatgagttaatgctgcctgtgtctatggggttctgtcttctttgatagccatctattcatctggatcatgggaccctctctaatccttccaccaatcaaataagctattgctattggtttggagttgagatatcagtctcggaaacttctgaaaaatgctaataattacccaaggattatgtcaaattttaaaataaatgtgtgtgtgtttctttaa

SEQ ID NO: 441237 - DNA, 1193 bp, Homo sapiens
ggctgcaggattcggcacgagagccagggctctgcactctcaaggctggccccatgtgctcaaggggatctaatgtttgggctccaaactaaccatctcggagctgggctcctcatttactgccaaaccctcagcttatgtagctagaaagggccctggagtgagaaagcctggattttcaaattgatgctcccctactgactagctgtgccactctgggcaaatgctcttccttgagcctgtttccacacctgtaaagtggggatgatgatcctatctcactgcttttgtgaggattacaggaaagcacctgtcctggctctgtacctggcacgtagtaggtgctcagttcatgctggtttccttcctgcctttagtagggacctgctctgtgctcacacctcggctgcatgcaccctgctgtgacggaggctagtgtggaagaggtcctgtcctcagggaattaactgtcttattgggagacaacaactgtcctccttggaacacccaagaaaccatgcaaagcagtggacaacacagaacacgccctcctcctcgctgcctgcagctccaatctgattctgcttgggaatgggcggagcacgtgggctgcttaactgctgtataggacaagccccttacccctctctgggcccatgaattcctggcttggtttatgttctgatttgacacactgattttaatcttcgaatcatgacactgagtgcagaggaggtggcattccgacagcaggacatacatgttggtgtgaagactgggacgacactgggtagaatctagtttttaattattattaatataaaggatcaaattaatttaaatatgattctgaagtctacagaacttttagttctgtgctgtctatgtggacactttggtaaaatgcaaattatgatatggacgttatcattggtctggtgagatgtttcatatttgtgacagttaatttaaaaattatgagttaatgctgcctgtgtctatggggttctgtcttctttgatagccatctattcatctggatcatgggaccctctctaatccttccaccaatcaaataagctattgctattggtttggagttgagatatcagtctcggaaacttctgaaaaatgctaataattacccaaggattatgtcaaattttaaaataaatgtgtgtgtgtttctttaa

SEQ ID NO: 441238 - DNA, 1561 bp, Homo sapiens
gctcttcttccttccttctccagtcccttccactgtgcgtcttctgtcccccgttcttccccagcggacccctctttcgagactccctagtggggtccccagctcccgggcgatcctgcccttgccgagcgcgttttctggagtcacctgggggaggggagtcctgggcagggccgggctggggaagacgcctggggcactgcccggcgttaacaaagggagccgataccgaccggcgtgggcgcggagcgggcggccgccaccgagcgtgctgagcaaccgcagcctccgcggccgagagtgcagcgagcaaggggagagccagttgcgcagagccctgcaaccagcagtccagggagaagtggtgaatgtcatggagcccagctgaaatggactggcccccttgagcctgtcccaagccctggtgccaggtgtccatccccgtgctgagatgagttttgatcatcctgagaaaaatgggccttggcctgcagacccaataaaccttccctcccatggataatagtgctaattcctgaggacctgaagggcctgccgcccctgggggattagccagaagcaggcttgttttcctgctcagaacaaagtgacttccctgaacacatcttcattatgattcacaccaacctgaagaaaaagttcagctgctgcgtcctggtctttcttctgtttgcagtcatctgtgtgtggaaggaaaagaagaaagggagttactatgattcctttaaattgcaaaccaaggaattccaggtgttaaagagtctggggaaattggccatggggtctgattcccagtctgtatcctcaagcagcacccaggacccccacaggggccgccagaccctcggcagtctcagaggcctagccaaggccaaaccagaggcctccttccaggtgtggaacaaggacagctcttccaaaaaccttatccctaggctgcaaaagatctggaagaattacctaagcatgaacaagtacaaagtgtcctacaaggggccaggaccaggcatcaagttcagtgcagaggccctgcgctgccacctccgggaccatgtgaatgtatccatggtagaggtcacagattttcccttcaatacctctgaatgggagggttatctgcccaaggagagcattaggaccaaggctgggccttggggcaggtgtgctgttgtgtcgtcagcgggatctctgaagtcctcccaactaggcagagaaatcgatgatcatgacgcagtcctgaggtttaatggggcacccacagccaacttccaacaagatgtgggcacaaaaactaccattcgcctgatgaactctcaggtaaaatttcttctgtgcagctatggagtaagagaaggaccacagtgtgggctctaatgtggaatgtatctactgggagcatatctaggctgccaattaagtctcttgatcttcctgagttcctgattcctcactggagaagaagacaatgattccatgacccaactgatgatgtgttttttaaagaaaaaccctttagtattagtgtctgctaatggaggtg

SEQ ID NO: 441239 - DNA, 1326 bp, Homo sapiens
gctcttcttccttccttctccagtcccttccactgtgcgtcttctgtcccccgttcttccccagcggacccctctttcgagactccctagtggggtccccagctcccgggcgatcctgcccttgccgagcgcgttttctggagtcacctgggggaggggagtcctgggcagggccgggctggggaagacgcctggggcactgcccggcgttaacaaagggagccgataccgaccggcgtgggcgcggagcgggcggccgccaccgagcgtgctgagcaaccgcagcctccgcggccgagagtgcagcgagcaaggggagagccagttgcgcagagccctgcaaccagcagtccagggagaagtggtgaatgtcatggagcccagctgaaatggactggcccccttgagcctgtcccaagccctggtgccaggtgtccatccccgtgctgagatgagttttgatcatcctgagaaaaatgggccttggcctgcagacccaataaaccttccctcccatggataatagtgctaattcctgaggacctgaagggcctgccgcccctgggggattagccagaagcaggcttgttttcctgctcagaacaaagtgacttccctgaacacatcttcattatgattcacaccaacctgaagaaaaagttcagctgctgcgtcctggtctttcttctgtttgcagtcatctgtgtgtggaaggaaaagaagaaagggagttactatgattcctttaaattgcaaaccaaggaattccaggtgttaaagagtctggggaaattggccatggggtctgattcccagtctgtatcctcaagcagcacccaggacccccacaggggccgccagaccctcggcagtctcagaggcctagccaaggccaaaccagaggcctccttccaggtgtggaacaaggacagctcttccaaaaaccttatccctaggctgcaaaagatctggaagaattacctaagcatgaacaagtacaaagtgtcctacaaggggccaggaccaggcatcaagttcagtgcagaggccctgcgctgccacctccgggaccatgtgaatgtatccatggtagaggtcacagattttcccttcaatacctctgaatgggagggttatctgcccaaggagagcattaggaccaaggctgggccttggggcaggtgtgctgttgtgtcgtcagcgggatctctgaagtcctcccaactaggcagagaaatcggtatgttctggggttgttctgtgaatggcagtgcttattgggactggctgggcatattgatggtatgggagacaagtggcccaagt

SEQ ID NO: 441240 - DNA, 889 bp, Homo sapiens
gctcttcttccttccttctccagtcccttccactgtgcgtcttctgtcccccgttcttccccagcggacccctctttcgagactccctagtggggtccccagctcccgggcgatcctgcccttgccgagcgcgttttctggagtcacctgggggaggggagtcctgggcagggccgggctggggaagacgcctggggcactgcccggcgttaacaaagggagccgataccgaccggcgtgggcgcggagcgggcggccgccaccgagcgtgctgagcaaccgcagcctccgcggccgagagtgcagcgagcaaggggagagccagttgcgcagagccctgcaaccagcagtccagggagaagtggtgaatgtcatggagcccagctgaaatggactggcccccttgagcctgtcccaagccctggtgccaggtgtccatccccgtgctgaggtaagaccccctgaagcccagcctgaggaagagaggacacaatgccttttttgcaggggcaggaggcagagggccttctcaggaaagaaggagcagttagttgtttctggttcagtcaaaccatctgcttcagcctcagcccgttgggaggcaaggtcaattggtggccaaagaggcttctgctttgtcagagcaggtctttggaatcttgatgggagttgtattttctcagttgctggtgaaatttgaattcccaagggaatacatttatcctccaggtaagactgcaccggattcaggtgaatgcttaagtatacctcctctgctctgcaagggagctcttgggaaacacacacacacgcacacacacacgcgcgtgccacgctctctctctttcaacccaagggtgacagagtgaaacattatgcagagaggtta

SEQ ID NO: 441241 - DNA, 4605 bp, Homo sapiens
gctcttcttccttccttctccagtcccttccactgtgcgtcttctgtcccccgttcttccccagcggacccctctttcgagactccctagtggggtccccagctcccgggcgatcctgcccttgccgagcgcgttttctggagtcacctgggggaggggagtcctgggcagggccgggctggggaagacgcctggggcactgcccggcgttaacaaagggagccgataccgaccggcgtgggcgcggagcgggcggccgccaccgagcgtgctgagcaaccgcagcctccgcggccgagagtgcagcgagcaaggggagagccagttgcgcagagccctgcaaccagcagtccagggagaagtggtgaatgtcatggagcccagctgaaatggactggcccccttgagcctgtcccaagccctggtgccaggtgtccatccccgtgctgagatgagttttgatcatcctgagaaaaatgggccttggcctgcagacccaataaaccttccctcccatggataatagtgctaattcctgaggacctgaagggcctgccgcccctgggggattagccagaagcaggcttgttttcctgctcagaacaaagtgacttccctgaacacatcttcattatgattcacaccaacctgaagaaaaagttcagctgctgcgtcctggtctttcttctgtttgcagtcatctgtgtgtggaaggaaaagaagaaagggagttactatgattcctttaaattgcaaaccaaggaattccaggtgttaaagagtctggggaaattggccatggggtctgattcccagtctgtatcctcaagcagcacccaggacccccacaggggccgccagaccctcggcagtctcagaggcctagccaaggccaaaccagaggcctccttccaggtgtggaacaaggacagctcttccaaaaaccttatccctaggctgcaaaagatctggaagaattacctaagcatgaacaagtacaaagtgtcctacaaggggccaggaccaggcatcaagttcagtgcagaggccctgcgctgccacctccgggaccatgtgaatgtatccatggtagaggtcacagattttcccttcaatacctctgaatgggagggttatctgcccaaggagagcattaggaccaaggctgggccttggggcaggtgtgctgttgtgtcgtcagcgggatctctgaagtcctcccaactaggcagagaaatcgatgatcatgacgcagtcctgaggtttaatggggcacccacagccaacttccaacaagatgtgggcacaaaaactaccattcgcctgatgaactctcagttggttaccacagagaagcgcttcctcaaagacagtttgtacaatgaaggaatcctaattgtatgggacccatctgtataccactcagatatcccaaagtggtaccagaatccggattataatttctttaacaactacaagacttatcgtaagctgcaccccaatcagcccttttacatcctcaagccccagatgccttgggagctatgggacattcttcaagaaatctccccagaagagattcagccaaaccccccatcctctgggatgcttggtatcatcatcatgatgacgctgtgtgaccaggtggatatttatgagttcctcccatccaagcgcaagactgacgtgtgctactactaccagaagttcttcgatagtgcctgcacgatgggtgcctaccacccgctgctctatgagaagaatttggtgaagcatctcaaccagggcacagatgaggacatctacctgcttggaaaagccacactgcctggcttccggaccattcactgctaagcacaggctcctcactcttctccatcaggcattaaatgaatggtctcttggccaccccagcctgggaagaacattttcctgaacaattccagcctgctccttttactctaggggcctctgtcagcaagaccatggggacttcaagagcctgtggtcaggaaatcaggtccagccttccctgtagccagacagtttatgagcccagagcctcctgccacacacatgcacacatatctagcattctttccagacagcatcctccccgccttccaccttggtagatgcaaggtctatctctcccatcagggctgccaaagctgggctttgtttttcccagcagaatgatgccattctcacaaaccaatgctctatattgcttgaagtctgcatctaaatattgatttcacgttttaaagaaattctcttaaattacaattgtgcccaatgcagggtggctctggggggcaagtaggtggtacaggggattggaaacatgctccgcgcctccagagaaaagttgctcccgaggtccatgcccctggaacgtgttcctatcactctggctggttgggctggtccttagactgggtgcttatgattaaagggtcttggttagcccactttccctctccatgtggagatggaaggtagagaaggatacagtgtctatcctcaagttgctacggttcagtgagagaggcagacatctgaacaggcaggtaggattcagtgtgctcagtgcactggggatttggagagagatgggcttgctctctctgtgcacccaggagggccacgcacttaaaactgtgtttgtggatcagagaaggctttatagcacagggggcattcagatgagtcttagaggaagagaagaaacatggcaagcagattacatctgagccgtttgaattgtgtttttctttcttcccatgtttattttctaagatctacctgaacttagagactcaagatatttttttaggaaacctcctacccatgtctgaggtagcaagtgcagcctcacgacagataccaggcaatccagagccacaaaacgtgattcctccaggctctgcctggcctgaccctgtcctgtcagctgggtttacataccagtcccattcttccttttcaatacctacccccaaatcttctcctaaccaccatctgttttttttttttaaaagcattttttgctttaaaagcatcctgaccccaatttctttgagctcacgggccttttgctgaaggtctctcagggtgtagtggtgtggctctctggacttaacgtcactctcagaggtcagaaccttggagatcagaactgattctcaccaggtgtgagaggtgtggtagcagattgcaatgctctgcacctcttccttgcaagtgagcaacttcaggctctctgggcagaggctggcccactgtagtttgcagacatgctctccagatggttttactaagtcccctctccctgatagggaatcctgctggaccagcgcagccctggtgtggagaggttaaaagacttgcacaggatcaccaagtcatgctgtagagccaggattcctagacccagggctctgcactctcaaggctggccccatgtgctcaaggggatctaatgtttgggctccaaactaaccatctcggagctgggctcctcatttactgccaaaccctcagcttatgtagctagaaagggccctggagtgagaaagcctggattttcaaattgatgctcccctactgactagctgtgccactctgggcaaatgctcttccttgagcctgtttccacacctgtaaagtggggatgatgatcctatctcactgcttttgtgaggattacaggaaagcacctgtcctggctctgtacctggcacgtagtaggtgctcagttcatgctggtttccttcctgcctttagtagggacctgctctgtgctcacacctcggctgcatgcaccctgctgtgacggaggctagtgtggaagaggtcctgtcctcagggaattaactgtcttattgggagacaacaactgtcctccttggaacacccaagaaaccatgcaaagcagtggacaacacagaacacgccctcctcctcgctgcctgcagctccaatctgattctgcttgggaatgggcggagcacgtgggctgcttaactgctgtataggacaagccccttacccctctctgggcccatgaattcctggcttggtttatgttctgatttgacacactgattttaatcttcgaatcatgacactgagtgcagaggaggtggcattccgacagcaggacatacatgttggtgtgaagactgggacgacactgggtagaatctagtttttaattattattaatataaaggatcaaattaatttaaatatgattctgaagtctacagaacttttagttctgtgctgtctatgtggacactttggtaaaatgcaaattatgatatggacgttatcattggtctggtgagatgtttcatatttgtgacagttaatttaaaaattatgagttaatgctgcctgtgtctatggggttctgtcttctttgatagccatctattcatctggatcatgggaccctctctaatccttccaccaatcaaataagctattgctattggtttggagttgagatatcagtctcggaaacttctgaaaaatgctaataattacccaaggattatgtcaaattttaaaataaatgtgtgtgtgtttctttaa

SEQ ID NO: 441242 - DNA, 4235 bp, Homo sapiens
ggaggaggttcctgtagggcggcacaaccagggagggcgtggaagctctgcatcccttctcccataccttgctctacacatctcttcatctgtatcctctgcagcatccttgatgataaaccagtaaatatgagttttgatcatcctgagaaaaatgggccttggcctgcagacccaataaaccttccctcccatggataatagtgctaattcctgaggacctgaagggcctgccgcccctgggggattagccagaagcaggcttgttttcctgctcagaacaaagtgacttccctgaacacatcttcattatgattcacaccaacctgaagaaaaagttcagctgctgcgtcctggtctttcttctgtttgcagtcatctgtgtgtggaaggaaaagaagaaagggagttactatgattcctttaaattgcaaaccaaggaattccaggtgttaaagagtctggggaaattggccatggggtctgattcccagtctgtatcctcaagcagcacccaggacccccacaggggccgccagaccctcggcagtctcagaggcctagccaaggccaaaccagaggcctccttccaggtgtggaacaaggacagctcttccaaaaaccttatccctaggctgcaaaagatctggaagaattacctaagcatgaacaagtacaaagtgtcctacaaggggccaggaccaggcatcaagttcagtgcagaggccctgcgctgccacctccgggaccatgtgaatgtatccatggtagaggtcacagattttcccttcaatacctctgaatgggagggttatctgcccaaggagagcattaggaccaaggctgggccttggggcaggtgtgctgttgtgtcgtcagcgggatctctgaagtcctcccaactaggcagagaaatcgatgatcatgacgcagtcctgaggtttaatggggcacccacagccaacttccaacaagatgtgggcacaaaaactaccattcgcctgatgaactctcagttggttaccacagagaagcgcttcctcaaagacagtttgtacaatgaaggaatcctaattgtatgggacccatctgtataccactcagatatcccaaagtggtaccagaatccggattataatttctttaacaactacaagacttatcgtaagctgcaccccaatcagcccttttacatcctcaagccccagatgccttgggagctatgggacattcttcaagaaatctccccagaagagattcagccaaaccccccatcctctgggatgcttggtatcatcatcatgatgacgctgtgtgaccaggtggatatttatgagttcctcccatccaagcgcaagactgacgtgtgctactactaccagaagttcttcgatagtgcctgcacgatgggtgcctaccacccgctgctctatgagaagaatttggtgaagcatctcaaccagggcacagatgaggacatctacctgcttggaaaagccacactgcctggcttccggaccattcactgctaagcacaggctcctcactcttctccatcaggcattaaatgaatggtctcttggccaccccagcctgggaagaacattttcctgaacaattccagcctgctccttttactctaggggcctctgtcagcaagaccatggggacttcaagagcctgtggtcaggaaatcaggtccagccttccctgtagccagacagtttatgagcccagagcctcctgccacacacatgcacacatatctagcattctttccagacagcatcctccccgccttccaccttggtagatgcaaggtctatctctcccatcagggctgccaaagctgggctttgtttttcccagcagaatgatgccattctcacaaaccaatgctctatattgcttgaagtctgcatctaaatattgatttcacgttttaaagaaattctcttaaattacaattgtgcccaatgcagggtggctctggggggcaagtaggtggtacaggggattggaaacatgctccgcgcctccagagaaaagttgctcccgaggtccatgcccctggaacgtgttcctatcactctggctggttgggctggtccttagactgggtgcttatgattaaagggtcttggttagcccactttccctctccatgtggagatggaaggtagagaaggatacagtgtctatcctcaagttgctacggttcagtgagagaggcagacatctgaacaggcaggtaggattcagtgtgctcagtgcactggggatttggagagagatgggcttgctctctctgtgcacccaggagggccacgcacttaaaactgtgtttgtggatcagagaaggctttatagcacagggggcattcagatgagtcttagaggaagagaagaaacatggcaagcagattacatctgagccgtttgaattgtgtttttctttcttcccatgtttattttctaagatctacctgaacttagagactcaagatatttttttaggaaacctcctacccatgtctgaggtagcaagtgcagcctcacgacagataccaggcaatccagagccacaaaacgtgattcctccaggctctgcctggcctgaccctgtcctgtcagctgggtttacataccagtcccattcttccttttcaatacctacccccaaatcttctcctaaccaccatctgttttttttttttaaaagcattttttgctttaaaagcatcctgaccccaatttctttgagctcacgggccttttgctgaaggtctctcagggtgtagtggtgtggctctctggacttaacgtcactctcagaggtcagaaccttggagatcagaactgattctcaccaggtgtgagaggtgtggtagcagattgcaatgctctgcacctcttccttgcaagtgagcaacttcaggctctctgggcagaggctggcccactgtagtttgcagacatgctctccagatggttttactaagtcccctctccctgatagggaatcctgctggaccagcgcagccctggtgtggagaggttaaaagacttgcacaggatcaccaagtcatgctgtagagccaggattcctagacccagggctctgcactctcaaggctggccccatgtgctcaaggggatctaatgtttgggctccaaactaaccatctcggagctgggctcctcatttactgccaaaccctcagcttatgtagctagaaagggccctggagtgagaaagcctggattgctcttccttgagcctgtttccacacctgtaaagtggggatgatgatcctatctcactgcttttgtgaggattacaggaaagcacctgtcctggctctgtacctggcacgtagtaggtgctcagttcatgctggtttccttcctgcctttagtagggacctgctctgtgctcacacctcggctgcatgcaccctgctgtgacggaggctagtgtggaagaggtcctgtcctcagggaattaactgtcttattgggagacaacaactgtcctccttggaacacccaagaaaccatgcaaagcagtggacaacacagaacacgccctcctcctcgctgcctgcagctccaatctgattctgcttgggaatgggcggagcacgtgggctgcttaactgctgtataggacaagccccttacccctctctgggcccatgaattcctggcttggtttatgttctgatttgacacactgattttaatcttcgaatcatgacactgagtgcagaggaggtggcattccgacagcaggacatacatgttggtgtgaagactgggacgacactgggtagaatctagtttttaattattattaatataaaggatcaaattaatttaaatatgattctgaagtctacagaacttttagttctgtgctgtctatgtggacactttggtaaaatgcaaattatgatatggacgttatcattggtctggtgagatgtttcatatttgtgacagttaatttaaaaattatgagttaatgctgcctgtgtctatggggttctgtcttctttgatagccatctattcatctggatcatgggaccctctctaatccttccaccaatcaaataagctattgctattggtttggagttgagatatcagtctcggaaacttctgaaaaatgctaataattacccaaggattatgtcaaattttaaaataaatgtgtgtgtgtttctttaa

SEQ ID NO: 441243 - DNA, 4346 bp, Homo sapiens
ggctctagaggcgccacttgctggaagagggcgagagagacatttaaaaggcaaggggagagccagttgcgcagagccctgcaaccagcagtccagggagaagtggtgaatgtcatggagcccagctgaaatggactggcccccttgagcctgtcccaagccctggtgccaggtgtccatccccgtgctgagatgagttttgatcatcctgagaaaaatgggccttggcctgcagacccaataaaccttccctcccatggataatagtgctaattcctgaggacctgaagggcctgccgcccctgggggattagccagaagcaggcttgttttcctgctcagaacaaagtgacttccctgaacacatcttcattatgattcacaccaacctgaagaaaaagttcagctgctgcgtcctggtctttcttctgtttgcagtcatctgtgtgtggaaggaaaagaagaaagggagttactatgattcctttaaattgcaaaccaaggaattccaggtgttaaagagtctggggaaattggccatggggtctgattcccagtctgtatcctcaagcagcacccaggacccccacaggggccgccagaccctcggcagtctcagaggcctagccaaggccaaaccagaggcctccttccaggtgtggaacaaggacagctcttccaaaaaccttatccctaggctgcaaaagatctggaagaattacctaagcatgaacaagtacaaagtgtcctacaaggggccaggaccaggcatcaagttcagtgcagaggccctgcgctgccacctccgggaccatgtgaatgtatccatggtagaggtcacagattttcccttcaatacctctgaatgggagggttatctgcccaaggagagcattaggaccaaggctgggccttggggcaggtgtgctgttgtgtcgtcagcgggatctctgaagtcctcccaactaggcagagaaatcgatgatcatgacgcagtcctgaggtttaatggggcacccacagccaacttccaacaagatgtgggcacaaaaactaccattcgcctgatgaactctcagttggttaccacagagaagcgcttcctcaaagacagtttgtacaatgaaggaatcctaattgtatgggacccatctgtataccactcagatatcccaaagtggtaccagaatccggattataatttctttaacaactacaagacttatcgtaagctgcaccccaatcagcccttttacatcctcaagccccagatgccttgggagctatgggacattcttcaagaaatctccccagaagagattcagccaaaccccccatcctctgggatgcttggtatcatcatcatgatgacgctgtgtgaccaggtggatatttatgagttcctcccatccaagcgcaagactgacgtgtgctactactaccagaagttcttcgatagtgcctgcacgatgggtgcctaccacccgctgctctatgagaagaatttggtgaagcatctcaaccagggcacagatgaggacatctacctgcttggaaaagccacactgcctggcttccggaccattcactgctaagcacaggctcctcactcttctccatcaggcattaaatgaatggtctcttggccaccccagcctgggaagaacattttcctgaacaattccagcctgctccttttactctaggggcctctgtcagcaagaccatggggacttcaagagcctgtggtcaggaaatcaggtccagccttccctgtagccagacagtttatgagcccagagcctcctgccacacacatgcacacatatctagcattctttccagacagcatcctccccgccttccaccttggtagatgcaaggtctatctctcccatcagggctgccaaagctgggctttgtttttcccagcagaatgatgccattctcacaaaccaatgctctatattgcttgaagtctgcatctaaatattgatttcacgttttaaagaaattctcttaaattacaattgtgcccaatgcagggtggctctggggggcaagtaggtggtacaggggattggaaacatgctccgcgcctccagagaaaagttgctcccgaggtccatgcccctggaacgtgttcctatcactctggctggttgggctggtccttagactgggtgcttatgattaaagggtcttggttagcccactttccctctccatgtggagatggaaggtagagaaggatacagtgtctatcctcaagttgctacggttcagtgagagaggcagacatctgaacaggcaggtaggattcagtgtgctcagtgcactggggatttggagagagatgggcttgctctctctgtgcacccaggagggccacgcacttaaaactgtgtttgtggatcagagaaggctttatagcacagggggcattcagatgagtcttagaggaagagaagaaacatggcaagcagattacatctgagccgtttgaattgtgtttttctttcttcccatgtttattttctaagatctacctgaacttagagactcaagatatttttttaggaaacctcctacccatgtctgaggtagcaagtgcagcctcacgacagataccaggcaatccagagccacaaaacgtgattcctccaggctctgcctggcctgaccctgtcctgtcagctgggtttacataccagtcccattcttccttttcaatacctacccccaaatcttctcctaaccaccatctgttttttttttttaaaagcattttttgctttaaaagcatcctgaccccaatttctttgagctcacgggccttttgctgaaggtctctcagggtgtagtggtgtggctctctggacttaacgtcactctcagaggtcagaaccttggagatcagaactgattctcaccaggtgtgagaggtgtggtagcagattgcaatgctctgcacctcttccttgcaagtgagcaacttcaggctctctgggcagaggctggcccactgtagtttgcagacatgctctccagatggttttactaagtcccctctccctgatagggaatcctgctggaccagcgcagccctggtgtggagaggttaaaagacttgcacaggatcaccaagtcatgctgtagagccaggattcctagacccagggctctgcactctcaaggctggccccatgtgctcaaggggatctaatgtttgggctccaaactaaccatctcggagctgggctcctcatttactgccaaaccctcagcttatgtagctagaaagggccctggagtgagaaagcctggattttcaaattgatgctcccctactgactagctgtgccactctgggcaaatgctcttccttgagcctgtttccacacctgtaaagtggggatgatgatcctatctcactgcttttgtgaggattacaggaaagcacctgtcctggctctgtacctggcacgtagtaggtgctcagttcatgctggtttccttcctgcctttagtagggacctgctctgtgctcacacctcggctgcatgcaccctgctgtgacggaggctagtgtggaagaggtcctgtcctcagggaattaactgtcttattgggagacaacaactgtcctccttggaacacccaagaaaccatgcaaagcagtggacaacacagaacacgccctcctcctcgctgcctgcagctccaatctgattctgcttgggaatgggcggagcacgtgggctgcttaactgctgtataggacaagccccttacccctctctgggcccatgaattcctggcttggtttatgttctgatttgacacactgattttaatcttcgaatcatgacactgagtgcagaggaggtggcattccgacagcaggacatacatgttggtgtgaagactgggacgacactgggtagaatctagtttttaattattattaatataaaggatcaaattaatttaaatatgattctgaagtctacagaacttttagttctgtgctgtctatgtggacactttggtaaaatgcaaattatgatatggacgttatcattggtctggtgagatgtttcatatttgtgacagttaatttaaaaattatgagttaatgctgcctgtgtctatggggttctgtcttctttgatagccatctattcatctggatcatgggaccctctctaatccttccaccaatcaaataagctattgctattggtttggagttgagatatcagtctcggaaacttctgaaaaatgctaataattacccaaggattatgtcaaattttaaaataaatgtgtgtgtgtttctttaa

SEQ ID NO: 441244 - DNA, 4297 bp, Homo sapiens
cattttttcaacaaatatatgccatggaaaagaagaagtaagggagcgaggaactcttctagataagagagaattgaaaatggcacatcatccagtcatccaaacaaaatgtcctgtccttgtttggatccccttttgagcagatgagttttgatcatcctgagaaaaatgggccttggcctgcagacccaataaaccttccctcccatggataatagtgctaattcctgaggacctgaagggcctgccgcccctgggggattagccagaagcaggcttgttttcctgctcagaacaaagtgacttccctgaacacatcttcattatgattcacaccaacctgaagaaaaagttcagctgctgcgtcctggtctttcttctgtttgcagtcatctgtgtgtggaaggaaaagaagaaagggagttactatgattcctttaaattgcaaaccaaggaattccaggtgttaaagagtctggggaaattggccatggggtctgattcccagtctgtatcctcaagcagcacccaggacccccacaggggccgccagaccctcggcagtctcagaggcctagccaaggccaaaccagaggcctccttccaggtgtggaacaaggacagctcttccaaaaaccttatccctaggctgcaaaagatctggaagaattacctaagcatgaacaagtacaaagtgtcctacaaggggccaggaccaggcatcaagttcagtgcagaggccctgcgctgccacctccgggaccatgtgaatgtatccatggtagaggtcacagattttcccttcaatacctctgaatgggagggttatctgcccaaggagagcattaggaccaaggctgggccttggggcaggtgtgctgttgtgtcgtcagcgggatctctgaagtcctcccaactaggcagagaaatcgatgatcatgacgcagtcctgaggtttaatggggcacccacagccaacttccaacaagatgtgggcacaaaaactaccattcgcctgatgaactctcagttggttaccacagagaagcgcttcctcaaagacagtttgtacaatgaaggaatcctaattgtatgggacccatctgtataccactcagatatcccaaagtggtaccagaatccggattataatttctttaacaactacaagacttatcgtaagctgcaccccaatcagcccttttacatcctcaagccccagatgccttgggagctatgggacattcttcaagaaatctccccagaagagattcagccaaaccccccatcctctgggatgcttggtatcatcatcatgatgacgctgtgtgaccaggtggatatttatgagttcctcccatccaagcgcaagactgacgtgtgctactactaccagaagttcttcgatagtgcctgcacgatgggtgcctaccacccgctgctctatgagaagaatttggtgaagcatctcaaccagggcacagatgaggacatctacctgcttggaaaagccacactgcctggcttccggaccattcactgctaagcacaggctcctcactcttctccatcaggcattaaatgaatggtctcttggccaccccagcctgggaagaacattttcctgaacaattccagcctgctccttttactctaggggcctctgtcagcaagaccatggggacttcaagagcctgtggtcaggaaatcaggtccagccttccctgtagccagacagtttatgagcccagagcctcctgccacacacatgcacacatatctagcattctttccagacagcatcctccccgccttccaccttggtagatgcaaggtctatctctcccatcagggctgccaaagctgggctttgtttttcccagcagaatgatgccattctcacaaaccaatgctctatattgcttgaagtctgcatctaaatattgatttcacgttttaaagaaattctcttaaattacaattgtgcccaatgcagggtggctctggggggcaagtaggtggtacaggggattggaaacatgctccgcgcctccagagaaaagttgctcccgaggtccatgcccctggaacgtgttcctatcactctggctggttgggctggtccttagactgggtgcttatgattaaagggtcttggttagcccactttccctctccatgtggagatggaaggtagagaaggatacagtgtctatcctcaagttgctacggttcagtgagagaggcagacatctgaacaggcaggtaggattcagtgtgctcagtgcactggggatttggagagagatgggcttgctctctctgtgcacccaggagggccacgcacttaaaactgtgtttgtggatcagagaaggctttatagcacagggggcattcagatgagtcttagaggaagagaagaaacatggcaagcagattacatctgagccgtttgaattgtgtttttctttcttcccatgtttattttctaagatctacctgaacttagagactcaagatatttttttaggaaacctcctacccatgtctgaggtagcaagtgcagcctcacgacagataccaggcaatccagagccacaaaacgtgattcctccaggctctgcctggcctgaccctgtcctgtcagctgggtttacataccagtcccattcttccttttcaatacctacccccaaatcttctcctaaccaccatctgttttttttttttaaaagcattttttgctttaaaagcatcctgaccccaatttctttgagctcacgggccttttgctgaaggtctctcagggtgtagtggtgtggctctctggacttaacgtcactctcagaggtcagaaccttggagatcagaactgattctcaccaggtgtgagaggtgtggtagcagattgcaatgctctgcacctcttccttgcaagtgagcaacttcaggctctctgggcagaggctggcccactgtagtttgcagacatgctctccagatggttttactaagtcccctctccctgatagggaatcctgctggaccagcgcagccctggtgtggagaggttaaaagacttgcacaggatcaccaagtcatgctgtagagccaggattcctagacccagggctctgcactctcaaggctggccccatgtgctcaaggggatctaatgtttgggctccaaactaaccatctcggagctgggctcctcatttactgccaaaccctcagcttatgtagctagaaagggccctggagtgagaaagcctggattttcaaattgatgctcccctactgactagctgtgccactctgggcaaatgctcttccttgagcctgtttccacacctgtaaagtggggatgatgatcctatctcactgcttttgtgaggattacaggaaagcacctgtcctggctctgtacctggcacgtagtaggtgctcagttcatgctggtttccttcctgcctttagtagggacctgctctgtgctcacacctcggctgcatgcaccctgctgtgacggaggctagtgtggaagaggtcctgtcctcagggaattaactgtcttattgggagacaacaactgtcctccttggaacacccaagaaaccatgcaaagcagtggacaacacagaacacgccctcctcctcgctgcctgcagctccaatctgattctgcttgggaatgggcggagcacgtgggctgcttaactgctgtataggacaagccccttacccctctctgggcccatgaattcctggcttggtttatgttctgatttgacacactgattttaatcttcgaatcatgacactgagtgcagaggaggtggcattccgacagcaggacatacatgttggtgtgaagactgggacgacactgggtagaatctagtttttaattattattaatataaaggatcaaattaatttaaatatgattctgaagtctacagaacttttagttctgtgctgtctatgtggacactttggtaaaatgcaaattatgatatggacgttatcattggtctggtgagatgtttcatatttgtgacagttaatttaaaaattatgagttaatgctgcctgtgtctatggggttctgtcttctttgatagccatctattcatctggatcatgggaccctctctaatccttccaccaatcaaataagctattgctattggtttggagttgagatatcagtctcggaaacttctgaaaaatgctaataattacccaaggattatgtcaaattttaaaataaatgtgtgtgtgtttctttaa

SEQ ID NO: 441245 - DNA, 3948 bp, Homo sapiens
gctcttcttccttccttctccagtcccttccactgtgcgtcttctgtcccccgttcttccccagcggacccctctttcgagactccctagtggggtccccagctcccgggcgatcctgcccttgccgagcgcgttttctggagtcacctgggggaggggagtcctgggcagggccgggctggggaagacgcctggggcactgcccggcgttaacaaagggagccgataccgaccggcgtgggcgcggagcgggcggccgccaccgagcgtgctgagcaaccgcagcctccgcggccgagagtgcagcgagcaaggggagagccagttgcgcagagccctgcaaccagcagtccagggagaagtggtgaatgtcatggagcccagctgaaatggactggcccccttgagcctgtcccaagccctggtgccaggtgtccatccccgtgctgagatgagttttgatcatcctgagaaaaatgggccttggcctgcagacccaataaaccttccctcccatggataatagtgctaattcctgaggacctgaagggcctgccgcccctgggggattagccagaagcagatgatcatgacgcagtcctgaggtttaatggggcacccacagccaacttccaacaagatgtgggcacaaaaactaccattcgcctgatgaactctcagttggttaccacagagaagcgcttcctcaaagacagtttgtacaatgaaggaatcctaattgtatgggacccatctgtataccactcagatatcccaaagtggtaccagaatccggattataatttctttaacaactacaagacttatcgtaagctgcaccccaatcagcccttttacatcctcaagccccagatgccttgggagctatgggacattcttcaagaaatctccccagaagagattcagccaaaccccccatcctctgggatgcttggtatcatcatcatgatgacgctgtgtgaccaggtggatatttatgagttcctcccatccaagcgcaagactgacgtgtgctactactaccagaagttcttcgatagtgcctgcacgatgggtgcctaccacccgctgctctatgagaagaatttggtgaagcatctcaaccagggcacagatgaggacatctacctgcttggaaaagccacactgcctggcttccggaccattcactgctaagcacaggctcctcactcttctccatcaggcattaaatgaatggtctcttggccaccccagcctgggaagaacattttcctgaacaattccagcctgctccttttactctaggggcctctgtcagcaagaccatggggacttcaagagcctgtggtcaggaaatcaggtccagccttccctgtagccagacagtttatgagcccagagcctcctgccacacacatgcacacatatctagcattctttccagacagcatcctccccgccttccaccttggtagatgcaaggtctatctctcccatcagggctgccaaagctgggctttgtttttcccagcagaatgatgccattctcacaaaccaatgctctatattgcttgaagtctgcatctaaatattgatttcacgttttaaagaaattctcttaaattacaattgtgcccaatgcagggtggctctggggggcaagtaggtggtacaggggattggaaacatgctccgcgcctccagagaaaagttgctcccgaggtccatgcccctggaacgtgttcctatcactctggctggttgggctggtccttagactgggtgcttatgattaaagggtcttggttagcccactttccctctccatgtggagatggaaggtagagaaggatacagtgtctatcctcaagttgctacggttcagtgagagaggcagacatctgaacaggcaggtaggattcagtgtgctcagtgcactggggatttggagagagatgggcttgctctctctgtgcacccaggagggccacgcacttaaaactgtgtttgtggatcagagaaggctttatagcacagggggcattcagatgagtcttagaggaagagaagaaacatggcaagcagattacatctgagccgtttgaattgtgtttttctttcttcccatgtttattttctaagatctacctgaacttagagactcaagatatttttttaggaaacctcctacccatgtctgaggtagcaagtgcagcctcacgacagataccaggcaatccagagccacaaaacgtgattcctccaggctctgcctggcctgaccctgtcctgtcagctgggtttacataccagtcccattcttccttttcaatacctacccccaaatcttctcctaaccaccatctgttttttttttttaaaagcattttttgctttaaaagcatcctgaccccaatttctttgagctcacgggccttttgctgaaggtctctcagggtgtagtggtgtggctctctggacttaacgtcactctcagaggtcagaaccttggagatcagaactgattctcaccaggtgtgagaggtgtggtagcagattgcaatgctctgcacctcttccttgcaagtgagcaacttcaggctctctgggcagaggctggcccactgtagtttgcagacatgctctccagatggttttactaagtcccctctccctgatagggaatcctgctggaccagcgcagccctggtgtggagaggttaaaagacttgcacaggatcaccaagtcatgctgtagagccaggattcctagacccagggctctgcactctcaaggctggccccatgtgctcaaggggatctaatgtttgggctccaaactaaccatctcggagctgggctcctcatttactgccaaaccctcagcttatgtagctagaaagggccctggagtgagaaagcctggattttcaaattgatgctcccctactgactagctgtgccactctgggcaaatgctcttccttgagcctgtttccacacctgtaaagtggggatgatgatcctatctcactgcttttgtgaggattacaggaaagcacctgtcctggctctgtacctggcacgtagtaggtgctcagttcatgctggtttccttcctgcctttagtagggacctgctctgtgctcacacctcggctgcatgcaccctgctgtgacggaggctagtgtggaagaggtcctgtcctcagggaattaactgtcttattgggagacaacaactgtcctccttggaacacccaagaaaccatgcaaagcagtggacaacacagaacacgccctcctcctcgctgcctgcagctccaatctgattctgcttgggaatgggcggagcacgtgggctgcttaactgctgtataggacaagccccttacccctctctgggcccatgaattcctggcttggtttatgttctgatttgacacactgattttaatcttcgaatcatgacactgagtgcagaggaggtggcattccgacagcaggacatacatgttggtgtgaagactgggacgacactgggtagaatctagtttttaattattattaatataaaggatcaaattaatttaaatatgattctgaagtctacagaacttttagttctgtgctgtctatgtggacactttggtaaaatgcaaattatgatatggacgttatcattggtctggtgagatgtttcatatttgtgacagttaatttaaaaattatgagttaatgctgcctgtgtctatggggttctgtcttctttgatagccatctattcatctggatcatgggaccctctctaatccttccaccaatcaaataagctattgctattggtttggagttgagatatcagtctcggaaacttctgaaaaatgctaataattacccaaggattatgtcaaattttaaaataaatgtgtgtgtgtttctttaa

SEQ ID NO: 441246 - DNA, 4551 bp, Homo sapiens
gctcttcttccttccttctccagtcccttccactgtgcgtcttctgtcccccgttcttccccagcggacccctctttcgagactccctagtggggtccccagctcccgggcgatcctgcccttgccgagcgcgttttctggagtcacctgggggaggggagtcctgggcagggccgggctggggaagacgcctggggcactgcccggcgttaacaaagggagccgataccgaccggcgtgggcgcggagcgggcggccgccaccgagcgtgctgagcaaccgcagcctccgcggccgagagtgcagcgagcaaggggagagccagttgcgcagagccctgcaaccagcagtccagggagaagtggtgaatgtcatggagcccagctgaaatggactggcccccttgagcctgtcccaagccctggtgccaggtgtccatccccgtgctgagatgagttttgatcatcctgagaaaaatgggccttggcctgcagacccaataaaccttccctcccatggataatagtgctaattcctgaggacctgaagggcctgccgcccctgggggattagccagaagcaggcttgttttcctgctcagaacaaagtgacttccctgaacacatcttcattatgattcacaccaacctgaagaaaaagttcagctgctgcgtcctggtctttcttctgtttgcagtcatctgtgtgtggaaggaaaagaagaaagggagttactatgattcctttaaattgcaaaccaaggaattccaggtgttaaagagtctggggaaattggccatggggtctgattcccagtctgtatcctcaagcagcacccaggacccccacaggggccgccagaccctcggcagtctcagaggcctagccaaggccaaaccagaggcctccttccaggtgtggaacaaggacagctcttccaaaaaccttatccctaggctgcaaaagatctggaagaattacctaagcatgaacaagtacaaagtgtcctacaaggggccaggaccaggcatcaagttcagtgcagaggccctgcgctgccacctccgggaccatgtgaatgtatccatggtagaggtcacagattttcccttcaatacctctgaatgggagggttatctgcccaaggagagcattaggaccaaggctgggccttggggcaggtgtgctgttgtgtcgtcagcgggatctctgaagtcctcccaactaggcagagaaatcgatgatcatgacgcagtcctgaggtttaatggggcacccacagccaacttccaacaagatgtgggcacaaaaactaccattcgcctgatgaactctcagttggttaccacagagaagcgcttcctcaaagacagtttgtacaatgaaggaatcctaattgtatgggacccatctgtataccactcagatatcccaaagtggtaccagaatccggattataatttctttaacaactacaagacttatcgtaagctgcaccccaatcagcccttttacatcctcaagccccagatgccttgggagctatgggacattcttcaagaaatctccccagaagagattcagccaaaccccccatcctctgggatgcttggtatcatcatcatgatgacgctgtgtgaccaggtggatatttatgagttcctcccatccaagcgcaagactgacgtgtgctactactaccagaagttcttcgatagtgcctgcacgatgggtgcctaccacccgctgctctatgagaagaatttggtgaagcatctcaaccagggcacagatgaggacatctacctgcttggaaaagccacactgcctggcttccggaccattcactgctaagcacaggctcctcactcttctccatcaggcattaaatgaatggtctcttggccaccccagcctgggaagaacattttcctgaacaattccagcctgctccttttactctaggggcctctgtcagcaagaccatggggacttcaagagcctgtggtcaggaaatcaggtccagccttccctgtagccagacagtttatgagcccagagcctcctgccacacacatgcacacatatctagcattctttccagacagcatcctccccgccttccaccttggtagatgcaaggtctatctctcccatcagggctgccaaagctgggctttgtttttcccagcagaatgatgccattctcacaaaccaatgctctatattgcttgaagtctgcatctaaatattgatttcacgttttaaagaaattctcttaaattacaattgtgcccaatgcagggtggctctggggggcaagtaggtggtacaggggattggaaacatgctccgcgcctccagagaaaagttgctcccgaggtccatgcccctggaacgtgttcctatcactctggctggttgggctggtccttagactgggtgcttatgattaaagggtcttggttagcccactttccctctccatgtggagatggaaggtagagaaggatacagtgtctatcctcaagttgctacggttcagtgagagaggcagacatctgaacaggcaggtaggattcagtgtgctcagtgcactggggatttggagagagatgggcttgctctctctgtgcacccaggagggccacgcacttaaaactgtgtttgtggatcagagaaggctttatagcacagggggcattcagatgagtcttagaggaagagaagaaacatggcaagcagattacatctgagccgtttgaattgtgtttttctttcttcccatgtttattttctaagatctacctgaacttagagactcaagatatttttttaggaaacctcctacccatgtctgaggtagcaagtgcagcctcacgacagataccaggcaatccagagccacaaacataccagtcccattcttccttttcaatacctacccccaaatcttctcctaaccaccatctgttttttttttttaaaagcattttttgctttaaaagcatcctgaccccaatttctttgagctcacgggccttttgctgaaggtctctcagggtgtagtggtgtggctctctggacttaacgtcactctcagaggtcagaaccttggagatcagaactgattctcaccaggtgtgagaggtgtggtagcagattgcaatgctctgcacctcttccttgcaagtgagcaacttcaggctctctgggcagaggctggcccactgtagtttgcagacatgctctccagatggttttactaagtcccctctccctgatagggaatcctgctggaccagcgcagccctggtgtggagaggttaaaagacttgcacaggatcaccaagtcatgctgtagagccaggattcctagacccagggctctgcactctcaaggctggccccatgtgctcaaggggatctaatgtttgggctccaaactaaccatctcggagctgggctcctcatttactgccaaaccctcagcttatgtagctagaaagggccctggagtgagaaagcctggattttcaaattgatgctcccctactgactagctgtgccactctgggcaaatgctcttccttgagcctgtttccacacctgtaaagtggggatgatgatcctatctcactgcttttgtgaggattacaggaaagcacctgtcctggctctgtacctggcacgtagtaggtgctcagttcatgctggtttccttcctgcctttagtagggacctgctctgtgctcacacctcggctgcatgcaccctgctgtgacggaggctagtgtggaagaggtcctgtcctcagggaattaactgtcttattgggagacaacaactgtcctccttggaacacccaagaaaccatgcaaagcagtggacaacacagaacacgccctcctcctcgctgcctgcagctccaatctgattctgcttgggaatgggcggagcacgtgggctgcttaactgctgtataggacaagccccttacccctctctgggcccatgaattcctggcttggtttatgttctgatttgacacactgattttaatcttcgaatcatgacactgagtgcagaggaggtggcattccgacagcaggacatacatgttggtgtgaagactgggacgacactgggtagaatctagtttttaattattattaatataaaggatcaaattaatttaaatatgattctgaagtctacagaacttttagttctgtgctgtctatgtggacactttggtaaaatgcaaattatgatatggacgttatcattggtctggtgagatgtttcatatttgtgacagttaatttaaaaattatgagttaatgctgcctgtgtctatggggttctgtcttctttgatagccatctattcatctggatcatgggaccctctctaatccttccaccaatcaaataagctattgctattggtttggagttgagatatcagtctcggaaacttctgaaaaatgctaataattacccaaggattatgtcaaattttaaaataaatgtgtgtgtgtttctttaa

SEQ ID NO: 441247 - DNA, 3057 bp, Homo sapiens
gctcttcttccttccttctccagtcccttccactgtgcgtcttctgtcccccgttcttccccagcggacccctctttcgagactccctagtggggtccccagctcccgggcgatcctgcccttgccgagcgcgttttctggagtcacctgggggaggggagtcctgggcagggccgggctggggaagacgcctggggcactgcccggcgttaacaaagggagccgataccgaccggcgtgggcgcggagcgggcggccgccaccgagcgtgctgagcaaccgcagcctccgcggccgagagtgcagcgagcaaggggagagccagttgcgcagagccctgcaaccagcagtccagggagaagtggtgaatgtcatggagcccagctgaaatggactggcccccttgagcctgtcccaagccctggtgccaggtgtccatccccgtgctgagatgagttttgatcatcctgagaaaaatgggccttggcctgcagacagtttatgagcccagagcctcctgccacacacatgcacacatatctagcattctttccagacagcatcctccccgccttccaccttggtagatgcaaggtctatctctcccatcagggctgccaaagctgggctttgtttttcccagcagaatgatgccattctcacaaaccaatgctctatattgcttgaagtctgcatctaaatattgatttcacgttttaaagaaattctcttaaattacaattgtgcccaatgcagggtggctctggggggcaagtaggtggtacaggggattggaaacatgctccgcgcctccagagaaaagttgctcccgaggtccatgcccctggaacgtgttcctatcactctggctggttgggctggtccttagactgggtgcttatgattaaagggtcttggttagcccactttccctctccatgtggagatggaaggtagagaaggatacagtgtctatcctcaagttgctacggttcagtgagagaggcagacatctgaacaggcaggtaggattcagtgtgctcagtgcactggggatttggagagagatgggcttgctctctctgtgcacccaggagggccacgcacttaaaactgtgtttgtggatcagagaaggctttatagcacagggggcattcagatgagtcttagaggaagagaagaaacatggcaagcagattacatctgagccgtttgaattgtgtttttctttcttcccatgtttattttctaagatctacctgaacttagagactcaagatatttttttaggaaacctcctacccatgtctgaggtagcaagtgcagcctcacgacagataccaggcaatccagagccacaaaacgtgattcctccaggctctgcctggcctgaccctgtcctgtcagctgggtttacataccagtcccattcttccttttcaatacctacccccaaatcttctcctaaccaccatctgttttttttttttaaaagcattttttgctttaaaagcatcctgaccccaatttctttgagctcacgggccttttgctgaaggtctctcagggtgtagtggtgtggctctctggacttaacgtcactctcagaggtcagaaccttggagatcagaactgattctcaccaggtgtgagaggtgtggtagcagattgcaatgctctgcacctcttccttgcaagtgagcaacttcaggctctctgggcagaggctggcccactgtagtttgcagacatgctctccagatggttttactaagtcccctctccctgatagggaatcctgctggaccagcgcagccctggtgtggagaggttaaaagacttgcacaggatcaccaagtcatgctgtagagccaggattcctagacccagggctctgcactctcaaggctggccccatgtgctcaaggggatctaatgtttgggctccaaactaaccatctcggagctgggctcctcatttactgccaaaccctcagcttatgtagctagaaagggccctggagtgagaaagcctggattttcaaattgatgctcccctactgactagctgtgccactctgggcaaatgctcttccttgagcctgtttccacacctgtaaagtggggatgatgatcctatctcactgcttttgtgaggattacaggaaagcacctgtcctggctctgtacctggcacgtagtaggtgctcagttcatgctggtttccttcctgcctttagtagggacctgctctgtgctcacacctcggctgcatgcaccctgctgtgacggaggctagtgtggaagaggtcctgtcctcagggaattaactgtcttattgggagacaacaactgtcctccttggaacacccaagaaaccatgcaaagcagtggacaacacagaacacgccctcctcctcgctgcctgcagctccaatctgattctgcttgggaatgggcggagcacgtgggctgcttaactgctgtataggacaagccccttacccctctctgggcccatgaattcctggcttggtttatgttctgatttgacacactgattttaatcttcgaatcatgacactgagtgcagaggaggtggcattccgacagcaggacatacatgttggtgtgaagactgggacgacactgggtagaatctagtttttaattattattaatataaaggatcaaattaatttaaatatgattctgaagtctacagaacttttagttctgtgctgtctatgtggacactttggtaaaatgcaaattatgatatggacgttatcattggtctggtgagatgtttcatatttgtgacagttaatttaaaaattatgagttaatgctgcctgtgtctatggggttctgtcttctttgatagccatctattcatctggatcatgggaccctctctaatccttccaccaatcaaataagctattgctattggtttggagttgagatatcagtctcggaaacttctgaaaaatgctaataattacccaaggattatgtcaaattttaaaataaatgtgtgtgtgtttctttaa

SEQ ID NO: 441248 - DNA, 1987 bp, Homo sapiens
gctcttcttccttccttctccagtcccttccactgtgcgtcttctgtcccccgttcttccccagcggacccctctttcgagactccctagtggggtccccagctcccgggcgatcctgcccttgccgagcgcgttttctggagtcacctgggggaggggagtcctgggcagggccgggctggggaagacgcctggggcactgcccggcgttaacaaagggagccgataccgaccggcgtgggcgcggagcgggcggccgccaccgagcgtgctgagcaaccgcagcctccgcggccgagagtgcagcgagcaaggggagagccagttgcgcagagccctgcaaccagcagtccagggagaagtggtgaatgtcatggagcccagctgaaatggactggcccccttgagcctgtcccaagccctggtgccaggtgtccatccccgtgctgagatgagttttgatcatcctgagaaaaatgggccttggcctgcagacccaataaaccttccctcccatggataatagtgctaattcctgaggacctgaagggcctgccgcccctgggggattagccagaagcaggcttgttttcctgctcagaacaaagtgacttccctgaacacatcttcattatgattcacaccaacctgaagaaaaagttcagctgctgcgtcctggtctttcttctgtttgcagtcatctgtgtgtggaaggaaaagaagaaagggagttactatgattcctttaaattgcaaaccaaggaattccaggtgttaaagagtctggggaaattggccatggggtctgattcccagtctgtatcctcaagcagcacccaggacccccatgtgctcaaggggatctaatgtttgggctccaaactaaccatctcggagctgggctcctcatttactgccaaaccctcagcttatgtagctagaaagggccctggagtgagaaagcctggattttcaaattgatgctcccctactgactagctgtgccactctgggcaaatgctcttccttgagcctgtttccacacctgtaaagtggggatgatgatcctatctcactgcttttgtgaggattacaggaaagcacctgtcctggctctgtacctggcacgtagtaggtgctcagttcatgctggtttccttcctgcctttagtagggacctgctctgtgctcacacctcggctgcatgcaccctgctgtgacggaggctagtgtggaagaggtcctgtcctcagggaattaactgtcttattgggagacaacaactgtcctccttggaacacccaagaaaccatgcaaagcagtggacaacacagaacacgccctcctcctcgctgcctgcagctccaatctgattctgcttgggaatgggcggagcacgtgggctgcttaactgctgtataggacaagccccttacccctctctgggcccatgaattcctggcttggtttatgttctgatttgacacactgattttaatcttcgaatcatgacactgagtgcagaggaggtggcattccgacagcaggacatacatgttggtgtgaagactgggacgacactgggtagaatctagtttttaattattattaatataaaggatcaaattaatttaaatatgattctgaagtctacagaacttttagttctgtgctgtctatgtggacactttggtaaaatgcaaattatgatatggacgttatcattggtctggtgagatgtttcatatttgtgacagttaatttaaaaattatgagttaatgctgcctgtgtctatggggttctgtcttctttgatagccatctattcatctggatcatgggaccctctctaatccttccaccaatcaaataagctattgctattggtttggagttgagatatcagtctcggaaacttctgaaaaatgctaataattacccaaggattatgtcaaattttaaaataaatgtgtgtgtgtttctttaa

SEQ ID NO: 441249 - DNA, 1418 bp, Homo sapiens
gctcttcttccttccttctccagtcccttccactgtgcgtcttctgtcccccgttcttccccagcggacccctctttcgagactccctagtggggtccccagctcccgggcgatcctgcccttgccgagcgcgttttctggagtcacctgggggaggggagtcctgggcagggccgggctggggaagacgcctggggcactgcccggcgttaacaaagggagccgataccgaccggcgtgggcgcggagcgggcggccgccaccgagcgtgctgagcaaccgcagcctccgcggccgagagtgcagcgagcaaggggagagccagttgcgcagagccctgcaaccagcagtccagggagaagtggtgaatgtcatggagcccagctgaaatggactggcccccttgagcctgtcccaagccctggtgccaggtgtccatccccgtgctgagatgagttttgatcatcctgagaaaaatgggccttggcctgcagacccaataaaccttccctcccatggataatagtgctaattcctgaggacctgaagggcctgccgcccctgggggattagccagaagcaggcttgttttcctgctcagaacaaagtgacttccctgaacacatcttcattatgattcacaccaacctgaagaaaaagttcagctgctgcgtcctggtctttcttctgtttgcagtcatctgtgtgtggaaggaaaagaagaaagggagttactatgattcctttaaattgcaaaccaaggaattccaggtgttaaagagtctggggaaattggccatggggtctgattcccagtctgtatcctcaagcagcacccaggacccccacaggggccgccagaccctcggcagtctcagaggcctagccaaggccaaaccagaggcctccttccaggtgtggaacaaggacagctcttccaaaaaccttatccctaggctgcaaaagatctggaagaattacctaagcatgaacaagtacaaagtgtcctacaaggggccaggaccaggcatcaagttcagtgcagaggccctgcgctgccacctccgggaccatgtgaatgtatccatggtagaggtcacagattttcccttcaatacctctgaatgggagggttatctgcccaaggagagcattaggaccaaggctgggccttggggcaggtgtgctgttgtgtcgtcagcgggatctctgaagtcctcccaactaggcagagaaatcgatgatcatgacgcagtcctgaggtttaatggggcacccacagccaacttccaacaagatgtgggcacaaaaactaccattcgcctgatgaactctcagatctctgtgcaccattgtgccagggctgcgaggaaggtggcccacttcccgggatacactacccaccctcaagagagcct

SEQ ID NO: 441250 - DNA, 513 bp, Homo sapiens
ctctagggcagagtaggcgcgtccctactggatggagggggaagtaacaccccaagaacgctgtcatttcctgggccaagttgggacccggacggcctcaccatgatgaaacgggcagctgctgctgcagtgggaggagccctggcagtgggggctgtgcccgtggtgctcagtgccatgggcttcactggggcaggaatcgccgcgtcctccatagcagccaagatgatgtccgcagcagccattgccaacgggggtggtgtttctgcggggagcctggtggctactctgcagtccgtgggggcagctggactctccacatcatccaacatcctcctggcctctgttgggtcagtgttgggggcctgcttggggaattcaccttcttcttctctcccagctgaacccgaggctaaagaagatgaggcaagagaaaatgtaccccaaggtgaacctccaaaacccccactcaagtcagagaaacatgaggaataaaggtcacatgcagatgca

SEQ ID NO: 441251 - DNA, 471 bp, Homo sapiens
gcccttctctctcctctttctcccctttcccatctccctctgccttcccctggcactctctctctagaacgggcagctgctgctgcagtgggaggagccctggcagtgggggctgtgcccgtggtgctcagtgccatgggcttcactggggcaggaatcgccgcgtcctccatagcagccaagatgatgtccgcagcagccattgccaacgggggtggtgtttctgcggggagcctggtggctactctgcagtccgtgggggcagctggactctccacatcatccaacatcctcctggcctctgttgggtcagtgttgggggcctgcttggggaattcaccttcttcttctctcccagctgaacccgaggctaaagaagatgaggcaagagaaaatgtaccccaaggtgaacctccaaaacccccactcaagtcagagaaacatgaggaataaaggtcacatgcagatgca

SEQ ID NO: 441252 - DNA, 1138 bp, Homo sapiens
ctctagggcagagtaggcgcgtccctactggatggagggggaagtaacaccccaagaacgctgtcatttcctgggccaagttgggacccggacggcctcaccatgatgaaacgggcagctgctgctgcagtgggaggaggtaagttacccggatcgcctgtctccaggccctcacctagcctggtccccgggctgctgggagaacgcagagatgaggcgctgggctggctctcaccctccacttccgaagctgcccgagtagcctgagtgagccacagcatcaaaatactccagggaaaagctcactcccattcctgacccagcttctcttctagtccttatgtcgaataagcataggaggaagatcgtttgaaagaggatttgcagctaaactccacgtggcttatttcacatttatgcgtggacacacacacacacacacacacacacacacaaatttgagaccaatgaagggtattgacttcctcagcatcacacagcaagttagagacaaaccagggccatggctggtccttctatgacatctttgcttcacctggctccacactccaccttttcttcaccagaagaccactaagttgccatctctgtattgctcaagctgacagtctccggaaactgtcaaggaattcctaagcggggggcggggggaagggtcccttctcctgagcccacctctgcactcagcttctctctccccacagccctggcagtgggggctgtgcccgtggtgctcagtgccatgggcttcactggggcaggaatcgccgcgtcctccatagcagccaagatgatgtccgcagcagccattgccaacgggggtggtgtttctgcggggagcctggtggctactctgcagtccgtgggggcagctggactctccacatcatccaacatcctcctggcctctgttgggtcagtgttgggggcctgcttggggaattcaccttcttcttctctcccagctgaacccgaggctaaagaagatgaggcaagagaaaatgtaccccaaggtgaacctccaaaacccccactcaagtcagagaaacatgaggaataaaggtcacatgcagatgcaaaaaaaaaagtcgacgcggccgcgaatttagtagtagta

SEQ ID NO: 441253 - DNA, 1150 bp, Homo sapiens
ctctagggcagagtaggcgcgtccctactggatggagggggaagtaacaccccaagaacgctgtcatttcctgggccaagttgggacccggacggcctcaccatgatgaaacgggcagctgctgctgcagtgggaggaggtaagttacccggatcgcctgtctccaggccctcacctagcctggtccccgggctgctgggagaacgcagagatgaggcgctgggctggctctcaccctccacttccgaagctgcccgagtagcctgagtgagccacagcatcaaaatactccagggaaaagctcactcccattcctgacccagcttctcttctagtccttatgtcgaataagcataggaggaagatcgtttgaaagaggatttgcagctaaactccacgtggcttatttcacatttatgcgtggacacacacacacacacacacacacacacacaaatttgagaccaatgaagggtattgacttcctcagcatcacacagcaagttagagacaaaccagggccatggctggtccttctatgacatctttgcttcacctggctccacactccaccttttcttcaccagaagaccactaagttgccatctctgtattgctcaagctgacagtctccggaaactgtcaaggaattcctaagcggggggcggggggaagggtcccttctcctgagcccacctctgcactcagcttctctctccccacagccctggcagtgggggctgtgcccgtggtgctcagtgccatgggcttcactggggcaggaatcgccgcgtcctccatagcagccaagatgatgtccgcagcagccattgccaacgggggtggtgtttctgcggggagcctggtggctactctgcagtccgtgggtaagtgtcctagacaggaccaccagagctgcgagaagatccagccctgaggctgagcccgagggaagctcttctcaccctgcagttccgtgaccctcagcttcctgggtcttcagtctctccctcactgtcccctcttctggctccttctgagtgaggtttggggtaggagtggaggggtgatggggtgctgggtagggagaagaggaaaggaacctaggccaagagcaatgcctgggttctgacacctgggtgacctgggc

SEQ ID NO: 441254 - DNA, 728 bp, Homo sapiens
ctctagggcagagtaggcgcgtccctactggatggagggggaagtaacaccccaagaacgctgtcatttcctgggccaagttgggacccggacggcctcaccatgatgaaacgggcagctgctgctgcagtgggaggagccctggcagtgggggctgtgcccgtggtgctcagtgccatgggcttcactggggcaggaatcgccgcgtcctccatagcagccaagatgatgtccgcagcagccattgccaacgggggtggtgtttctgcggggagcctggtggctactctgcagtccgtgggggcagctggactctccacatcatccaacatcctcctggcctctgttgggtcagtgttgggggcctgcttggggaattcaccttcttcttctctcccagctgaacccgaggctaaagaagatgaggcaagagaaaatgtaccccaaggtgaacctccaaaacccccactcaagtcagagaaacatgaggaataaaggtcacatgcagatgcaaaaaaaaaaaaaaaaaaaaaaaaaaacacaaaaacaaaaaaaaaaaaaaaaaaaaaaaacaaatgatagcaagaaagaaaaaaagaaggggggggggggagctaagatatcatcgcggggggggcccgattgtcgggaaaccgcgtgtttggcagaggggggcacagagggggggtattatacagcgagcggcggggggtgtacaagtgtgagcg

SEQ ID NO: 441255 - DNA, 552 bp, Homo sapiens
ctctagggcagagtaggcgcgtccctactggatggagggggaagtaacaccccaagaacgctgtcatttcctgggccaagttgggacccggacggcctcaccatgatgaaacgggcagctgctgctgcagtgggaggagccctggcagtgggggctgtgcccgtggtgctcagtgccatgggcttcactggggcaggaatcgccgcgtcctccatagcagccaagatgatgtccgcagcagccattgccaacgggggtggtgtttctgcggggagcctggtggctactctgcagtccgtgggggcagctggactctccacatcatccaacatcctcctggcctctgttgggtcagtgttgggggcctgcttggggaattcaccttcttcttctctcccagctgaacccgaggctaaagaagatgaggcaagagaaaatgtaccccaaggtgaacctccaaaacccccactcaagtcagagaaacatgaggaataaaggtcacatgcagatgcaaaaaaaaaagtcgacgcggccgcgaatttagtagtagta

SEQ ID NO: 441256 - DNA, 317 bp, Homo sapiens
ggtcgatctcgaggatccccatcaaccctaaatttaaaatgctgttgaatatgatacttttgaggagagagtgtgctcagaacttagacgggatttggtaggccaagtatgctaagtgtacaatatattttttaattttacacctgaaacaaagaaatgtggtcactaaaaataaaagtatatatgtaggaattaatgtactcttgctttgtcaagctgtttgctatagtttccaaggtattatgttactctaactctgaaaagtgatgtaatctggtagcaatgtagtagttcaaataaaggcatttacataataa

SEQ ID NO: 441257 - DNA, 3092 bp, Homo sapiens
agattgctcttctgggcgtgggagaaggttctgtctatcagtgctgcgagaaaggaaagaaacaagtttgctctcagcggatctttaaatggatgagatggctaccactcagatttccaaagatgagcttgatgaactcaaagaggcctttgcaaaagttgatctcaacagcaacggattcatttgtgactatgaacttcatgagctcttcaaggaagctaatatgccattaccaggatataaagtgagagaaattattcagaaactcatgctggatggtgacaggaataaagatgggaaaataagttttgacgaatttgtttatatttttcaagaggtaaaaagtagtgatattgccaagaccttccgcaaagcaatcaacaggaaagaaggtatttgtgctctgggtggaacttcagagttgtccagcgaaggaacacagcattcttactcagaggaagaaaaatatgcttttgttaactggataaacaaagctttggaaaatgatcctgattgtagacatgttataccaatgaaccctaacaccgatgacctgttcaaagctgttggtgatggaattgtgctttgtaaaatgattaacctttcagttcctgataccattgatgaaagagcaatcaacaagaagaaacttacacccttcatcattcaggaaaacttgaacttggcactgaactctgcttctgccattgggtgtcatgttgtgaacattggtgcagaagatttgagggctgggaaacctcatctggttttgggactgctttggcagatcattaagatcggtttgttcgctgacattgaattaagcaggaatgaagccttggctgctttactccgagatggtgagactttggaggaacttatgaaattgtctccagaagagcttctgcttagatgggcaaactttcatttggaaaactcgggctggcaaaaaattaacaactttagtgctgacatcaaggattccaaagcctatttccatcttctcaatcaaatcgcaccaaaaggacaaaaggaaggtgaaccacggatagatattaacatgtcaggtttcaatgaaacagatgatttgaagagagctgagagtatgcttcaacaagcagataaattaggttgcagacagtttgttacccctgctgatgttgtcagtggaaaccccaaactcaacttagctttcgtggctaacctgtttaataaatacccagcactaactaagccagagaaccaggatattgactggactctattagaaggagaaactcgtgaagaaagaaccttccgtaactggatgaactctcttggtgtcaatcctcacgtaaaccatctctatgctgacctgcaagatgccctggtaatcttacagttatatgaacgaattaaagttcctgttgactggagtaaggttaataaacctccatacccgaaactgggagccaacatgaaaaagctagaaaactgcaactatgctgttgaattagggaagcatcctgctaaattctccctggttggcattggagggcaagacctgaatgatgggaaccaaaccctgactttagctttagtctggcagctgatgagaagatataccctcaatgtcctggaagatcttggagatggtcagaaagccaatgacgacatcattgtgaactgggtgaacagaacgttgagtgaagctggaaaatcaacttccattcagagttttaaggacaagacgatcagctccagtttggcagttgtggatttaattgatgccatccagccaggctgtataaactatgaccttgtgaagagtggcaatctaacagaagatgacaagcacaataatgccaagtatgcagtgtcaatggctagaagaatcggagccagagtgtatgctctccctgaagaccttgtggaagtaaagcccaagatggtcatgactgtgtttgcatgtttgatgggcaggggaatgaagagagtgtaaaataaccaatctgaataaaacagccatgctcccaggtgcatgattcgcaggtcagctatttccaggtgaagtgcttatggcttaaggaactcttggccattcaaaggacttttcattttgattaacaggactagcttatcatgagagccctcaggggaaagggtttaagaaaaacaactcctctttcccatagtcagagttgaatttgtcaggcacgcctgaaatgtgctcatagccaaaacattttactctctcctcctagaatgctgcccttgacatttcccattgctgtatgttatttcttgctctgttatcttttgccctcttagaatgtccctctcttgggacttgcttagatgatgggatatgaatattattagacagtaattttgctttccatccagtatgctagttcttattcgagaactatggtcagagcgtatttggatatgagtatcctttgcttatctttgtagtactgaaaatttgccgaagtaactggctgtgcagaatgtaatagaagcttttcttattcttttattcttaagatcagtatctttttacagtattctttctacatgatccttttttgtacatttaagaatattttgattatattaaacaagactgctgattttgctactttttttaaggggtcttcaagtaagtaaaacatacatcgtagctagaagaaaaatgtaccttaaatttgcatcttccctctcatacccaagctgtaaacaattgaaatattttgtcttaaatcacttggttcaatacatgcttatttgttttaaaacctgtatcatcaaactctctctctaaatttaaaatgctgttgaatatgatacttttgaggagagagtgtgctcagaacttagacgggatttggtaggccaagtatgctaagtgtacaatatattttttaattttacacctgaaacaaagaaatgtggtcactaaaaataaaagtatatatgtaggaattaatgtactcttgctttgtcaagctgtttgctatagtttccaaggtattatgttactctaactctgaaaagtgatgtaatctggtagcaatgtagtagttcaaataaaggcatttacataataa

SEQ ID NO: 441258 - DNA, 3529 bp, Homo sapiens
ggggcggagggggctggcaggaggggagggagcgctggctttagagccacagctgcaaagattccgaggtgcagaagttgtctgagtgcgttggtcggcggcagtcgggccagacccaggactctgcgactttacatctttaaatggatgagatggctaccactcagatttccaaagatgagcttgatgaactcaaagaggcctttgcaaaagttgtggagacggagtttcaccgtgttagccaggatggtctcgatctcctgacctcgtgatccgcccgtctcggcctcccaaagtgctgggattacagacgtgagccaccgcgcctggcctacacacatgtatttttaaaacgagagttgcagcaggggaaaaatgatggccaaactgctggaaattttgagtcagaaaaggactgataaacatttttgattgcctggtctcaccctctaaacttgtccagccttctgctgtacttgacctccatctttggaaatccactagtacagtgaattctaaagcagcaacctccagtctacccttagctggaactcattaaactgcctcttatatttgctgcagtgagctacctcaaaagatctcaacagcaacggattcatttgtgactatgaacttcatgagctcttcaaggaagctaatatgccattaccaggatataaagtgagagaaattattcagaaactcatgctggatggtgacaggaataaagatgggaaaataagttttgacgaatttgtttatatttttcaagaggtaaaaagtagtgatattgccaagaccttccgcaaagcaatcaacaggaaagaaggtatttgtgctctgggtggaacttcagagttgtccagcgaaggaacacagcattcttactcagaggaagaaaaatatgcttttgttaactggataaacaaagctttggaaaatgatcctgattgtagacatgttataccaatgaaccctaacaccgatgacctgttcaaagctgttggtgatggaattgtgctttgtaaaatgattaacctttcagttcctgataccattgatgaaagagcaatcaacaagaagaaacttacacccttcatcattcaggaaaacttgaacttggcactgaactctgcttctgccattgggtgtcatgttgtgaacattggtgcagaagatttgagggctgggaaacctcatctggttttgggactgctttggcagatcattaagatcggtttgttcgctgacattgaattaagcaggaatgaagccttggctgctttactccgagatggtgagactttggaggaacttatgaaattgtctccagaagagcttctgcttagatgggcaaactttcatttggaaaactcgggctggcaaaaaattaacaactttagtgctgacatcaaggattccaaagcctatttccatcttctcaatcaaatcgcaccaaaaggacaaaaggaaggtgaaccacggatagatattaacatgtcaggtttcaatgaaacagatgatttgaagagagctgagagtatgcttcaacaagcagataaattaggttgcagacagtttgttacccctgctgatgttgtcagtggaaaccccaaactcaacttagctttcgtggctaacctgtttaataaatacccagcactaactaagccagagaaccaggatattgactggactctattagaaggagaaactcgtgaagaaagaaccttccgtaactggatgaactctcttggtgtcaatcctcacgtaaaccatctctatgctgacctgcaagatgccctggtaatcttacagttatatgaacgaattaaagttcctgttgactggagtaaggttaataaacctccatacccgaaactgggagccaacatgaaaaagctagaaaactgcaactatgctgttgaattagggaagcatcctgctaaattctccctggttggcattggagggcaagacctgaatgatgggaaccaaaccctgactttagctttagtctggcagctgatgagaagatataccctcaatgtcctggaagatcttggagatggtcagaaagccaatgacgacatcattgtgaactgggtgaacagaacgttgagtgaagctggaaaatcaacttccattcagagttttaaggacaagacgatcagctccagtttggcagttgtggatttaattgatgccatccagccaggctgtataaactatgaccttgtgaagagtggcaatctaacagaagatgacaagcacaataatgccaagtatgcagtgtcaatggctagaagaatcggagccagagtgtatgctctccctgaagaccttgtggaagtaaagcccaagatggtcatgactgtgtttgcatgtttgatgggcaggggaatgaagagagtgtaaaataaccaatctgaataaaacagccatgctcccaggtgcatgattcgcaggtcagctatttccaggtgaagtgcttatggcttaaggaactcttggccattcaaaggacttttcattttgattaacaggactagcttatcatgagagccctcaggggaaagggtttaagaaaaacaactcctctttcccatagtcagagttgaatttgtcaggcacgcctgaaatgtgctcatagccaaaacattttactctctcctcctagaatgctgcccttgacatttcccattgctgtatgttatttcttgctctgttatcttttgccctcttagaatgtccctctcttgggacttgcttagatgatgggatatgaatattattagacagtaattttgctttccatccagtatgctagttcttattcgagaactatggtcagagcgtatttggatatgagtatcctttgcttatctttgtagtactgaaaatttgccgaagtaactggctgtgcagaatgtaatagaagcttttcttattcttttattcttaagatcagtatctttttacagtattctttctacatgatccttttttgtacatttaagaatattttgattatattaaacaagactgctgattttgctactttttttaaggggtcttcaagtaagtaaaacatacatcgtagctagaagaaaaatgtaccttaaatttgcatcttccctctcatacccaagctgtaaacaattgaaatattttgtcttaaatcacttggttcaatacatgcttatttgttttaaaacctgtatcatcaaactctctctctaaatttaaaatgctgttgaatatgatacttttgaggagagagtgtgctcagaacttagacgggatttggtaggccaagtatgctaagtgtacaatatattttttaattttacacctgaaacaaagaaatgtggtcactaaaaataaaagtatatatgtaggaattaatgtactcttgctttgtcaagctgtttgctatagtttccaaggtattatgttactctaactctgaaaagtgatgtaatctggtagcaatgtagtagttcaaataaaggcatttacataataa

SEQ ID NO: 441259 - DNA, 3092 bp, Homo sapiens
ggggcggagggggctggcaggaggggagggagcgctggctttagagccacagctgcaaagattccgaggtgcagaagttgtctgagtgcgttggtcggcggcagtcgggccagacccaggactctgcgactttacatctttaaatggatgagatggctaccactcagatttccaaagatgagcttgatgaactcaaagaggcctttgcaaaagttgatctcaacagcaacggattcatttgtgactatgaacttcatgagctcttcaaggaagctaatatgccattaccaggatataaagtgagagaaattattcagaaactcatgctggatggtgacaggaataaagatgggaaaataagttttgacgaatttgtttatatttttcaagaggtaaaaagtagtgatattgccaagaccttccgcaaagcaatcaacaggaaagaaggtatttgtgctctgggtggaacttcagagttgtccagcgaaggaacacagcattcttactcagaggaagaaaaatatgcttttgttaactggataaacaaagctttggaaaatgatcctgattgtagacatgttataccaatgaaccctaacaccgatgacctgttcaaagctgttggtgatggaattgtgctttgtaaaatgattaacctttcagttcctgataccattgatgaaagagcaatcaacaagaagaaacttacacccttcatcattcagacattggtgcagaagatttgagggctgggaaacctcatctggttttgggactgctttggcagatcattaagatcggtttgttcgctgacattgaattaagcaggaatgaagccttggctgctttactccgagatggtgagactttggaggaacttatgaaattgtctccagaagagcttctgcttagatgggcaaactttcatttggaaaactcgggctggcaaaaaattaacaactttagtgctgacatcaaggattccaaagcctatttccatcttctcaatcaaatcgcaccaaaaggacaaaaggaaggtgaaccacggatagatattaacatgtcaggtttcaatgaaacagatgatttgaagagagctgagagtatgcttcaacaagcagataaattaggttgcagacagtttgttacccctgctgatgttgtcagtggaaaccccaaactcaacttagctttcgtggctaacctgtttaataaatacccagcactaactaagccagagaaccaggatattgactggactctattagaaggagaaactcgtgaagaaagaaccttccgtaactggatgaactctcttggtgtcaatcctcacgtaaaccatctctatgctgacctgcaagatgccctggtaatcttacagttatatgaacgaattaaagttcctgttgactggagtaaggttaataaacctccatacccgaaactgggagccaacatgaaaaagctagaaaactgcaactatgctgttgaattagggaagcatcctgctaaattctccctggttggcattggagggcaagacctgaatgatgggaaccaaaccctgactttagctttagtctggcagctgatgagaagatataccctcaatgtcctggaagatcttggagatggtcagaaagccaatgacgacatcattgtgaactgggtgaacagaacgttgagtgaagctggaaaatcaacttccattcagagttttaaggacaagacgatcagctccagtttggcagttgtggatttaattgatgccatccagccaggctgtataaactatgaccttgtgaagagtggcaatctaacagaagatgacaagcacaataatgccaagtatgcagtgtcaatggctagaagaatcggagccagagtgtatgctctccctgaagaccttgtggaagtaaagcccaagatggtcatgactgtgtttgcatgtttgatgggcaggggaatgaagagagtgtaaaataaccaatctgaataaaacagccatgctcccaggtgcatgattcgcaggtcagctatttccaggtgaagtgcttatggcttaaggaactcttggccattcaaaggacttttcattttgattaacaggactagcttatcatgagagccctcaggggaaagggtttaagaaaaacaactcctctttcccatagtcagagttgaatttgtcaggcacgcctgaaatgtgctcatagccaaaacattttactctctcctcctagaatgctgcccttgacatttcccattgctgtatgttatttcttgctctgttatcttttgccctcttagaatgtccctctcttgggacttgcttagatgatgggatatgaatattattagacagtaattttgctttccatccagtatgctagttcttattcgagaactatggtcagagcgtatttggatatgagtatcctttgcttatctttgtagtactgaaaatttgccgaagtaactggctgtgcagaatgtaatagaagcttttcttattcttttattcttaagatcagtatctttttacagtattctttctacatgatccttttttgtacatttaagaatattttgattatattaaacaagactgctgattttgctactttttttaaggggtcttcaagtaagtaaaacatacatcgtagctagaagaaaaatgtaccttaaatttgcatcttccctctcatacccaagctgtaaacaattgaaatattttgtcttaaatcacttggttcaatacatgcttatttgttttaaaacctgtatcatcaaactctctctctaaatttaaaatgctgttgaatatgatacttttgaggagagagtgtgctcagaacttagacgggatttggtaggccaagtatgctaagtgtacaatatattttttaattttacacctgaaacaaagaaatgtggtcactaaaaataaaagtatatatgtaggaattaatgtactcttgctttgtcaagctgtttgctatagtttccaaggtattatgttactctaactctgaaaagtgatgtaatctggtagcaatgtagtagttcaaataaaggcatttacataataa

SEQ ID NO: 441260 - DNA, 3337 bp, Homo sapiens
ggggcggagggggctggcaggaggggagggagcgctggctttagagccacagctgcaaagattccgaggtgcagaagttgtctgagtgcgttggtcggcggcagtcgggccagacccaggactctgcgactttacatctttaaatggatgagatggctaccactcagatttccaaagatgagcttgatgaactcaaagaggcctttgcaaaagttgatctcaacagcaacggattcatttgtgactatgaacttcatgagctcttcaaggaagctaatatgccattaccaggatataaagtgagagaaattattcagaaactcatgctggatggtgacaggaataaagatgggaaaataagttttgacgaatttgtttatatttttcaagaggtaaaaagtagtgatattgccaagaccttccgcaaagcaatcaacaggaaagaaggtatttgtgctctgggtggaacttcagagttgtccagcgaaggaacacagcattcttactcagaggaagaaaaatatgcttttgttaactggataaacaaagctttggaaaatgatcctgattgtagacatgttataccaatgaaccctaacaccgatgacctgttcaaagctgttggtgatggaattgtgctttgtaaaatgattaacctttcagttcctgataccattgatgaaagagcaatcaacaagaagaaacttacacccttcatcattcaggaaaacttgaacttggcactgaactctgcttctgccattgggtgtcatgttgtgaacattggtgcagaagatttgagggctgggaaacctcatctggttttgggactgctttggcagatcattaagatcggtttgttcgctgacattgaattaagcaggaatgaagccttggctgctttactccgagatggtgagactttggaggaacttatgaaattgtctccagaagagcttctgcttagatgggcaaactttcatttggaaaactcgggctggcaaaaaattaacaactttagtgctgacatcaaggattccaaagcctatttccatcttctcaatcaaatcgcaccaaaaggacaaaaggaaggtgaaccacggatagatattaacatgtcaggtttcaatgaaacagatgatttgaagagagctgagagtatgcttcaacaagcagataaattaggttgcagacagtttgttacccctgctgatgttgtcagtggaaaccccaaactcaacttagctttcgtggctaacctgtttaataaatacccagcactaactaagccagagaaccaggatattgactggactctattagaaggagaaactcgtgaagaaagaaccttccgtaactggatgaactctcttggtgtcaatcctcacgtaaaccatctctatgctgacctgcaagatgccctggtaatcttacagttatatgaacgaattaaagttcctgttgactggagtaaggttaataaacctccatacccgaaactgggagccaacatgaaaaagctagaaaactgcaactatgctgttgaattagggaagcatcctgctaaattctccctggttggcattggagggcaagacctgaatgatgggaaccaaaccctgactttagctttagtctggcagctgatgagaagatataccctcaatgtcctggaagatcttggagatggtcagaaagccaatgacgacatcattgtgaactgggtgaacagaacgttgagtgaagctggaaaatcaacttccattcagagttttaaggacaagacgatcagctccagtttggcagttgtggatttaattgatgccatccagccaggctgtataaactatgaccttgtgaagagtggcaatctaacagaagatgacaagcacaataatgccaagtatgcagtgtcaatggctagaagaatcggagccagagtgtatgctctccctgaagaccttgtggaagtaaagcccaagatggtcatgactgtgtttgcatgtttgatgggcaggggaatgaagagagtgtaaaataaccaatctgaataaaacagccatgctcccaggtgcatgattcgcaggtcagctatttccaggtgaagtgcttatggcttaaggaactcttggccattcaaaggacttttcattttgattaacaggactagcttatcatgagagccctcaggggaaagggtttaagaaaaacaactcctctttcccatagtcagagttgaatttgtcaggcacgcctgaaatgtgctcatagccaaaacattttactctctcctcctagaatgctgcccttgacatttcccattgctgtatgttatttcttgctctgttatcttttgccctcttagaatgtccctctcttgggacttgcttagatgatgggatatgaatattattagacagtaattttgctttccatccagtatgctagttcttattcgagaactatggtcagagcgtatttggatatgagtatcctttgcttatctttgtagtactgaaaatttgccgaagtaactggctgtgcagaatgtaatagaagcttttcttattcttttattcttaagatcagtatctttttacagtattctttctacatgatccttttttgtacatttaagaatattttgattatattaaacaagactgctgattttgctactttttttaaggggtcttcaagtaagtaaaacatacatcgtagctagaagaaaaatgtaccttaaatttgcatcttccctctcatacccaagctgtaaacaattgaaatattttgtcttaaatcacttggttcaatacatgcttatttgttttaaaacctgtatcatcaaactctctctctaaatttaaaatgctgttgaatatgatacttttgaggagagagtgtgctcagaacttagacgggatttggtaggccaagtatgctaagtgtacaatatattttttaattttacacctgaaacaaagaaatgtggtcactaaaaataaaagtatatatgtaggaattaatgtactcttgctttgtcaagctgtttgctatagtttccaaggtattatgttactctaactctgaaaagtgatgtaatctggtagcaatgtagtagttcaaataaaggcatttacataataaaataattagtctgttcttcatgcttttgtctcttaggaagtatgccaatgtttgtcaggatttttttctttttgtttttctgatgtattctgtaaaatggtgtttgttaaatttgagttttgggagctgaattagaggtactgaattaaggacagtacaaatgaagtaaaaaggttttctccaatttacc

SEQ ID NO: 441261 - DNA, 2325 bp, Homo sapiens
ctttggagtaaagcagccaaggcttcattcctgcttaattcaatgtctcaccatctcggagtaaagcagccttggctgctttactccgagatggtgagactttggaggaacttatgaaattgtctccagaagagcttctgcttagatgggcaaactttcatttggaaaactcgggctggcaaaaaattaacaactttagtgctgacatcaaggattccaaagcctatttccatcttctcaatcaaatcgcaccaaaaggacaaaaggaaggtgaaccacggatagatattaacatgtcaggtttcaatgaaacagatgatttgaagagagctgagagtatgcttcaacaagcagataaattaggttgcagacagtttgttacccctgctgatgttgtcagtggaaaccccaaactcaacttagctttcgtggctaacctgtttaataaatacccagcactaactaagccagagaaccaggatattgactggactctattagaaggagaaactcgtgaagaaagaaccttccgtaactggatgaactctcttggtgtcaatcctcacgtaaaccatctctatgctgacctgcaagatgccctggtaatcttacagttatatgaacgaattaaagttcctgttgactggagtaaggttaataaacctccatacccgaaactgggagccaacatgaaaaagctagaaaactgcaactatgctgttgaattagggaagcatcctgctaaattctccctggttggcattggagggcaagacctgaatgatgggaaccaaaccctgactttagctttagtctggcagctgatgagaagatataccctcaatgtcctggaagatcttggagatggtcagaaagccaatgacgacatcattgtgaactgggtgaacagaacgttgagtgaagctggaaaatcaacttccattcagagttttaaggacaagacgatcagctccagtttggcagttgtggatttaattgatgccatccagccaggctgtataaactatgaccttgtgaagagtggcaatctaacagaagatgacaagcacaataatgccaagtatgcagtgtcaatggctagaagaatcggagccagagtgtatgctctccctgaagaccttgtggaagtaaagcccaagatggtcatgactgtgtttgcatgtttgatgggcaggggaatgaagagagtgtaaaataaccaatctgaataaaacagccatgctcccaggtgcatgattcgcaggtcagctatttccaggtgaagtgcttatggcttaaggaactcttggccattcaaaggacttttcattttgattaacaggactagcttatcatgagagccctcaggggaaagggtttaagaaaaacaactcctctttcccatagtcagagttgaatttgtcaggcacgcctgaaatgtgctcatagccaaaacattttactctctcctcctagaatgctgcccttgacatttcccattgctgtatgttatttcttgctctgttatcttttgccctcttagaatgtccctctcttgggacttgcttagatgatgggatatgaatattattagacagtaattttgctttccatccagtatgctagttcttattcgagaactatggtcagagcgtatttggatatgagtatcctttgcttatctttgtagtactgaaaatttgccgaagtaactggctgtgcagaatgtaatagaagcttttcttattcttttattcttaagatcagtatctttttacagtattctttctacatgatccttttttgtacatttaagaatattttgattatattaaacaagactgctgattttgctactttttttaaggggtcttcaagtaagtaaaacatacatcgtagctagaagaaaaatgtaccttaaatttgcatcttccctctcatacccaagctgtaaacaattgaaatattttgtcttaaatcacttggttcaatacatgcttatttgttttaaaacctgtatcatcaaactctctctctaaatttaaaatgctgttgaatatgatacttttgaggagagagtgtgctcagaacttagacgggatttggtaggccaagtatgctaagtgtacaatatattttttaattttacacctgaaacaaagaaatgtggtcactaaaaataaaagtatatatgtaggaattaatgtactcttgctttgtcaagctgtttgctatagtttccaaggtattatgttactctaactctgaaaagtgatgtaatctggtagcaatgtagtagttcaaataaaggcatttacataataa

SEQ ID NO: 441262 - DNA, 2281 bp, Homo sapiens
ggggcggagggggctggcaggaggggagggagcgctggctttagagccacagctgcaaagattccgaggtgcagaagttgtctgagtgcgttggtcggcggcagtcgggccagacccaggactctgcgactttacatctttaaatggatgagatggctaccactcagatttccaaagatgagcttgatgaactcaaagaggcctttgcaaaagttgatctcaacagcaacggattcatttgtgactatgaacttcatgagctcttcaaggaagctaatatgccattaccaggatataaagtgagagaaattattcagaaactcatgctggatggtgacaggaataaagatgggaaaataagttttgacgaatttgtttatatttttcaagaggtaaaaagtagtgatattgccaagaccttccgcaaagcaatcaacaggaaagaaggtatttgtgctctgggtggaacttcagagttgtccagcgaaggaacacagcattcttactcagaggaagaaaaatatgcttttgttaactggataaacaaagctttggaaaatgatcctgattgtagacatgttataccaatgaaccctaacaccgatgacctgttcaaagctgttggtgatggaattgtgctttgtaaaatgattaacctttcagttcctgataccattgatgaaagagcaatcaacaagaagaaacttacacccttcatcattcaggaaaacttgaacttggcactgaactctgcttctgccattgggtgtcatgttgtgaacattggtgcagaagatttgagggctgggaaacctcatctggttttgggactgctttggcagatcattaagatcggtttgttcgctgacattgaattaagcaggaatgaagccttggctgctttactccgagatggtgagactttggaggaacttatgaaattgtctccagaagagcttctgcttagatgggcaaactttcatttggaaaactcgggctggcaaaaaattaacaactttagtgctgacatcaaggattccaaagcctatttccatcttctcaatcaaatcgcaccaaaaggacaaaaggaaggtgaaccacggatagatattaacatgtcaggtttcaatgaaacagatgatttgaagagagctgagagtatgcttcaacaagcagataaattaggttgcagacagtttgttacccctgctgatgttgtcagtggaaaccccaaactcaacttagctttcgtggctaacctgtttaataaataaaggacttttcattttgattaacaggactagcttatcatgagagccctcaggggaaagggtttaagaaaaacaactcctctttcccatagtcagagttgaatttgtcaggcacgcctgaaatgtgctcatagccaaaacattttactctctcctcctagaatgctgcccttgacatttcccattgctgtatgttatttcttgctctgttatcttttgccctcttagaatgtccctctcttgggacttgcttagatgatgggatatgaatattattagacagtaattttgctttccatccagtatgctagttcttattcgagaactatggtcagagcgtatttggatatgagtatcctttgcttatctttgtagtactgaaaatttgccgaagtaactggctgtgcagaatgtaatagaagcttttcttattcttttattcttaagatcagtatctttttacagtattctttctacatgatccttttttgtacatttaagaatattttgattatattaaacaagactgctgattttgctactttttttaaggggtcttcaagtaagtaaaacatacatcgtagctagaagaaaaatgtaccttaaatttgcatcttccctctcatacccaagctgtaaacaattgaaatattttgtcttaaatcacttggttcaatacatgcttatttgttttaaaacctgtatcatcaaactctctctctaaatttaaaatgctgttgaatatgatacttttgaggagagagtgtgctcagaacttagacgggatttggtaggccaagtatgctaagtgtacaatatattttttaattttacacctgaaacaaagaaatgtggtcactaaaaataaaagtatatatgtaggaattaatgtactcttgctttgtcaagctgtttgctatagtttccaaggtattatgttactctaactctgaaaagtgatgtaatctggtagcaatgtagtagttcaaataaaggcatttacataataa

SEQ ID NO: 441263 - DNA, 2177 bp, Homo sapiens
tgccttgaaagtttcttgcatttcaacaatattcagaaggtcttttccaccagcctattttcttcttcaccaaaggcctagagtgtgacctggcttcatgggtgacccatgaaaaccttactagttagacattgaaaatccatccacagtcctgcattaccgaacagctaagaagcattcctgcaaaactttggagttaggcacattatttcttttttccttgaaaaatatttctagcagatatgacaaaggtctaatatccacaatatatcaagaactcttgaaatctctttttctagaaactcgatgatttaattatctttaaagattctggttccaacacacctagaaatacttcacggattagttgagatgtgttcctgaaaatttccctacctggacatctcagttcttctgtcccttcgtctaccttttctagtttttggtccagccactctgtccacgtaccacgtagactgtctcccctctcatgaatacttggaagtattcattgcatctgcctaacaacttgggttttgcatctagcatgattttccacctcatatctctaagatgacttgagtgtgtgttattatgtgtgcaatgagaatattaacatggattgtatagacagcctaggtaattatatatataaagttggtgcttcaagcttaattctcacctcacattggagaaaaagagtgaataaatattattagccccaaataatagagcttaaaaacctactgtaacttcaaagtgaaatcaaaacccaaatcaaaagaaaacaaaaagcaaaactgttctaattggaactatcaatatggaatttttgcatcccagcataataattatatatgaggaaatagatgtcttacgtggtgtccttaactgacaagaatttcatcctgattttgtttccccctaaaataggtatgcagtgtcaatggctagaagaatcggagccagagtgtatgctctccctgaagaccttgtggaagtaaagcccaagatggtcatgactgtgtttgcatgtttgatgggcaggggaatgaagagagtgtaaaataaccaatctgaataaaacagccatgctcccaggtgcatgattcgcaggtcagctatttccaggtgaagtgcttatggcttaaggaactcttggccattcaaaggacttttcattttgattaacaggactagcttatcatgagagccctcaggggaaagggtttaagaaaaacaactcctctttcccatagtcagagttgaatttgtcaggcacgcctgaaatgtgctcatagccaaaacattttactctctcctcctagaatgctgcccttgacatttcccattgctgtatgttatttcttgctctgttatcttttgccctcttagaatgtccctctcttgggacttgcttagatgatgggatatgaatattattagacagtaattttgctttccatccagtatgctagttcttattcgagaactatggtcagagcgtatttggatatgagtatcctttgcttatctttgtagtactgaaaatttgccgaagtaactggctgtgcagaatgtaatagaagcttttcttattcttttattcttaagatcagtatctttttacagtattctttctacatgatccttttttgtacatttaagaatattttgattatattaaacaagactgctgattttgctactttttttaaggggtcttcaagtaagtaaaacatacatcgtagctagaagaaaaatgtaccttaaatttgcatcttccctctcatacccaagctgtaaacaattgaaatattttgtcttaaatcacttggttcaatacatgcttatttgttttaaaacctgtatcatcaaactctctctctaaatttaaaatgctgttgaatatgatacttttgaggagagagtgtgctcagaacttagacgggatttggtaggccaagtatgctaagtgtacaatatattttttaattttacacctgaaacaaagaaatgtggtcactaaaaataaaagtatatatgtaggaattaatgtactcttgctttgtcaagctgtttgctatagtttccaaggtattatgttactctaactctgaaaagtgatgtaatctggtagcaatgtagtagttcaaataaaggcatttacataataa

SEQ ID NO: 441264 - DNA, 2468 bp, Homo sapiens
  misc_feature (2387)..(2387): n is a, c, g, or t
ggggcggagggggctggcaggaggggagggagcgctggctttagagccacagctgcaaagattccgaggtgcagaagttgtctgagtgcgttggtcggcggcagtcgggccagacccaggactctgcgactttacatctttaaatggatgagatggctaccactcagatttccaaagatgagcttgatgaactcaaagaggcctttgcaaaagttgatctcaacagcaacggattcatttgtgactatgaacttcatgagctcttcaaggaagctaatatgccattaccaggatataaagtgagagaaattattcagaaactcatgctggatggtgacaggaataaagatgggaaaataagttttgacgaatttgtttatatttttcaagaggtaaaaagtagtgatattgccaagaccttccgcaaagcaatcaacaggaaagaaggtatttgtgctctgggtggaacttcagagttgtccagcgaaggaacacagcattcttactcagaggaagaaaaatatgcttttgttaactggataaacaaagctttggaaaatgatcctgattgtagacatgttataccaatgaaccctaacaccgatgacctgttcaaagctgttggtgatggaattgtgctttgtaaaatgattaacctttcagttcctgataccattgatgaaagagcaatcaacaagaagaaacttacacccttcatcattcaggaaaacttgaacttggcactgaactctgcttctgccattgggtgtcatgttgtgaacattggtgcagaagatttgagggctgggaaacctcatctggttttgggactgctttggcagatcattaagatcggtttgttcgctgacattgaattaagcaggaatgaagccttggctgctttactccgagatggtgagactttggaggaacttatgaaattgtctccagaagagcttctgcttagatgggcaaactttcatttggaaaactcgggctggcaaaaaattaacaactttagtgctgacatcaaggattccaaagcctatttccatcttctcaatcaaatcgcaccaaaaggacaaaaggaaggtgaaccacggatagatattaacatgtcaggtttcaatgaaacagatgatttgaagagagctgagagtatgcttcaacaagcagataaattaggttgcagacagtttgttacccctgctgatgttgtcagtggaaaccccaaactcaacttagctttcgtggctaacctgtttaataaatacccagcactaactaagccagagaaccaggatattgactggactctattagaaggagaaactcgtgaagaaagaaccttccgtaactggatgaactctcttggtgtcaatcctcacgtaaaccatctctatgctgacctgcaagatgccctggtaatcttacagttatatgaacgaattaaagttcctgttgactggagtaaggttaataaacctccatacccgaaactgggagccaacatgaaaaagctagaaaactgcaactatgctgttgaattagggaagcatcctgctaaattctccctggttggcattggagggcaagacctgaatgatgggaaccaaaccctgactttagctttagtctggcagctgatgagaagatataccctcaatgtcctggaagatcttggagatggtcagaaagccaatgacgacatcattgtgaactgggtgaacagaacgttgagtgaagctggaaaatcaacttccattcagagttttaaggacaagacgatcagctccagtttggcagttgtggatttaattgatgccatccagccaggctgtataaactatgaccttgtgaagagtggcaatctaacagaagatgacaagcacaataatgccaagtatgcagtgtcaatggctagaagaatcggagccagagtgtatgctctccctgaagaccttgtggaagtaaagcccaagatggtcatgactgtgtttgcatgtttgatgggcaggggaatgaagagagtgtaaaataaccaatctgaataaaacagccatgctcccaggtgcatgattcgcaggtcagctatttccaggtgaagtgcttatggcttaaggaactcttggccattcaaaggacttttcattttgattaacaggactagcttatcatgagagccctcaggggaaagggtttaagaaaaacaactcctctttcccatagtcagagttgaatttgtcaggcacgcctgaaatgtgctcatagccaaaacattttactctctcctcctagaatgctgcccttgacatttcccattgctgtatgttatttcttgctctgttatcttttgccctcttagaatgtccctctcttgggaccantcataccgggccggcccggtctgacctgtcatcaaacacgtttaagaacatcaagtagggcggcgcagggtccgcctgtat

SEQ ID NO: 441265 - DNA, 1622 bp, Homo sapiens
ggggcggagggggctggcaggaggggagggagcgctggctttagagccacagctgcaaagattccgaggtgcagaagttgtctgagtgcgttggtcggcggcagtcgggccagacccaggactctgcgactttacatctttaaatggatgagatggctaccactcagatttccaaagatgagcttgatgaactcaaagaggcctttgcaaaagttgatctcaacagcaacggattcatttgtgactatgaacttcatgagctcttcaaggaagctaatatgccattaccaggatataaagtgagagaaattattcagaaactcatgctggatggtgacaggaataaagatgggaaaataagttttgacgaatttgtttatatttttcaagaggtaaaaagtagtgatattgccaagaccttccgcaaagcaatcaacaggaaagaaggtatttgtgctctgggtggaacttcagagttgtccagcgaaggaacacagcattcttactcagaggaagaaaaatatgcttttgttaactggataaacaaagctttggaaaatgatcctgattgtagacatgttataccaatgaaccctaacaccgatgacctgttcaaagctgttggtgatggaattgtgctttgtaaaatgattaacctttcagttcctgataccattgatgaaagagcaatcaacaagaagaaacttacacccttcatcattcaggaaaacttgaacttggcactgaactctgcttctgccattgggtgtcatgttgtgaacattggtgcagaagatttgagggctgggaaacctcatctggttttgggactgctttggcagatcattaagatcggtttgttcgctgacattgaattaagcaggaatgaagccttggctgctttactccgagatggtgagactttggaggaacttatgaaattgtctccagaagagcttctgcttagatgggcaaactttcatttggaaaactcgggctggcaaaaaattaacaactttagtgctgacatcaaggattccaaagcctatttccatcttctcaatcaaatcgcaccaaaaggacaaaaggaaggtgaaccacggatagatattaacatgtcaggtttcaatgaaacagatgatttgaagagagctgagagtatgcttcaacaagcagataaattaggttgcagacagtttgttacccctgctgatgttgtcagtggaaaccccaaactcaacttagctttcgtggctaacctgtttaataaatacccagcactaactaagccagagaaccaggatattgactggactctattagaaggagaaactcgtgaagaaagaaccttccgtaactggatgaactctcttggtgtcaatcctcacgtaaaccatctctatgctgacctgcaagatgccctggtaatcttacagttatatgaacgaattaaagttcctgttgactggagtaaggttaataaacctccatacccgaaactgggagccaacatgaaaaagctagaaaactgcaactatgctgttgaattagggaagcatcctgtccctgactttagctttaagtttggcacttgtggagaagaatttcctctcaatgcccgg

SEQ ID NO: 441266 - DNA, 3147 bp, Homo sapiens
ggggcggagggggctggcaggaggggagggagcgctggctttagagccacagctgcaaagattccgaggtgcagaagttgtctgagtgcgttggtcggcggcagtcgggccagacccaggactctgcgactttacatctttaaatggatgagatggctaccactcagatttccaaagatgagcttgatgaactcaaagaggcctttgcaaaagttgatctcaacagcaacggattcatttgtgactatgaacttcatgagctcttcaaggaagctaatatgccattaccaggatataaagtgagagaaattattcagaaactcatgctggatggtgacaggaataaagatgggaaaataagttttgacgaatttgtttatatttttcaagaggtaaaaagtagtgatattgccaagaccttccgcaaagcaatcaacaggaaagaaggtatttgtgctctgggtggaacttcagagttgtccagcgaaggaacacagcattcttactcagaggaagaaaaatatgcttttgttaactggataaacaaagctttggaaaatgatcctgattgtagacatgttataccaatgaaccctaacaccgatgacctgttcaaagctgttggtgatggaattgtgctttgtaaaatgattaacctttcagttcctgataccattgatgaaagagcaatcaacaagaagaaacttacacccttcatcattcaggaaaacttgaacttggcactgaactctgcttctgccattgggtgtcatgttgtgaacattggtgcagaagatttgagggctgggaaacctcatctggttttgggactgctttggcagatcattaagatcggtttgttcgctgacattgaattaagcaggaatgaagccttggctgctttactccgagatggtgagactttggaggaacttatgaaattgtctccagaagagcttctgcttagatgggcaaactttcatttggaaaactcgggctggcaaaaaattaacaactttagtgctgacatcaaggattccaaagcctatttccatcttctcaatcaaatcgcaccaaaaggacaaaaggaaggtgaaccacggatagatattaacatgtcaggtttcaatgaaacagatgatttgaagagagctgagagtatgcttcaacaagcagataaattaggttgcagacagtttgttacccctgctgatgttgtcagtggaaaccccaaactcaacttagctttcgtggctaacctgtttaataaatacccagcactaactaagccagagaaccaggatattgactggactctattagaaggagaaactcgtgaagaaagaaccttccgtaactggatgaactctcttggtgtcaatcctcacgtaaaccatctctatgctgacctgcaagatgccctggtaatcttacagttatatgaacgaattaaagttcctgttgactggagtaaggttaataaacctccatacccgaaactgggagccaacatgaaaaagctagaaaactgcaactatgctgttgaattagggaagcatcctgctaaattctccctggttggcattggagggcaagacctgaatgatgggaaccaaaccctgactttagctttagtctggcagctgatgagaagatataccctcaatgtcctggaagatcttggagatggtcagaaagccaatgacgacatcattgtgaactgggtgaacagaacgttgagtgaagctggaaaatcaacttccattcagagttttaaggacaagacgatcagctccagtttggcagttgtggatttaattgatgccatccagccaggctgtataaactatgaccttgtgaagagtggcaatctaacagaagatgacaagcacaataatgccaagtatgcagtgtcaatggctagaagaatcggagccagagtgtatgctctccctgaagaccttgtggaagtaaagcccaagatggtcatgactgtgtttgcatgtttgatgggcaggggaatgaagagagtgtaaaataaccaatctgaataaaacagccatgctcccaggtgcatgattcgcaggtcagctatttccaggtgaagtgcttatggcttaaggaactcttggccattcaaaggacttttcattttgattaacaggactagcttatcatgagagccctcaggggaaagggtttaagaaaaacaactcctctttcccatagtcagagttgaatttgtcaggcacgcctgaaatgtgctcatagccaaaacattttactctctcctcctagaatgctgcccttgacatttcccattgctgtatgttatttcttgctctgttatcttttgccctcttagaatgtccctctcttgggacttgcttagatgatgggatatgaatattattagacagtaattttgctttccatccagtatgctagttcttattcgagaactatggtcagagcgtatttggatatgagtatcctttgcttatctttgtagtactgaaaatttgccgaagtaactggctgtgcagaatgtaatagaagcttttcttattcttttattcttaagatcagtatctttttacagtattctttctacatgatccttttttgtacatttaagaatattttgattatattaaacaagactgctgattttgctactttttttaaggggtcttcaagtaagtaaaacatacatcgtagctagaagaaaaatgtaccttaaatttgcatcttccctctcatacccaagctgtaaacaattgaaatattttgtcttaaatcacttggttcaatacatgcttatttgttttaaaacctgtatcatcaaactctctctctaaatttaaaatgctgttgaatatgatacttttgaggagagagtgtgctcagaacttagacgggatttggtaggccaagtatgctaagtgtacaatatattttttaattttacacctgaaacaaagaaatgtggtcactaaaaataaaagtatatatgtaggaattaatgtactcttgctttgtcaagctgtttgctatagtttccaaggtattatgttactctaactctgaaaagtgatgtaatctggtagcaatgtagtagttcaaataaaggcatttacataataa

SEQ ID NO: 441267 - DNA, 3110 bp, Homo sapiens
ggggcggagggggctggcaggaggggagggagcgctggctttagagccacagctgcaaagattccgaggtgcagaagttgtctgagtgcgttggtcggcggcagtcgggccagacccaggactctgcgactttacatctttaaatggatgagatggctaccactcagatttccaaagatgagcttgatgaactcaaagaggcctttgcaaaagttgatctcaacagcaacggattcatttgtgactatgaacttcatgagctcttcaaggaagctaatatgccattaccaggatataaagtgagagaaattattcagaaactcatgctggatggtgacaggaataaagatgggaaaataagttttgacgaatttgtttatatttttcaagaggtaaaaagtagtgatattgccaagaccttccgcaaagcaatcaacaggaaagaaggtatttgtgctctgggtggaacttcagagttgtccagcgaaggaacacagcattcttactcagaggaagaaaaatatgcttttgttaactggataaacaaagctttggaaaatgatcctgattgtagacatgttataccaatgaaccctaacaccgatgacctgttcaaagctgttggtgatggaattgtgctttgtaaaatgattaacctttcagttcctgataccattgatgaaagagcaatcaacaagaagaaacttacacccttcatcattcaggaaaacttgaacttggcactgaactctgcttctgccattgggtgtcatgttgtgaacattggtgcagaagatttgagggctgggaaacctcatctggttttgggactgctttggcagatcattaagatcggtttgttcgctgacattgaattaagcaggaatgaagccttggctgctttactccgagatggtgagactttggaggaacttatgaaattgtctccagaagagcttctgcttagatgggcaaactttcatttggaaaactcgggctggcaaaaaattaacaactttagtgctgacatcaaggattccaaagcctatttccatcttctcaatcaaatcgcaccaaaaggacaaaaggaaggtgaaccacggatagatattaacatgtcaggtttcaatgaaacagatgatttgaagagagctgagagtatgcttcaacaagcagataaattaggttgcagacagttttcaacttagctttcgtggctaacctgtttaataaatacccagcactaactaagccagagaaccaggatattgactggactctattagaaggagaaactcgtgaagaaagaaccttccgtaactggatgaactctcttggtgtcaatcctcacgtaaaccatctctatgctgacctgcaagatgccctggtaatcttacagttatatgaacgaattaaagttcctgttgactggagtaaggttaataaacctccatacccgaaactgggagccaacatgaaaaagctagaaaactgcaactatgctgttgaattagggaagcatcctgctaaattctccctggttggcattggagggcaagacctgaatgatgggaaccaaaccctgactttagctttagtctggcagctgatgagaagatataccctcaatgtcctggaagatcttggagatggtcagaaagccaatgacgacatcattgtgaactgggtgaacagaacgttgagtgaagctggaaaatcaacttccattcagagttttaaggacaagacgatcagctccagtttggcagttgtggatttaattgatgccatccagccaggctgtataaactatgaccttgtgaagagtggcaatctaacagaagatgacaagcacaataatgccaagtatgcagtgtcaatggctagaagaatcggagccagagtgtatgctctccctgaagaccttgtggaagtaaagcccaagatggtcatgactgtgtttgcatgtttgatgggcaggggaatgaagagagtgtaaaataaccaatctgaataaaacagccatgctcccaggtgcatgattcgcaggtcagctatttccaggtgaagtgcttatggcttaaggaactcttggccattcaaaggacttttcattttgattaacaggactagcttatcatgagagccctcaggggaaagggtttaagaaaaacaactcctctttcccatagtcagagttgaatttgtcaggcacgcctgaaatgtgctcatagccaaaacattttactctctcctcctagaatgctgcccttgacatttcccattgctgtatgttatttcttgctctgttatcttttgccctcttagaatgtccctctcttgggacttgcttagatgatgggatatgaatattattagacagtaattttgctttccatccagtatgctagttcttattcgagaactatggtcagagcgtatttggatatgagtatcctttgcttatctttgtagtactgaaaatttgccgaagtaactggctgtgcagaatgtaatagaagcttttcttattcttttattcttaagatcagtatctttttacagtattctttctacatgatccttttttgtacatttaagaatattttgattatattaaacaagactgctgattttgctactttttttaaggggtcttcaagtaagtaaaacatacatcgtagctagaagaaaaatgtaccttaaatttgcatcttccctctcatacccaagctgtaaacaattgaaatattttgtcttaaatcacttggttcaatacatgcttatttgttttaaaacctgtatcatcaaactctctctctaaatttaaaatgctgttgaatatgatacttttgaggagagagtgtgctcagaacttagacgggatttggtaggccaagtatgctaagtgtacaatatattttttaattttacacctgaaacaaagaaatgtggtcactaaaaataaaagtatatatgtaggaattaatgtactcttgctttgtcaagctgtttgctatagtttccaaggtattatgttactctaactctgaaaagtgatgtaatctggtagcaatgtagtagttcaaataaaggcatttacataataa

SEQ ID NO: 441268 - DNA, 3176 bp, Homo sapiens
ggggcggagggggctggcaggaggggagggagcgctggctttagagccacagctgcaaagattccgaggtgcagaagttgtctgagtgcgttggtcggcggcagtcgggccagacccaggactctgcgactttacatctttaaatggatgagatggctaccactcagatttccaaagatgagcttgatgaactcaaagaggcctttgcaaaagttgatctcaacagcaacggattcatttgtgactatgaacttcatgagctcttcaaggaagctaatatgccattaccaggatataaagtgagagaaattattcagaaactcatgctggatggtgacaggaataaagatgggaaaataagttttgacgaatttgtttatatttttcaagaggtaaaaagtagtgatattgccaagaccttccgcaaagcaatcaacaggaaagaaggtatttgtgctctgggtggaacttcagagttgtccagcgaaggaacacagcattcttactcagaggaagaaaaatatgcttttgttaactggataaacaaagctttggaaaatgatcctgattgtagacatgttataccaatgaaccctaacaccgatgacctgttcaaagctgttggtgatggaattgtgctttgtaaaatgattaacctttcagttcctgataccattgatgaaagagcaatcaacaagaagaaacttacacccttcatcattcaggaaaacttgaacttggcactgaactctgcttctgccattgggtgtcatgttgtgaacattggtgcagaagatttgagggctgggaaacctcatctggttttgggactgctttggcagatcattaagatcggtttgttcgctgacattgaattaagcaggaatgaagccttggctgctttactccgagatggtgagactttggaggaacttatgaaattgtctccagaagagcttctgcttagatgggcaaactttcatttggaaaactcgggctggcaaaaaattaacaactttagtgctgacatcaaggattccaaagcctatttccatcttctcaatcaaatcgcaccaaaaggacaaaaggaaggtgaaccacggatagatattaacatgtcaggtttcaatgaaacagatgatttgaagagagctgagagtatgcttcaacaagcagataaattaggttgcagacagtttgttacccctgctgatgttgtcagtggaaaccccaaactcaacttagctttcgtggctaacctgtttaataaatacccagcactaactaagccagagaaccaggatattgactggactctattagaaggagaaactcgtgaagaaagaaccttccgtaactggatgaactctcttggtgtcaatcctcacgtaaaccatctctatgctgacctgcaagatgccctggtaatcttacagttatatgaacgaattaaagttcctgttgactggagtaaggttaataaacctccatacccgaaactgggagccaacatgaaaaagctagaaaactgcaactatgctgttgaattagggaagcatcctgctaaattctccctggttggcattggagggcaagacctgaatgatgggaaccaaaccctgactttagctttagtctggcagctgatgagaagatataccctcaatgtcctggaagatcttggagatggtcagaaagccaatgacgacatcattgtgaactgggtgaacagaacgttgagtgaagctggaaaatcaacttccattcagagttttaaggacaagacgatcagctccagtttggcagttgtggatttaattgatgccatccagccaggctgtataaactatgaccttgtgaagagtggcaatctaacagaagatgacaagcacaataatgccaagtatgcagtgtcaatggctagaagaatcggagccagagtgtatgctctccctgaagaccttgtggaagtaaagcccaagatggtcatgactgtgtttgcatgtttgatgggcaggggaatgaagagagtgtaaaataaccaatctgaataaaacagccatgctcccaggtgcatgattcgcaggtcagctatttccaggtgaagtgcttatggcttaaggaactcttggccattcaaaggacttttcattttgattaacaggactagcttatcatgagagccctcaggggaaagggtttaagaaaaacaactcctctttcccatagtcagagttgaatttgtcaggcacgcctgaaatgtgctcatagccaaaacattttactctctcctcctagaatgctgcccttgacatttcccattgctgtatgttatttcttgctctgttatcttttgccctcttagaatgtccctctcttgggacttgcttagatgatgggatatgaatattattagacagtaattttgctttccatccagtatgctagttcttattcgagaactatggtcagagcgtatttggatatgagtatcctttgcttatctttgtagtactgaaaatttgccgaagtaactggctgtgcagaatgtaatagaagcttttcttattcttttattcttaagatcagtatctttttacagtattctttctacatgatccttttttgtacatttaagaatattttgattatattaaacaagactgctgattttgctactttttttaaggggtcttcaagtaagtaaaacatacatcgtagctagaagaaaaatgtaccttaaatttgcatcttccctctcatacccaagctgtaaacaattgaaatattttgtcttaaatcacttggttcaatacatgcttatttgttttaaaacctgtatcatcaaactctctctctaaatttaaaatgctgttgaatatgatacttttgaggagagagtgtgctcagaacttagacgggatttggtaggccaagtatgctaagtgtacaatatattttttaattttacacctgaaacaaagaaatgtggtcactaaaaataaaagtatatatgtaggaattaatgtactcttgctttgtcaagctgtttgctatagtttccaaggtattatgttactctaactctgaaaagtgatgtaatctggtagcaatgtagtagttcaaataaaggcatttacataataaatttagggttgatggggtcctcagtgacc

SEQ ID NO: 441269 - DNA, 3286 bp, Homo sapiens
ggggcggagggggctggcaggaggggagggagcgctggctttagagccacagctgcaaagattccgaggtgcagaagttgtctgagtgcgttggtcggcggcagtcgggccagacccaggactctgcgactttacatctttaaatggatgagatggctaccactcagatttccaaagatgagcttgatgaactcaaagaggcctttgcaaaagttgatctcaacagcaacggattcatttgtgactatgaacttcatgagctcttcaaggaagctaatatgccattaccaggatataaagtgagagaaattattcagaaactcatgctggatggtgacaggaataaagatgggaaaataagttttgacgaatttgtttatatttttcaagaggtaaaaagtagtgatattgccaagaccttccgcaaagcaatcaacaggaaagaaggtatttgtgctctgggtggaacttcagagttgtccagcgaaggaacacagcattcttactcagaggaagaaaaatatgcttttgttaactggataaacaaagctttggaaaatgatcctgattgtagacatgttataccaatgaaccctaacaccgatgacctgttcaaagctgttggtgatggaattgtgctttgtaaaatgattaacctttcagttcctgataccattgatgaaagagcaatcaacaagaagaaacttacacccttcatcattcaggaaaacttgaacttggcactgaactctgcttctgccattgggtgtcatgttgtgaacattggtgcagaagatttgagggctgggaaacctcatctggttttgggactgctttggcagatcattaagatcggtttgttcgctgacattgaattaagcaggaatgaagccttggctgctttactccgagatggtgagactttggaggaacttatgaaattgtctccagaagagcttctgcttagatgggcaaactttcatttggaaaactcgggctggcaaaaaattaacaactttagtgctgacatcaaggattccaaagcctatttccatcttctcaatcaaatcgcaccaaaaggacaaaaggaaggtgaaccacggatagatattaacatgtcaggtttcaatgaaacagatgatttgaagagagctgagagtatgcttcaacaagcagataaattaggttgcagacagtttgttacccctgctgatgttgtcagtggaaaccccaaactcaacttagctttcgtggctaacctgtttaataaatacccagcactaactaagccagagaaccaggatattgactggactctattagaaggagaaactcgtgaagaaagaaccttccgtaactggatgaactctcttggtgtcaatcctcacgtaaaccatctctatgctgacctgcaagatgccctggtaatcttacagttatatgaacgaattaaagttcctgttgactggagtaaggttaataaacctccatacccgaaactgggagccaacatgaaaaagctagaaaactgcaactatgctgttgaattagggaagcatcctgctaaattctccctggttggcattggagggcaagacctgaatgatgggaaccaaaccctgactttagctttagtctggcagctgatgagaagatataccctcaatgtcctggaagatcttggagatggtcagaaagccaatgacgacatcattgtgaactgggtgaacagaacgttgagtgaagctggaaaatcaacttccattcagagttttaaggacaagacgatcagctccagtttggcagttgtggatttaattgatgccatccagccaggctgtataaactatgaccttgtgaagagtggcaatctaacagaagatgacaagcacaataatgccaagtatgcagtgtcaatggctagaagaatcggagccagagtgtatgctctccctgaagaccttgtggaagtaaagcccaagatggtcatgactgtgtttgcatgtttgatgggcaggggaatgaagagagtgtaaaataaccaatctgaataaaacagccatgctcccaggtgcatgattcgcaggtcagctatttccaggtgaagtgcttatggcttaaggaactcttggccattcaaaggacttttcattttgattaacaggactagcttatcatgagagccctcaggggaaagggtttaagaaaaacaactcctctttcccatagtcagagttgaatttgtcaggcacgcctgaaatgtgctcatagccaaaacattttactctctcctcctagaatgctgcccttgacatttcccattgctgtatgttatttcttgctctgttatcttttgccctcttagaatgtccctctcttgggacttgcttagatgatgggatatgaatattattagacagtaattttgctttccatccagtatgctagttcttattcgagaactatggtcagagcgtatttggatatgagtatcctttgcttatctttgtagtactgaaaatttgccgaagtaactggctgtgcagaatgtaatagaagcttttcttattcttttattcttaagatcagtatctttttacagtattctttctacatgatccttttttgtacatttaagaatattttgattatattaaacaagactgctgattttgctactttttttaaggggtcttcaagtaagtaaaacatacatcgtagctagaagaaaaatgtaccttaaatttgcatcttccctctcatacccaagctgtaaacaattgaaatattttgtcttaaatcacttggttcaatacatgcttatttgttttaaaacctgtatcatcaaactctctctctaaatttaaaatgctgttgaatatgatacttttgaggagagagtgtgctcagaacttagacgggatttggtaggccaagtatgctaagtgtacaatatattttttaattttacacctgaaacaaagaaatgtggtcactaaaaataaaagtatatatgtaggaattaatgtactcttgctttgtcaagctgtttgctatagtttccaaggtattatgttactctaactctgaaaagtgatgtaatctggtagcaatgtagtagttcaaataaaggcatttacataataacacacaacacaacacacgcgtttaacgtcggatgcgaaaccgggtcccaatatcgctgtgaaaccctttgcataggggaaggcgcgagctcccaagggcgaggaggacgggtttgagaccgatgagacctacagcgggg

SEQ ID NO: 441270 - DNA, 1815 bp, Homo sapiens
tactagaggtaccccagtaaatccggcataaccgacgcaggatgtcagtcctacacgtaaaccatctctatgctgacctgcaagatgccctggtaatcttacagttatatgaacgaattaaagttcctgttgactggagtaaggttaataaacctccatacccgaaactgggagccaacatgaaaaagctagaaaactgcaactatgctgttgaattagggaagcatcctgctaaattctccctggttggcattggagggcaagacctgaatgatgggaaccaaaccctgactttagctttagtctggcagctgatgagaagatataccctcaatgtcctggaagatcttggagatggtcagaaagccaatgacgacatcattgtgaactgggtgaacagaacgttgagtgaagctggaaaatcaacttccattcagagttttaaggacaagacgatcagctccagtttggcagttgtggatttaattgatgccatccagccaggctgtataaactatgaccttgtgaagagtggcaatctaacagaagatgacaagcacaataatgccaagtatgcagtgtcaatggctagaagaatcggagccagagtgtatgctctccctgaagaccttgtggaagtaaagcccaagatggtcatgactgtgtttgcatgtttgatgggcaggggaatgaagagagtgtaaaataaccaatctgaataaaacagccatgctcccaggtgcatgattcgcaggtcagctatttccaggtgaagtgcttatggcttaaggaactcttggccattcaaaggacttttcattttgattaacaggactagcttatcatgagagccctcaggggaaagggtttaagaaaaacaactcctctttcccatagtcagagttgaatttgtcaggcacgcctgaaatgtgctcatagccaaaacattttactctctcctcctagaatgctgcccttgacatttcccattgctgtatgttatttcttgctctgttatcttttgccctcttagaatgtccctctcttgggacttgcttagatgatgggatatgaatattattagacagtaattttgctttccatccagtatgctagttcttattcgagaactatggtcagagcgtatttggatatgagtatcctttgcttatctttgtagtactgaaaatttgccgaagtaactggctgtgcagaatgtaatagaagcttttcttattcttttattcttaagatcagtatctttttacagtattctttctacatgatccttttttgtacatttaagaatattttgattatattaaacaagactgctgattttgctactttttttaaggggtcttcaagtaagtaaaacatacatcgtagctagaagaaaaatgtaccttaaatttgcatcttccctctcatacccaagctgtaaacaattgaaatattttgtcttaaatcacttggttcaatacatgcttatttgttttaaaacctgtatcatcaaactctctctctaaatttaaaatgctgttgaatatgatacttttgaggagagagtgtgctcagaacttagacgggatttggtaggccaagtatgctaagtgtacaatatattttttaattttacacctgaaacaaagaaatgtggtcactaaaaataaaagtatatatgtaggaattaatgtactcttgctttgtcaagctgtttgctatagtttccaaggtattatgttactctaactctgaaaagtgatgtaatctggtagcaatgtagtagttcaaataaaggcatttacataataa

SEQ ID NO: 441271 - DNA, 2360 bp, Homo sapiens
ggggcggagggggctggcaggaggggagggagcgctggctttagagccacagctgcaaagattccgaggtgcagaagttgtctgagtgcgttggtcggcggcagtcgggccagacccaggactctgcgactttacatctttaaatggatgagatggctaccactcagatttccaaagatgagcttgatgaactcaaagaggcctttgcaaaagttgatctcaacagcaacggattcatttgtgactatgaacttcatgagctcttcaaggaagctaatatgccattaccaggatataaagtgagagaaattattcagaaactcatgctggatggtgacaggaataaagatgggaaaataagttttgacgaatttgtttatatttttcaagaggtaaaaagtagtgatattgccaagaccttccgcaaagcaatcaacaggaaagaaggtatttgtgctctgggtggaacttcagagttgtccagcgaaggaacacagcattcttactcagaggaagaaaaatatgcttttgttaactggataaacaaagctttggaaaatgatcctgattgtagacatgttataccaatgaaccctaacaccgatgacctgttcaaagctgttggtgatggaattgtgctttgtaaaatgattaacctttcagttcctgataccattgatgaaagagcaatcaacaagaagaaacttacacccttcatcattcaggaaaacttgaacttggcactgaactctgcttctgccattgggtgtcatgttgtgaacattggtgcagaagatttgagggctgggaaacctcatctggttttgggactgctttggcagatcattaagatcggtttgttcgctgacattgaattaagcaggaatgaagccttggctgctttactccgagatggtgagactttggaggaacttatgaaattgtctccagaagagcttctgcttagatgggcaaactttcatttggaaaactcgggctggcaaaaaattaacaactttagtgctgacatcaaggattccaaagcctatttccatcttctcaatcaaatcgcaccaaaaggacaaaaggaaggtgaaccacggatagatattaacatgtcaggtttcaatgaaacagatgatttgaagagagctgagagtatgcttcaacaagcagataaattaggttgcagacagtttgttacccctgctgatgttgtcagtggaaaccccaaactcaacttagctttcgtggctaacctgtttaataaatacccagcactaactaagccagagaaccaggatattgactggactctattagaaggagaaactcgtgaagaaagaaccttccgtaactggatgaactctcttggtgtcaatcctcacgtaaaccatctctatgctgacctgcaagatgccctggtaatcttacagttatatgaacgaattaaagttcctgttgactggagtaaggttaataaacctccatacccgaaactgggagccaacatgaaaaagctagaaaactgcaactatgctgttgaattagggaagcatcctgctaaattctccctggttggcattggagggcaagacctgaatgatgggaaccaaaccctgactttagctttagtctggcagctgatgagaagatataccctcaatgtcctggaagatcttggagatggtcagaaagccaatgacgacatcattgtgaactgggtgaacagaacgttgagtgaagctggaaaatcaacttccattcagagttttaaggacaagacgatcagctccagtttggcagttgtggatttaattgatgccatccagccaggctgtataaactatgaccttgtgaagagtggcaatctaacagaagatgacaagcacaataatgccaagtatgcagtgtcaatggctagaagaatcggagccagagtgtatgctctccctgaagaccttgtggaagtaaagcccaagatggtcatgactgtgtttgcatgtttgatgggcaggggaatgaagagagtgtaaaataaccaatctgaataaaacagccatgctcccaggtgcatgattcgcaggtcagctatttccaggtgaagtgcttatggcttaaggaactcttggccattcaaaggacttttcattttgattaacaggactagcttatcatgagagccctcaggggaaagggtttaagaaaaacaatcgttggaggacaatagtaacgacagggaactcgctcaggcacgagtatgtaagcacctcagagccatatacagtttaaacactatcgctaaaaatgttgccccgaacacctcaccaggaatgaaagtaatgctctagttccgggat

SEQ ID NO: 441272 - DNA, 1790 bp, Homo sapiens
ggggcggagggggctggcaggaggggagggagcgctggctttagagccacagctgcaaagattccgaggtgcagaagttgtctgagtgcgttggtcggcggcagtcgggccagacccaggactctgcgactttacatctttaaatggatgagatggctaccactcagatttccaaagatgagcttgatgaactcaaagaggcctttgcaaaagttgatctcaacagcaacggattcatttgtgactatgaacttcatgagctcttcaaggaagctaatatgccattaccaggatataaagtgagagaaattattcagaaactcatgctggatggtgacaggaataaagatgggaaaataagttttgacgaatttgtttatatttttcaagaggtaaaaagtagtgatattgccaagaccttccgcaaagcaatcaacaggaaagaaggtatttgtgctctgggtggaacttcagagttgtccagcgaaggaacacagcattcttactcagaggaagaaaaatatgcttttgttaactggataaacaaagctttggaaaatgatcctgattgtagacatgttataccaatgaaccctaacaccgatgacctgttcaaagctgttggtgatggaattgtgctttgtaaaatgattaacctttcagttcctgataccattgatgaaagagcaatcaacaagaagaaacttacacccttcatcattcaggaaaacttgaacttggcactgaactctgcttctgccattgggtgtcatgttgtgaacattggtgcagaagatttgagggctgggaaacctcatctggttttgggactgctttggcagatcattaagatcggtttgttcgctgacattgaattaagcaggaatgaagccttggctgctttactccgagatggtgagactttggaggaacttatgaaattgtctccagaagagcttctgcttagatgggcaaactttcatttggaaaactcgggctggcaaaaaattaacaactttagtgctgacatcaaggattccaaagcctatttccatcttctcaatcaaatcgcaccaaaaggacaaaaggaaggtgaaccacggatagatattaacatgtcaggtttcaatgaaacagatgatttgaagagagctgagagtatgcttcaacaagcagataaattaggttgcagacagtttgttacccctgctgatgttgtcagtggaaaccccaaactcaacttagctttcgtggctaacctgtttaataaatacccagcactaactaagccagagaaccaggatattgactggactctattagaaggagaaactcgtgaagaaagaaccttccgtaactggatgaactctcttggtgtcaatcctcacgtaaaccatctctatgcgtaagccttcctactgctattgtaaacagttacgaatgtcatgaatggatgttaaataatgacagctctaaagattttctagatattaatttgtagctattatttatattggaaaatgtcaagtggtgatttccatcatcattttccaaatacacaaaagctttaagtattcctttacatgatcgttaactgtaagtgatagaatatataaatgtctttatagtaccctagggagcaaatactttatattttgaaacagctgtttgggaggttgaggtgggggcattgcttgagcccaggagtttgaggcttcagtgagctatggttgtgccactgtactccagcctgggcaacaaagtgagatcctatctctaagagggaaaaa

SEQ ID NO: 441273 - DNA, 301 bp, Homo sapiens
  misc_feature (202)..(202): n is a, c, g, or t
aattctagacagtactgatggtaaccaaggccctaatttaacttctcagaatatacagtgctgggctcctaacttctcggaatatacagtgcagggctcctaaacaaggcattggctgaagacctcattcatgaccataatggcttactaaaataagttcaaatcagttgcatgaaatatgatatgggccaccacgcccggnttagaaaacattgtcttccatatactttaaatcatctttagctcacttataatacctgatacaacataaattttaggtaaaatagttgttatattgtgt

SEQ ID NO: 441274 - DNA, 569 bp, Homo sapiens
aattctagacagtactgatggtaaccaaggccctaatttaacttctcagaatatacagtgctgggctcctaacttctcggaatatacagtgcagggctcctaaacaaggcattggctgaagacctcattcatgaccataatggcttactaaaataagttcaaatcagttgcatgaaatatgatatgggccaggcgtggtggcttacgcctgccatgtcagcactttgggaggccaaggtaggcagattgcttgagcccaagagtttgagaccagcctgggcaacatgacaaaaccccgtctctacaaaaaatacaaaaatttcctgagcatggtgacatgtacctgtagtcccagatccttgggaggctgaggtggaaggatcactttagccttggaggttgaggctgcagtgagctgtgatcataccactgcactccaatctgggtgacaaaatgagaccctgtctcaaaaaaagaaaaaacatggttcagtgattagttacttttcagtcatgagtctcttcattttaactttttgtaacagatttttttcagaacagttttaagtt

SEQ ID NO: 441275 - DNA, 795 bp, Homo sapiens
aagtgtgtaacacttcagaatgttttaactgaattctttacaatttcatcaaccagttgtggcacctaaagatagggttgttatctctctacccttgggatctcataacttcttggtatggtcaccacttgacaaaagaagcaatgtgtttatcatattctagaaaaatattcatagaaatgtaagtggaattgcattaacctgtggaaaaatgctggtttcttttagctgtagattattgagtcaatatcaaatgctaatatacaagggacaatagtgcattaaatttaataggtagttctgttataattattgtgaaaatttttaatatagtgttgatttgtcagtgttctaattcactgttaatttgcggttttcataatattacctttatgtaatttcctaggcatcaactgtgaaatctgtgttagaattgattcctgaattaaatgaaaaggaagaagcatacaattccctcatgaaaagctatgtctcagagaaagatgtcacatctgctaaagcactgtatgaacatttgactgcaaagaatacaaaattggatgatctgtttctaaagcgttacgcatctttgctgaagtatgctggagagcctgtccctttcattgaaccccctgaaagctttgaattttatgcacagcagctaagaaaattgagggaaaactcttcttgaaataaccaggcgatactttgttttgtatatatttgtgattctgtgtctacatgttattttgaagtatatctgagggaaaaataaatgaaaattttctttatgta

SEQ ID NO: 441276 - DNA, 333 bp, Homo sapiens
tgattaatatatttttttctttatgtcagtctcagagaaagatgtcacatctgctaaagcactgtatgaacatttgactgcaaagaatacaaaattggatgatctgtttctaaagcgttacgcatctttgctgaagtatgctggagagcctgtccctttcattgaaccccctgaaagctttgaattttatgcacagcagctaagaaaattgagggaaaactcttcttgaaataaccaggcgatactttgttttgtatatatttgtgattctgtgtctacatgttattttgaagtatatctgagggaaaaataaatgaaaattttctttatgta

SEQ ID NO: 441277 - DNA, 1023 bp, Homo sapiens
ggtagaattcatttattttctaaagcgaggccccgcgtacgcgcttagggtggggacctgcgcgttcctttacactgttcccaggccctgataatccacatcctatcatgttgaacctgggaggcaaacggcaaggtgcaaaagacctccacggtttctccggcccgcgtttctgagagtgaagggccgttcctattggacatggcgtcagggctgaacgttagcagcaacatctgcactcgggggcgggggaaaccttcccacgtcctgggatcttcatagtcggctctcctcgagagttctcggtatttttactagttggcctcccacaagcctctgcgccaacctgggaggagttgacctcttgcggctctaccaacagaggagtgcaggggtgcagcgaatgaacacgatgcccagatcggagacggaagacggaaaagaaaagcttcgataatgaatcaagcaacatcgtttatgtaaatattacattgggtcttctgtcctcggagaagtgcggttttccatcttccaacctaaaacaatccgtcgctccccccacatttggcacgcccggcagttggtctctgccgcgccaggctaccctgcggtcacatgctcctcctgtccttctggcggagcgtgcttcccgctgcggggacgttcgagcaatggcagccctgctgagatccgcgcgttggttgctgcgtgccggggcggccccgcgcctcccgctctccctgcgcctcctccctggcggcccgggccggctgcatgccgcctcctatctgcccgccgctcgcgccgggcccgtggccggaggactactgagcccagccaggctgtagtggtagcatatagattgtccttttgcaaagaaagaaaaaaaaccatcaagttgtgccaaattattctcctatgtttggctgctagaacatggttaccatgtctttctctctcactccctccctttctatcgttctctctttgcatggatttcttttgaaaaaaaataaattgctc

SEQ ID NO: 441278 - DNA, 596 bp, Homo sapiens
tcaccaaagcttggcatagcttgcacttgttttcttttttcttgccttaaaaaataatagtcgactattaggccttcctattggtaataatacactactgtattattgtgaactttcttaattggaaatattcagtttgatccacttgtttatcagaaaccttcacttactgaataatgttttaatttttagagatgtggtgcaattgctgaacaaaccccgattttgttgttgttcctccttaggaattctaggaaacaaggaaaggtactgtgctttacctgcttacaaatcaatgatactgtacgtgccttgctcagaagtattgaatttaacataaaagcctgttgtttcaggaccttatttgagaatactatagagattcaagactttgcttgtctctacttagagtcagttttgtcgtctgttagctgtactggaaatgtaaaacaagttcacgcaggaattttccacttacacaggtatgcattgagagccccaagaaaaggcccttaaaaaatgcaagattagaggcatgagccaccacgttctgtttttcttgttgttgttttgttttgtttgtttgtttggagatc

SEQ ID NO: 441279 - DNA, 191 bp, Homo sapiens
tccgagcttcggtacctccgacgcctctgtgtactggtagaaagatctggtcagagtttaaccctctattaagtattaatctgcgtgtgtgaagccatactttttcaggattcttcccctaattggctctttggtttccctgctctgtttcatttatttcattaaaatgttattcctttatttaagattca

SEQ ID NO: 441280 - DNA, 5712 bp, Homo sapiens
ggtagaattcatttattttctaaagcgaggccccgcgtacgcgcttagggtggggacctgcgcgttcctttacactgttcccaggccctgataatccacatcctatcatgttgaacctgggaggcaaacggcaaggtgcaaaagacctccacggtttctccggcccgcgtttctgagagtgaagggccgttcctattggacatggcgtcagggctgaacgttagcagcaacatctgcactcgggggcgggggaaaccttcccacgtcctgggatcttcatagtcggctctcctcgagagttctcggtatttttactagttggcctcccacaagcctctgcgccaacctgggaggagttgacctcttgcggctctaccaacagaggagtgcaggggtgcagcgaatgaacacgatgcccagatcggagacggaagacggaaaagaaaagcttcgataatgaatcaagcaacatcgtttatgtaaatattacattgggtcttctgtcctcggagaagtgcggttttccatcttccaacctaaaacaatccgtcgctccccccacatttggcacgcccggcagttggtctctgccgcgccaggctaccctgcggtcacatgctcctcctgtccttctggcggagcgtgcttcccgctgcggggacgttcgagcaatggcagccctgctgagatccgcgcgttggttgctgcgtgccggggcggccccgcgcctcccgctctccctgcgcctcctccctggcggcccgggccggctgcatgccgcctcctatctgcccgccgctcgcgccgggcccgtggccggaggactactgagcccagccaggctgtatgccattgctgccaaagaaaaagatattcaagaggagtccactttttcttctaggaagatttccaatcagtttgattgggctctaatgagactagatctttctgttcgaagaactggccgcattccaaagaagcttctacaaaaagtttttaatgatacctgccgctcaggtggcctaggtggtagtcatgccttgcttctactacgtagttgtggttctctcttgcctgaactaaagcttgaagagagaacagaatttgctcataggatatgggacacacttcagaaattaggtgctgtgtatgatgtgagtcactataatgctttacttaaagtctatcttcaaaatgaatataaattctcaccaactgatttcctggcaaaaatggaggaagcaaacattcaaccaaatcgagtgacataccagagattgattgcttcttattgtaatgtaggagatattgaaggtgccagcaagattcttggatttatgaaaactaaggatctcccagttacagaggcagtattcagtgcccttgtgacagggcatgccagagctggtgatatggagaatgcagaaaacattctcacagtgatgagagatgccggaattgagcctggtccagacacatacctcgcattattgaatgcatatgctgagaagggcgacattgaccatgttaagcagactctggagaaggtggagaagtccgagcttcaccttatggaccgtgatttactgcaaattatttttagcttcagtaaagctgggtatcctcagtatgtctcagaaattttggaaaaagttacatgtgaaagaagatatattccagatgcaatgaacctcattttacttttagtcactgaaaaattggaagatgtagcgttgcaaattttactagcatgccccgtatcaaaggaagatggcccaagtgtctttggcagtttctttttacaacactgtgtgactatgaatacgcctgtggagaagctaacagactactgtaagaagttaaaggaagtccagatgcactcctttcctctgcagttcaccctccattgtgctttactcgccaataaaactgatttggcaaaagccttaatgaaggctgtgaaggaggaaggttttcctatcagacctcactatttctggccattgctagttggacgtcggaaggaaaaaaatgttcaaggtataattgaaatcctcaaaggaatgcaagaattgggagtacatcctgatcaggaaacatatacagattatgtgattccatgctttgatagtgtaaactcagcacgagccattttgcaggaaaatggatgtctgtctgatagtgatatgttttctcaagctggattgagaagtgaagcagcaaatgggaacttagactttgtattatcatttttgaaatcaaatacattgcccatctcgctgcagtctataagaagtagcctactgctaggcttcaggaggtctatgaatataaatctttggagcgagataacagaattgttgtacaaggatggacgttattgccaggagcctcgaggaccgacggaagctgttggctattttctttataacttgattgacagcatgagtgactcagaggtacaggccaaggaggagcatttgagacaatacttccatcagctggagaagatgaatgtaaaaattcctgaaaatatctacagaggcattcgtaatctcctggaaagctaccatgttcctgaattgattaaggatgctcacttgttggttgagagtaagaatttagactttcaaaaaactgtgcaacttacatcatctgaattggagtccacacttgaaacactaaaagctgaaaatcaacctataagagatgtcctaaagcaactcatattagtgctttgttcagaagagaatatgcaaaaagcccttgaattgaaagcaaaatatgaatccgacatggttactggtggctatgcagctttaataaatttatgctgtcgacatgataaagtagaagatgccttgaacttgaaagaagaatttgaccgcttagattcatctgctgtccttgacaccggcaagtatgtaggccttgtaagagtattggcaaagcatggcaagctccaagatgctattaacattctgaaggagatgaaagagaaggatgttcttatcaaagatacaacagccttgtcctttttccacatgctaaatggcgcagctttaagaggtgaaattgaaacagtaaaacagttgcatgaagccatcgtgactctagggttagcagaaccatccaccaacataagtttcccattggtcactgtacacttggaaaagggcgacctatctactgctcttgaggtcgccattgactgctatgaaaagtataaagtattaccaaggattcatgatgtcttgtgtaaactggtagagaaaggcgagactgatctaattcagaaagcaatggactttgtgagccaagaacaaggtgaaatggtgatgctctatgatctcttctttgccttcctacaaacaggaaattacaaagaggccaagaagatcattgagactccagggattagagctcgatctgcaaggcttcagtggttttgtgacagatgtgttgcaaataatcaggttgaaactctggaaaaattagtggagctgacacagaagctatttgaatgtgatagagaccagatgtactacaatctgctaaaactgtataaaataaacggtgactggcaaagagctgatgcagtctggaataaaatccaagaagaaaatgttattcctcgtgaaaagacattaagattattagcagaaatccttagagagggtaaccaggaagttccgtttgacgtacctgagttgtggtatgaagatgaaaaacattccctgaattcttcgtcagcctcaaccacagaacctgatttccagaaagatatattgattgcctgccgattgaaccaaaaaaaaggggcatatgatattttcctgaatgcaaaagagcaaaacattgtgtttaatgctgaaacctacagcaatctcattaaattactgatgtcagaagattattttacacaagcaatggaagtgaaagcattcgcggagacccacatcaagggcttcacactgaacgatgctgccaacagccgcctcatcataacgcaagttaggcgggattatttgaaagaggctgtgacaacactgaaaacagtattggatcagcagcagaccccttctaggttagcagtgacccgtgtcatccaggcattggccatgaagggtgatgttgaaaacatagaagtagttcagaagatgttaaatggactcgaagactccattggactttcaaaaatggttttcatcaataacattgctttggctcaaataaagaataataacatagatgccgcaatagaaaacattgaaaatatgcttacttcagagaataaagtcattgaaccccaatacttcggcttggcatacttattcagaaaagtaatagaggagcagttggaaccagcagttgaaaagataagcatcatggcggagagattggccaatcagtttgcaatttataaacctgtcactgattttttccttcaacttgtggatgcaggcaaggtggatgatgccagagctctcctacagagatgtggtgcaattgctgaacaaaccccgattttgttgttgttcctccttaggaattctaggaaacaaggaaaggcatcaactgtgaaatctgtgttagaattgattcctgaattaaatgaaaaggaagaagcatacaattccctcatgaaaagctatgtctcagagaaagatgtcacatctgctaaagcactgtatgaacatttgactgcaaagaatacaaaattggatgatctgtttctaaagcgttacgcatctttgctgaagtatgctggagagcctgtccctttcattgaaccccctgaaagctttgaattttatgcacagcagctaagaaaattgagggaaaactcttcttgaaataaccaggcgatactttgttttgtatatatttgtgattctgtgtctacatgttattttgaagtatatctgagggaaaaataaatgaaaattttctttatgtacttatgtatgtgtgatgcatgttcaaagtcttattgaccataactctgtgcacttggttattggacatttttggagtttttttctctgggaaaaatcgatagtgttttcttcaatgctgctgctgtgtgaagccatactttttcaggattcttcccctaattggctctttggtttccctgctctgtttcatttatttcattaaaatgttattcctttatttaagattcacttattagtctgctgtttctctgaaaaattttagagctaggtatagtgaccgtgaactttctaacgcataatattctgtgatacagccattccgtacatgtgtgaagtcctgcataactttcgaactttgttaaatgttggcactaggagtcatcagatctaggcttcatcattttccagtgagaagcagagacccaaagggcctgttacttgtgcttggtcaggggactgtctgtcatgcctggaggctcttcggcacacttccccatctttcccttctgccactgtggcttcaagcacctctgttcatagagcgtctctgaaattgagtctcggtcatgacttatcccgaagtagagcaatgtgtttcctctcattgtagtttcaggactttgtcagtacaagctctgccctaggcttgttactttatactcatatcctgaaaagatgtgatttcatctatgaaggggtaaaatattggtttgtatttaattgtttgaaataaaagtgatccctatattga

SEQ ID NO: 441281 - DNA, 4263 bp, Homo sapiens
tttttgaatctggatattttatttagctttaatacttaaataaaaacactctaactttgtcttctaatttctggaactctctatagactctggagaaggtggagaagtccgagcttcaccttatggaccgtgatttactgcaaattatttttagcttcagtaaagctgggtatcctcagtatgtctcagaaattttggaaaaagttacatgtgaaagaagatatattccagatgcaatgaacctcattttacttttagtcactgaaaaattggaagatgtagcgttgcaaattttactagcatgccccgtatcaaaggaagatggcccaagtgtctttggcagtttctttttacaacactgtgtgactatgaatacgcctgtggagaagctaacagactactgtaagaagttaaaggaagtccagatgcactcctttcctctgcagttcaccctccattgtgctttactcgccaataaaactgatttggcaaaagccttaatgaaggctgtgaaggaggaaggttttcctatcagacctcactatttctggccattgctagttggacgtcggaaggaaaaaaatgttcaaggtataattgaaatcctcaaaggaatgcaagaattgggagtacatcctgatcaggaaacatatacagattatgtgattccatgctttgatagtgtaaactcagcacgagccattttgcaggaaaatggatgtctgtctgatagtgatatgttttctcaagctggattgagaagtgaagcagcaaatgggaacttagactttgtattatcatttttgaaatcaaatacattgcccatctcgctgcagtctataagaagtagcctactgctaggcttcaggaggtctatgaatataaatctttggagcgagataacagaattgttgtacaaggatggacgttattgccaggagcctcgaggaccgacggaagctgttggctattttctttataacttgattgacagcatgagtgactcagaggtacaggccaaggaggagcatttgagacaatacttccatcagctggagaagatgaatgtaaaaattcctgaaaatatctacagaggcattcgtaatctcctggaaagctaccatgttcctgaattgattaaggatgctcacttgttggttgagagtaagaatttagactttcaaaaaactgtgcaacttacatcatctgaattggagtccacacttgaaacactaaaagctgaaaatcaacctataagagatgtcctaaagcaactcatattagtgctttgttcagaagagaatatgcaaaaagcccttgaattgaaagcaaaatatgaatccgacatggttactggtggctatgcagctttaataaatttatgctgtcgacatgataaagtagaagatgccttgaacttgaaagaagaatttgaccgcttagattcatctgctgtccttgacaccggcaagtatgtaggccttgtaagagtattggcaaagcatggcaagctccaagatgctattaacattctgaaggagatgaaagagaaggatgttcttatcaaagatacaacagccttgtcctttttccacatgctaaatggcgcagctttaagaggtgaaattgaaacagtaaaacagttgcatgaagccatcgtgactctagggttagcagaaccatccaccaacataagtttcccattggtcactgtacacttggaaaagggcgacctatctactgctcttgaggtcgccattgactgctatgaaaagtataaagtattaccaaggattcatgatgtcttgtgtaaactggtagagaaaggcgagactgatctaattcagaaagcaatggactttgtgagccaagaacaaggtgaaatggtgatgctctatgatctcttctttgccttcctacaaacaggaaattacaaagaggccaagaagatcattgagactccagggattagagctcgatctgcaaggcttcagtggttttgtgacagatgtgttgcaaataatcaggttgaaactctggaaaaattagtggagctgacacagaagctatttgaatgtgatagagaccagatgtactacaatctgctaaaactgtataaaataaacggtgactggcaaagagctgatgcagtctggaataaaatccaagaagaaaatgttattcctcgtgaaaagacattaagattattagcagaaatccttagagagggtaaccaggaagttccgtttgacgtacctgagttgtggtatgaagatgaaaaacattccctgaattcttcgtcagcctcaaccacagaacctgatttccagaaagatatattgattgcctgccgattgaaccaaaaaaaaggggcatatgatattttcctgaatgcaaaagagcaaaacattgtgtttaatgctgaaacctacagcaatctcattaaattactgatgtcagaagattattttacacaagcaatggaagtgaaagcattcgcggagacccacatcaagggcttcacactgaacgatgctgccaacagccgcctcatcataacgcaagttaggcgggattatttgaaagaggctgtgacaacactgaaaacagtattggatcagcagcagaccccttctaggttagcagtgacccgtgtcatccaggcattggccatgaagggtgatgttgaaaacatagaagtagttcagaagatgttaaatggactcgaagactccattggactttcaaaaatggttttcatcaataacattgctttggctcaaataaagaataataacatagatgccgcaatagaaaacattgaaaatatgcttacttcagagaataaagtcattgaaccccaatacttcggcttggcatacttattcagaaaagtaatagaggagcagttggaaccagcagttgaaaagataagcatcatggcggagagattggccaatcagtttgcaatttataaacctgtcactgattttttccttcaacttgtggatgcaggcaaggtggatgatgccagagctctcctacagagatgtggtgcaattgctgaacaaaccccgattttgttgttgttcctccttaggaattctaggaaacaaggaaaggcatcaactgtgaaatctgtgttagaattgattcctgaattaaatgaaaaggaagaagcatacaattccctcatgaaaagctatgtctcagagaaagatgtcacatctgctaaagcactgtatgaacatttgactgcaaagaatacaaaattggatgatctgtttctaaagcgttacgcatctttgctgaagtatgctggagagcctgtccctttcattgaaccccctgaaagctttgaattttatgcacagcagctaagaaaattgagggaaaactcttcttgaaataaccaggcgatactttgttttgtatatatttgtgattctgtgtctacatgttattttgaagtatatctgagggaaaaataaatgaaaattttctttatgtacttatgtatgtgtgatgcatgttcaaagtcttattgaccataactctgtgcacttggttattggacatttttggagtttttttctctgggaaaaatcgatagtgttttcttcaatgctgctgctgtgtgaagccatactttttcaggattcttcccctaattggctctttggtttccctgctctgtttcatttatttcattaaaatgttattcctttatttaagattcacttattagtctgctgtttctctgaaaaattttagagctaggtatagtgaccgtgaactttctaacgcataatattctgtgatacagccattccgtacatgtgtgaagtcctgcataactttcgaactttgttaaatgttggcactaggagtcatcagatctaggcttcatcattttccagtgagaagcagagacccaaagggcctgttacttgtgcttggtcaggggactgtctgtcatgcctggaggctcttcggcacacttccccatctttcccttctgccactgtggcttcaagcacctctgttcatagagcgtctctgaaattgagtctcggtcatgacttatcccgaagtagagcaatgtgtttcctctcattgtagtttcaggactttgtcagtacaagctctgccctaggcttgttactttatactcatatcctgaaaagatgtgatttcatctatgaaggggtaaaatattggtttgtatttaattgtttgaaataaaagtgatccctatattga

SEQ ID NO: 441282 - DNA, 5596 bp, Homo sapiens
ggtagaattcatttattttctaaagcgaggccccgcgtacgcgcttagggtggggacctgcgcgttcctttacactgttcccaggccctgataatccacatcctatcatgttgaacctgggaggcaaacggcaaggtgcaaaagacctccacggtttctccggcccgcgtttctgagagtgaagggccgttcctattggacatggcgtcagggctgaacgttagcagcaacatctgcactcgggggcgggggaaaccttcccacgtcctgggatcttcatagtcggctctcctcgagagttctcggtatttttactagttggcctcccacaagcctctgcgccaacctgggaggagttgacctcttgcggctctaccaacagaggagtgcaggggtgcagcgaatgaacacgatgcccagatcggagacggaagacggaaaagaaaagcttcgataatgaatcaagcaacatcgtttatgtaaatattacattgggtcttctgtcctcggagaagtgcggttttccatcttccaacctaaaacaatccgtcgctccccccacatttggcacgcccggcagttggtctctgccgcgccaggctaccctgcggtcacatgctcctcctgtccttctggcggagcgtgcttcccgctgcggggacgttcgagcaatggcagccctgctgagatccgcgcgttggttgctgcgtgccggggcggccccgcgcctcccgctctccctgcgcctcctccctggcggcccgggccggctgcatgccgcctcctatctgcccgccgctcgcgccgggcccgtggccggaggactactgagcccagccaggctgtatgccattgctgccaaagaaaaagatattcaagaggagtccactttttcttctaggaagatttccaatcagtttgattgggctctaatgagactagatctttctgttcgaagaactggccgcattccaaagaagcttctacaaaaagtttttaatgatacctgccgctcaggtggcctaggtggtagtcatgccttgcttctactacgtagttgtggttctctcttgcctgaactaaagcttgaagagagaacagaatttgctcataggatatgggacacacttcagaaattaggtgctgtgtatgatgtgagtcactataatgctttacttaaagtctatcttcaaaatgaatataaattctcaccaactgatttcctggcaaaaatggaggaagcaaacattcaaccaaatcgagtgacataccagagattgattgcttcttattgtaatgtaggagatattgaaggtgccagcaagattcttggatttatgaaaactaaggatctcccagttacagaggcagtattcagtgcccttgtgacagggcatgccagagctggtgatatggagaatgcagaaaacattctcacagtgatgagagatgccggaattgagcctggtccagacacatacctcgcattattgaatgcatatgctgagaagggcgacattgaccatgttaagcagactctggagaaggtggagaagtccgagcttcaccttatggaccgtgatttactgcaaattatttttagcttcagtaaagctgggtatcctcagtatgtctcagaaattttggaaaaagttacatgtgaaagaagatatattccagatgcaatgaacctcattttacttttagtcactgaaaaattggaagatgtagcgttgcaaattttactagcatgccccgtatcaaaggaagatggcccaagtgtctttggcagtttctttttacaacactgtgtgactatgaatacgcctgtggagaagctaacagactactgtaagaagttaaaggaagtccagatgcactcctttcctctgcagttcaccctccattgtgctttactcgccaataaaactgatttggcaaaagccttaatgaaggctgtgaaggaggaaggttttcctatcagacctcactatttctggccattgctagttggacgtcggaaggaaaaaaatgttcaaggtataattgaaatcctcaaaggaatgcaagaattgggagtacatcctgatcaggaaacatatacagattatgtgattccatgctttgatagtgtaaactcagcacgagccattttgcaggaaaatggatgtctgtctgatagtgatatgttttctcaagctggattgagaagtgaagcagcaaatgggaacttagactttgtattatcatttttgaaatcaaatacattgcccatctcgctgcagtctataagaagtagcctactgctaggcttcaggaggtctatgaatataaatctttggagcgagataacagaattgttgtacaaggatggacgttattgccaggagcctcgaggaccgacggaagctgttggctattttctttataacttgattgacagcatgagtgactcagaggtacaggccaaggaggagcatttgagacaatacttccatcagctggagaagatgaatgtaaaaattcctgaaaatatctacagaggcattcgtaatctcctggaaagctaccatgttcctgaattgattaaggatgctcacttgttggttgagagtaagaatttagactttcaaaaaactgtgcaacttacatcatctgaattggagtccacacttgaaacactaaaagctgaaaatcaacctataagagatgtcctaaagcaactcatattagtgctttgttcagaagagaatatgcaaaaagcccttgaattgaaagcaaaatatgaatccgacatggttactggtggctatgcagctttaataaatttatgctgtcgacatgataaagtagaagatgccttgaacttgaaagaagaatttgaccgcttagattcatctgctgtccttgacaccggcaagtatgtaggccttgtaagagtattggcaaagcatggcaagctccaagatgctattaacattctgaaggagatgaaagagaaggatgttcttatcaaagatacaacagccttgtcctttttccacatgctaaatggcgcagctttaagaggtgaaattgaaacagtaaaacagttgcatgaagccatcgtgactctagggttagcagaaccatccaccaacataagtttcccattggtcactgtacacttggaaaagggcgacctatctactgctcttgaggtcgccattgactgctatgaaaagtataaagtattaccaaggattcatgatgtcttgtgtaaactggtagagaaaggcgagactgatctaattcagaaagcaatggactttgtgagccaagaacaaggtgaaatggtgatgctctatgatctcttctttgccttcctacaaacaggaaattacaaagaggccaagaagatcattgagactccagggattagagctcgatctgcaaggcttcagtggttttgtgacagatgtgttgcaaataatcaggttgaaactctggaaaaattagtggagctgacacagaagctatttgaatgtgatagagaccagatgtactacaatctgctaaaactgtataaaataaacggtgactggcaaagagctgatgcagtctggaataaaatccaagaagaaaatgttattcctcgtgaaaagacattaagattattagcagaaagatatattgattgcctgccgattgaaccaaaaaaaaggggcatatgatattttcctgaatgcaaaagagcaaaacattgtgtttaatgctgaaacctacagcaatctcattaaattactgatgtcagaagattattttacacaagcaatggaagtgaaagcattcgcggagacccacatcaagggcttcacactgaacgatgctgccaacagccgcctcatcataacgcaagttaggcgggattatttgaaagaggctgtgacaacactgaaaacagtattggatcagcagcagaccccttctaggttagcagtgacccgtgtcatccaggcattggccatgaagggtgatgttgaaaacatagaagtagttcagaagatgttaaatggactcgaagactccattggactttcaaaaatggttttcatcaataacattgctttggctcaaataaagaataataacatagatgccgcaatagaaaacattgaaaatatgcttacttcagagaataaagtcattgaaccccaatacttcggcttggcatacttattcagaaaagtaatagaggagcagttggaaccagcagttgaaaagataagcatcatggcggagagattggccaatcagtttgcaatttataaacctgtcactgattttttccttcaacttgtggatgcaggcaaggtggatgatgccagagctctcctacagagatgtggtgcaattgctgaacaaaccccgattttgttgttgttcctccttaggaattctaggaaacaaggaaaggcatcaactgtgaaatctgtgttagaattgattcctgaattaaatgaaaaggaagaagcatacaattccctcatgaaaagctatgtctcagagaaagatgtcacatctgctaaagcactgtatgaacatttgactgcaaagaatacaaaattggatgatctgtttctaaagcgttacgcatctttgctgaagtatgctggagagcctgtccctttcattgaaccccctgaaagctttgaattttatgcacagcagctaagaaaattgagggaaaactcttcttgaaataaccaggcgatactttgttttgtatatatttgtgattctgtgtctacatgttattttgaagtatatctgagggaaaaataaatgaaaattttctttatgtacttatgtatgtgtgatgcatgttcaaagtcttattgaccataactctgtgcacttggttattggacatttttggagtttttttctctgggaaaaatcgatagtgttttcttcaatgctgctgctgtgtgaagccatactttttcaggattcttcccctaattggctctttggtttccctgctctgtttcatttatttcattaaaatgttattcctttatttaagattcacttattagtctgctgtttctctgaaaaattttagagctaggtatagtgaccgtgaactttctaacgcataatattctgtgatacagccattccgtacatgtgtgaagtcctgcataactttcgaactttgttaaatgttggcactaggagtcatcagatctaggcttcatcattttccagtgagaagcagagacccaaagggcctgttacttgtgcttggtcaggggactgtctgtcatgcctggaggctcttcggcacacttccccatctttcccttctgccactgtggcttcaagcacctctgttcatagagcgtctctgaaattgagtctcggtcatgacttatcccgaagtagagcaatgtgtttcctctcattgtagtttcaggactttgtcagtacaagctctgccctaggcttgttactttatactcatatcctgaaaagatgtgatttcatctatgaaggggtaaaatattggtttgtatttaattgtttgaaataaaagtgatccctatattga

SEQ ID NO: 441283 - DNA, 5189 bp, Homo sapiens
ggtagaattcatttattttctaaagcgaggccccgcgtacgcgcttagggtggggacctgcgcgttcctttacactgttcccaggccctgataatccacatcctatcatgttgaacctgggaggcaaacggcaaggtgcaaaagacctccacggtttctccggcccgcgtttctgagagtgaagggccgttcctattggacatggcgtcagggctgaacgttagcagcaacatctgcactcgggggcgggggaaaccttcccacgtcctgggatcttcatagtcggctctcctcgagagttctcggtatttttactagttggcctcccacaagcctctgcgccaacctgggaggagttgacctcttgcggctctaccaacagaggagtgcaggggtgcagcgaatgaacacgatgcccagatcggagacggaagacggaaaagaaaagcttcgataatgaatcaagcaacatcgtttatgtaaatattacattgggtcttctgtcctcggagaagtgcggttttccatcttccaacctaaaacaatccgtcgctccccccacatttggcacgcccggcagttggtctctgccgcgccaggctaccctgcggtcacatgctcctcctgtccttctggcggagcgtgcttcccgctgcggggacgttcgagcaatggcagccctgctgagatccgcgcgttggttgctgcgtgccggggcggccccgcgcctcccgctctccctgcgcctcctccctggcggcccgggccggctgcatgccgcctcctatctgcccgccgctcgcgccgggcccgtggccggaggactactgagcccagccaggctgtatgccattgctgccaaagaaaaagatattcaagaggagtccactttttcttctaggaagatttccaatcagtttgattgggctctaatgagactagatctttctgttcgaagaactggccgcattccaaagaagcttctacaaaaagtttttaatgatacctgccgctcaggtggcctaggtggtagtcatgccttgcttctactacgtagttgtggttctctcttgcctgaactaaagcttgaagagagaacagaatttgctcataggatatgggacacacttcagaaattaggtgctgtgtatgatgtgagtcactataatgctttacttaaagtctatcttcaaaatgaatataaattctcaccaactgatttcctggcaaaaatggaggaagcaaacattcaaccaaatcgagtgacataccagagattgattgcttcttattgtaatgtaggagatattgaaggtgccagcaagattcttggatttatgaaaactaaggatctcccagttacagaggcagtattcagtgcccttgtgacagggcatgccagagctggtgatatggagaatgcagaaaacattctcacagtgatgagagatgccggaattgagcctggtccagacacatacctcgcattattgaatgcatatgctgagaagggcgacattgaccatgttaagcagactctggagaaggtggagaagtccgagcttcaccttatggaccgtgatttactgcaaattatttttagcttcagtaaagctgggtatcctcagtatgtctcagaaattttggaaaaagttacatgtgaaagaagatatattccagatgcaatgaacctcattttacttttagtcactgaaaaattggaagatgtagcgttgcaaattttactagcatgccccgtatcaaaggaagatggcccaagtgtctttggcagtttctttttacaacactgtgtgactatgaatacgcctgtggagaagctaacagactactgtaagaagttaaaggaagtccagatgcactcctttcctctgcagttcaccctccattgtgctttactcgccaataaaactgatttggcaaaagccttaatgaaggctgtgaaggaggaaggttttcctatcagacctcactatttctggccattgctagttggacgtcggaaggaaaaaaatgttcaaggtataattgaaatcctcaaaggaatgcaagaattgggagtacatcctgatcaggaaacatatacagattatgtgattccatgctttgatagtgtaaactcagcacgagccattttgcaggaaaatggatgtctgtctgatagtgatatgttttctcaagctggattgagaagtgaagcagcaaatgggaacttagactttgtattatcatttttgaaatcaaatacattgcccatctcgctgcagtctataagaagtagcctactgctaggcttcaggaggtctatgaatataaatctttggagcgagataacagaattgttgtacaaggatggacgttattgccaggagcctcgaggaccgacggaagctgttggctattttctttataacttgattgacagcatgagtgactcagaggtacaggccaaggaggagcatttgagacaatacttccatcagctggagaagatgaatgtaaaaattcctgaaaatatctacagaggcattcgtaatctcctggaaagctaccatgttcctgaattgattaaggatgctcacttgttggttgagagtaagaatttagactttcaaaaaactgtgcaacttacatcatctgaattggagtccacacttgaaacactaaaagctgaaaatcaacctataagagatgtcctaaagcaactcatattagtgctttgttcagaagagaatatgcaaaaagcccttgaattgaaagcaaaatatgaatccgacatggttactggtggctatgcagctttaataaatttatgctgtcgacatgataaagtagaagatgccttgaacttgaaagaagaatttgaccgcttagattcatctgctgtccttgacaccggcaagtatgtaggccttgtaagagtattggcaaagcatggcaagctccaagatgctattaacattctgaaggagatgaaagagaaggatgttcttatcaaagatacaacagccttgtcctttttccacatgctaaatggcgcagctttaagaggtgaaattgaaacagtaaaacagttgcatgaagccatcgtgactctagggttagcagaaccatccaccaacataagtttcccattggtcactgtacacttggaaaagggcgacctatctactgctcttgaggtcgccattgactgctatgaaaagtataaagtattaccaaggattcatgatgtcttgtgtaaactggtagagaaaggcgagactgatctaattcagaaagcaatggactttgtgagccaagaacaaggtgaaatggtgatgctctatgatctcttctttgccttcctacaaacaggaaattacaaagaggccaagaagatcattgagactccagggattagagctcgatctgcaaggcttcagtggttttgtgacagatgtgttgcaaataatcaggttgaaactctggaaaaattagtggagctgacacagaagctatttgaatgtgatagagaccagatgtactacaatctgctaaaactgtataaaataaacggtgactggcaaagagctgatgcagtctggaataaaatccaagaagaaaatgttattcctcgtgaaaagacattaagattattagcagaaatccttagagagggtaaccaggaagttccgtttgacgtacctgagttgtggtatgaagatgaaaaacattccctgaattcttcgtcagcctcaaccacagaacctgatttccagaaagatatattgattgcctgccgattgaaccaaaaaaaaggggcatatgatattttcctgaatgcaaaagagcaaaacattgtgtttaatgctgaaacctacagcaatctcattaaattactgatgtcagaagattattttacacaagcaatggaagtgaaagcattcgcggagacccacatcaagggcttcacactgaacgatgctgccaacagccgcctcatcataacgcaagttaggcgggattatttgaaagaggctgtgacaacactgaaaacagtattggatcagcagcagaccccttctaggttagcagtgacccgtgtcatccaggcattggccatgaagggtgatgttgaaaacatagaagtagttcagaagatgttaaatggactcgaagactccattggactttcaaaaatggttttcatcaataacattgctttggctcaaataaagaataataacatagatgccgcaatagaaaacattgaaaatatgcttacttcagagaataaagtcattgaaccccaatacttcggcttggcatacttattcagaaaagtaatagaggagcagttggaaccagcagttgaaaagataagcatcatggcggagagattggccaatcagtttgcaatttataaacctgtcactgattttttccttcaacttgtggatgcaggcaaggtggatgatgccagagctctcctacagagatgtggtgcaattgctgaacaaaccccgattttgttgttgttcctccttaggaattctaggaaacaaggaaaggcatcaactgtgaaatctgtgttagaattgattcctgaattaaatgaaaaggaagaagcatacaattccctcatgaaaagctatgtctcagagaaagatgtcacatctgctaaagcactgtatgaacatttgactgcaaagaatacaaaattggatgatctgtttctaaagcgttacgcatctttgctgaagtatgctggagagcctgtccctttcattgaaccccctgaaagctttgaattttatgcacagcagctaagaaaattgagggaaaactcttcttgaaataaccaggcgatactttgttttgtatatatttgtgattctgtgtctacatgttattttgaagtatatctgagggaaaaataaatgaaaattttctttatgtacttatgtatgtgtgatgcatgttcaaagtcttattgaccataactctgtgcacttggttattggacatttttggagtttttttctctgggaaaaatcgatagtgttttcttcaatgctgctgctgtgtgaagccatactttttcaggattcttcccctaattggctctttggtttccctgctctgtttcatttatttcattaaaatgttattcctttatttaagattca

SEQ ID NO: 441284 - DNA, 5114 bp, Homo sapiens
ggtagaattcatttattttctaaagcgaggccccgcgtacgcgcttagggtggggacctgcgcgttcctttacactgttcccaggccctgataatccacatcctatcatgttgaacctgggaggcaaacggcaaggtgcaaaagacctccacggtttctccggcccgcgtttctgagagtgaagggccgttcctattggacatggcgtcagggctgaacgttagcagcaacatctgcactcgggggcgggggaaaccttcccacgtcctgggatcttcatagtcggctctcctcgagagttctcggtatttttactagttggcctcccacaagcctctgcgccaacctgggaggagttgacctcttgcggctctaccaacagaggagtgcaggggtgcagcgaatgaacacgatgcccagatcggagacggaagacggaaaagaaaagcttcgataatgaatcaagcaacatcgtttatgtaaatattacattgggtcttctgtcctcggagaagtgcggttttccatcttccaacctaaaacaatccgtcgctccccccacatttggcacgcccggcagttggtctctgccgcgccaggctaccctgcggtcacatgctcctcctgtccttctggcggagcgtgcttcccgctgcggggacgttcgagcaatggcagccctgctgagatccgcgcgttggttgctgcgtgccggggcggccccgcgcctcccgctctccctgcgcctcctccctggcggcccgggccggctgcatgccgcctcctatctgcccgccgctcgcgccgggcccgtggccggaggactactgagcccagccaggctgtatgccattgctgccaaagaaaaagatattcaagaggagtccactttttcttctaggaagatttccaatcagtttgattgggctctaatgagactagatctttctgttcgaagaactggccgcattccaaagaagcttctacaaaaagtttttaatgatacctgccgctcaggtggcctaggtggtagtcatgccttgcttctactacgtagttgtggttctctcttgcctgaactaaagcttgaagagagaacagaatttgctcataggatatgggacacacttcagaaattaggtgctgtgtatgatgtgagtcactataatgctttacttaaagtctatcttcaaaatgaatataaattctcaccaactgatttcctggcaaaaatggaggaagcaaacattcaaccaaatcgagtgacataccagagattgattgcttcttattgtaatgtaggagatattgaaggtgccagcaagattcttggatttatgaaaactaaggatctcccagttacagaggcagtattcagtgcccttgtgacagggcatgccagagctggtgatatggagaatgcagaaaacattctcacagtgatgagagatgccggaattgagcctggtccagacacatacctcgcattattgaatgcatatgctgagaagggcgacattgaccatgttaagcagactctggagaaggtggagaagtccgagcttcaccttatggaccgtgatttactgcaaattatttttagcttcagtaaagctgggtatcctcagtatgtctcagaaattttggaaaaagttacatgtgaaagaagatatattccagatgcaatgaacctcattttacttttagtcactgaaaaattggaagatgtagcgttgcaaattttactagcatgccccgtatcaaaggaagatggcccaagtgtctttggcagtttctttttacaacactgtgtgactatgaatacgcctgtggagaagctaacagactactgtaagaagttaaaggaagtccagatgcactcctttcctctgcagttcaccctccattgtgctttactcgccaataaaactgatttggcaaaagccttaatgaaggctgtgaaggaggaaggttttcctatcagacctcactatttctggccattgctagttggacgtcggaaggaaaaaaatgttcaaggtataattgaaatcctcaaaggaatgcaagaattgggagtacatcctgatcaggaaacatatacagattatgtgattccatgctttgatagtgtaaactcagcacgagccattttgcaggaaaatggatgtctgtctgatagtgatatgttttctcaagctggattgagaagtgaagcagcaaatgggaacttagactttgtattatcatttttgaaatcaaatacattgcccatctcgctgcagtctataagaagtagcctactgctaggcttcaggaggtctatgaatataaatctttggagcgagataacagaattgttgtacaaggatggacgttattgccaggagcctcgaggaccgacggaagctgttggctattttctttataacttgattgacagcatgagtgactcagaggtacaggccaaggaggagcatttgagacaatacttccatcagctggagaagatgaatgtaaaaattcctgaaaatatctacagaggcattcgtaatctcctggaaagctaccatgttcctgaattgattaaggatgctcacttgttggttgagagtaagaatttagactttcaaaaaactgtgcaacttacatcatctgaattggagtccacacttgaaacactaaaagctgaaaatcaacctataagagatgtcctaaagcaactcatattagtgctttgttcagaagagaatatgcaaaaagcccttgaattgaaagcaaaatatgaatccgacatggttactggtggctatgcagctttaataaatttatgctgtcgacatgataaagtagaagatgccttgaacttgaaagaagaatttgaccgcttagattcatctgctgtccttgacaccggcaagtatgtaggccttgtaagagtattggcaaagcatggcaagctccaagatgctattaacattctgaaggagatgaaagagaaggatgttcttatcaaagatacaacagccttgtcctttttccacatgctaaatggcgcagctttaagaggtgaaattgaaacagtaaaacagttgcatgaagccatcgtgactctagggttagcagaaccatccaccaacataagtttcccattggtcactgtacacttggaaaagggcgacctatctactgctcttgaggtcgccattgactgctatgaaaagtataaagtattaccaaggattcatgatgtcttgtgtaaactggtagagaaaggcgagactgatctaattcagaaagcaatggactttgtgagccaagaacaaggtgaaatggtgatgctctatgatctcttctttgccttcctacaaacaggaaattacaaagaggccaagaagatcattgagactccagggattagagctcgatctgcaaggcttcagtggttttgtgacagatgtgttgcaaataatcaggttgaaactctggaaaaattagtggagctgacacagaagctatttgaatgtgatagagaccagatgtactacaatctgctaaaactgtataaaataaacggtgactggcaaagagctgatgcagtctggaataaaatccaagaagaaaatgttattcctcgtgaaaagacattaagattattagcagaaatccttagagagggtaaccaggaagttccgtttgacgtacctgagttgtggtatgaagatgaaaaacattccctgaattcttcgtcagcctcaaccacagaacctgatttccagaaagatatattgattgcctgccgattgaaccaaaaaaaaggggcatatgatattttcctgaatgcaaaagagcaaaacattgtgtttaatgctgaaacctacagcaatctcattaaattactgatgtcagaagattattttacacaagcaatggaagtgaaagcattcgcggagacccacatcaagggcttcacactgaacgatgctgccaacagccgcctcatcataacgcaagttaggcgggattatttgaaagaggctgtgacaacactgaaaacagtattggatcagcagcagaccccttctaggttagcagtgacccgtgtcatccaggcattggccatgaagggtgatgttgaaaacatagaagtagttcagaagatgttaaatggactcgaagactccattggactttcaaaaatggttttcatcaataacattgctttggctcaaataaagaataataacatagatgccgcaatagaaaacattgaaaatatgcttacttcagagaataaagtcattgaaccccaatacttcggcttggcatacttattcagaaaagtaatagaggagcagttggaaccagcagttgaaaagataagcatcatggcggagagattggccaatcagtttgcaatttataaacctgtcactgattttttccttcaacttgtggatgcaggcaaggtggatgatgccagagctctcctacagagatgtggtgcaattgctgaacaaaccccgattttgttgttgttcctccttaggaattctaggaaacaaggaaaggcatcaactgtgaaatctgtgttagaattgattcctgaattaaatgaaaaggaagaagcatacaattccctcatgaaaagctatgtctcagagaaagatgtcacatctgctaaagcactgtatgaacatttgactgcaaagaatacaaaattggatgatctgtttctaaagcgttacgcatctttgctgaagtatgctggagagcctgtccctttcattgaaccccctgaaagctttgaattttatgcacagcagctaagaaaattgagggaaaactcttcttgaaataaccaggcgatactttgttttgtatatatttgtgattctgtgtctacatgttattttgaagtatatctgagggaaaaataaatgaaaattttctttatgtacttatgtatgtgtgatgcatgttcaaagtcttattgaaataacccggcgatactttgttttgtatatatttgtgattctgtgtctacctgttatttttaagaaaacctatagatgaaaattactaatgaaactgtgtgtacgtgttagcatgtg

SEQ ID NO: 441285 - DNA, 2263 bp, Homo sapiens
aaaaaaaaaaaaaaaaaaaataatcaggttgaaactctggaaaaattagtggagctgacacagaagctatttgaatgtgatagagaccagatgtactacaatctgctaaaactgtataaaataaacggtgactggcaaagagctgatgcagtctggaataaaatccaagaagaaaatgttattcctcgtgaaaagacattaagattattagcagaaatccttagagagggtaaccaggaagttccgtttgacgtacctgagttgtggtatgaagatgaaaaacattccctgaattcttcgtcagcctcaaccacagaacctgatttccagaaagatatattgattgcctgccgattgaaccaaaaaaaaggggcatatgatattttcctgaatgcaaaagagcaaaacattgtgtttaatgctgaaacctacagcaatctcattaaattactgatgtcagaagattattttacacaagcaatggaagtgaaagcattcgcggagacccacatcaagggcttcacactgaacgatgctgccaacagccgcctcatcataacgcaagttaggcgggattatttgaaagaggctgtgacaacactgaaaacagtattggatcagcagcagaccccttctaggttagcagtgacccgtgtcatccaggcattggccatgaagggtgatgttgaaaacatagaagtagttcagaagatgttaaatggactcgaagactccattggactttcaaaaatggttttcatcaataacattgctttggctcaaataaagaataataacatagatgccgcaatagaaaacattgaaaatatgcttacttcagagaataaagtcattgaaccccaatacttcggcttggcatacttattcagaaaagtaatagaggagcagttggaaccagcagttgaaaagataagcatcatggcggagagattggccaatcagtttgcaatttataaacctgtcactgattttttccttcaacttgtggatgcaggcaaggtggatgatgccagagctctcctacagagatgtggtgcaattgctgaacaaaccccgattttgttgttgttcctccttaggaattctaggaaacaaggaaaggcatcaactgtgaaatctgtgttagaattgattcctgaattaaatgaaaaggaagaagcatacaattccctcatgaaaagctatgtctcagagaaagatgtcacatctgctaaagcactgtatgaacatttgactgcaaagaatacaaaattggatgatctgtttctaaagcgttacgcatctttgctgaagtatgctggagagcctgtccctttcattgaaccccctgaaagctttgaattttatgcacagcagctaagaaaattgagggaaaactcttcttgaaataaccaggcgatactttgttttgtatatatttgtgattctgtgtctacatgttattttgaagtatatctgagggaaaaataaatgaaaattttctttatgtacttatgtatgtgtgatgcatgttcaaagtcttattgaccataactctgtgcacttggttattggacatttttggagtttttttctctgggaaaaatcgatagtgttttcttcaatgctgctgctgtgtgaagccatactttttcaggattcttcccctaattggctctttggtttccctgctctgtttcatttatttcattaaaatgttattcctttatttaagattcacttattagtctgctgtttctctgaaaaattttagagctaggtatagtgaccgtgaactttctaacgcataatattctgtgatacagccattccgtacatgtgtgaagtcctgcataactttcgaactttgttaaatgttggcactaggagtcatcagatctaggcttcatcattttccagtgagaagcagagacccaaagggcctgttacttgtgcttggtcaggggactgtctgtcatgcctggaggctcttcggcacacttccccatctttcccttctgccactgtggcttcaagcacctctgttcatagagcgtctctgaaattgagtctcggtcatgacttatcccgaagtagagcaatgtgtttcctctcattgtagtttcaggactttgtcagtacaagctctgccctaggcttgttactttatactcatatcctgaaaagatgtgatttcatctatgaaggggtaaaatattggtttgtatttaattgtttgaaataaaagtgatccctatattga

SEQ ID NO: 441286 - DNA, 4915 bp, Homo sapiens
ggtagaattcatttattttctaaagcgaggccccgcgtacgcgcttagggtggggacctgcgcgttcctttacactgttcccaggccctgataatccacatcctatcatgttgaacctgggaggcaaacggcaaggtgcaaaagacctccacggtttctccggcccgcgtttctgagagtgaagggccgttcctattggacatggcgtcagggctgaacgttagcagcaacatctgcactcgggggcgggggaaaccttcccacgtcctgggatcttcatagtcggctctcctcgagagttctcggtatttttactagttggcctcccacaagcctctgcgccaacctgggaggagttgacctcttgcggctctaccaacagaggagtgcaggggtgcagcgaatgaacacgatgcccagatcggagacggaagacggaaaagaaaagcttcgataatgaatcaagcaacatcgtttatgtaaatattacattgggtcttctgtcctcggagaagtgcggttttccatcttccaacctaaaacaatccgtcgctccccccacatttggcacgcccggcagttggtctctgccgcgccaggctaccctgcggtcacatgctcctcctgtccttctggcggagcgtgcttcccgctgcggggacgttcgagcaatggcagccctgctgagatccgcgcgttggttgctgcgtgccggggcggccccgcgcctcccgctctccctgcgcctcctccctggcggcccgggccggctgcatgccgcctcctatctgcccgccgctcgcgccgggcccgtggccggaggactactgagcccagccaggctgtatgccattgctgccaaagaaaaagatattcaagaggagtccactttttcttctaggaagatttccaatcagtttgattgggctctaatgagactagatctttctgttcgaagaactggccgcattccaaagaagcttctacaaaaagtttttaatgatacctgccgctcaggtggcctaggtggtagtcatgccttgcttctactacgtagttgtggttctctcttgcctgaactaaagcttgaagagagaacagaatttgctcataggatatgggacacacttcagaaattaggtgctgtgtatgatgtgagtcactataatgctttacttaaagtctatcttcaaaatgaatataaattctcaccaactgatttcctggcaaaaatggaggaagcaaacattcaaccaaatcgagtgacataccagagattgattgcttcttattgtaatgtaggagatattgaaggtgccagcaagattcttggatttatgaaaactaaggatctcccagttacagaggcagtattcagtgcccttgtgacagggcatgccagagctggtgatatggagaatgcagaaaacattctcacagtgatgagagatgccggaattgagcctggtccagacacatacctcgcattattgaatgcatatgctgagaagggcgacattgaccatgttaagcagactctggagaaggtggagaagtccgagcttcaccttatggaccgtgatttactgcaaattatttttagcttcagtaaagctgggtatcctcagtatgtctcagaaattttggaaaaagttacatgtgaaagaagatatattccagatgcaatgaacctcattttacttttagtcactgaaaaattggaagatgtagcgttgcaaattttactagcatgccccgtatcaaaggaagatggcccaagtgtctttggcagtttctttttacaacactgtgtgactatgaatacgcctgtggagaagctaacagactactgtaagaagttaaaggaagtccagatgcactcctttcctctgcagttcaccctccattgtgctttactcgccaataaaactgatttggcaaaagccttaatgaaggctgtgaaggaggaaggttttcctatcagacctcactatttctggccattgctagttggacgtcggaaggaaaaaaatgttcaaggtataattgaaatcctcaaaggaatgcaagaattgggagtacatcctgatcaggaaacatatacagattatgtgattccatgctttgatagtgtaaactcagcacgagccattttgcaggaaaatggatgtctgtctgatagtgatatgttttctcaagctggattgagaagtgaagcagcaaatgggaacttagactttgtattatcatttttgaaatcaaatacattgcccatctcgctgcagtctataagaagtagcctactgctaggcttcaggaggtctatgaatataaatctttggagcgagataacagaattgttgtacaaggatggacgttattgccaggagcctcgaggaccgacggaagctgttggctattttctttataacttgattgacagcatgagtgactcagaggtacaggccaaggaggagcatttgagacaatacttccatcagctggagaagatgaatgtaaaaattcctgaaaatatctacagaggcattcgtaatctcctggaaagctaccatgttcctgaattgattaaggatgctcacttgttggttgagagtaagaatttagactttcaaaaaactgtgcaacttacatcatctgaattggagtccacacttgaaacactaaaagctgaaaatcaacctataagagatgtcctaaagcaactcatattagtgctttgttcagaagagaatatgcaaaaagcccttgaattgaaagcaaaatatgaatccgacatggttactggtggctatgcagctttaataaatttatgctgtcgacatgataaagtagaagatgccttgaacttgaaagaagaatttgaccgcttagattcatctgctgtccttgacaccggcaagtatgtaggccttgtaagagtattggcaaagcatggcaagctccaagatgctattaacattctgaaggagatgaaagagaaggatgttcttatcaaagatacaacagccttgtcctttttccacatgctaaatggcgcagctttaagaggtgaaattgaaacagtaaaacagttgcatgaagccatcgtgactctagggttagcagaaccatccaccaacataagtttcccattggtcactgtacacttggaaaagggcgacctatctactgctcttgaggtcgccattgactgctatgaaaagtataaagtattaccaaggattcatgatgtcttgtgtaaactggtagagaaaggcgagactgatctaattcagaaagcaatggactttgtgagccaagaacaaggtgaaatggtgatgctctatgatctcttctttgccttcctacaaacaggaaattacaaagaggccaagaagatcattgagactccagggattagagctcgatctgcaaggcttcagtggttttgtgacagatgtgttgcaaataatcaggttgaaactctggaaaaattagtggagctgacacagaagctatttgaatgtgatagagaccagatgtactacaatctgctaaaactgtataaaataaacggtgactggcaaagagctgatgcagtctggaataaaatccaagaagaaaatgttattcctcgtgaaaagacattaagattattagcagaaatccttagagagggtaaccaggaagttccgtttgacgtacctgagttgtggtatgaagatgaaaaacattccctgaattcttcgtcagcctcaaccacagaacctgatttccagaaagatatattgattgcctgccgattgaaccaaaaaaaaggggcatatgatattttcctgaatgcaaaagagcaaaacattgtgtttaatgctgaaacctacagcaatctcattaaattactgatgtcagaagattattttacacaagcaatggaagtgaaagcattcgcggagacccacatcaagggcttcacactgaacgatgctgccaacagccgcctcatcataacgcaagttaggcgggattatttgaaagaggctgtgacaacactgaaaacagtattggatcagcagcagaccccttctaggttagcagtgacccgtgtcatccaggcattggccatgaagggtgatgttgaaaacatagaagtagttcagaagatgttaaatggactcgaagactccattggactttcaaaaatggttttcatcaataacattgctttggctcaaataaagaataataacatagatgccgcaatagaaaacattgaaaatatgcttacttcagagaataaagtcattgaaccccaatacttcggcttggcatacttattcagaaaagtaatagaggagcagttggaaccagcagttgaaaagataagcatcatggcggagagattggccaatcagtttgcaatttataaacctgtcactgattttttccttcaacttgtggatgcaggcaaggtggatgatgccagagctctcctacaggaattctaggaaacaaggaaaggtactgtgctttacctgcttacaaatcaatgatactgtacgtgccttgctcagaagtattgaatttaacataaaagcctgttgtttcaggaccttatttgagaatactatagagattcaagactttgcttgtctctacttagagtcagttttgtcgtctgttagctgtactggaaatgtaaaacaagttcacgcaggaattttccacttacacaggtatgcattgagagccccaagaaaaggcccttaaaaaatgcaagattaggctgggcatggtggctcacacctgtaatcccagcactttgggaggccgaggcgggtggatcacttgaggtcaggagtttcagagtttgagaccagcctggccagcatggcgaaacctggtctttacaaaaaaa

SEQ ID NO: 441287 - DNA, 1547 bp, Homo sapiens
aagtgtgtaacacttcagaatgttttaactgaattctttacaatttcatcaaccagttgtggcacctaaagatagggttgttatctctctacccttgggatctcataacttcttggtatggtcaccacttgacaaaagaagcaatgtgtttatcatattctagaaaaatattcatagaaatgtaagtggaattgcattaacctgtggaaaaatgctggtttcttttagctgtagattattgagtcaatatcaaatgctaatatacaagggacaatagtgcattaaatttaataggtagttctgttataattattgtgaaaatttttaatatagtgttgatttgtcagtgttctaattcactgttaatttgcggttttcataatattacctttatgtaatttcctaggcatcaactgtgaaatctgtgttagaattgattcctgaattaaatgaaaaggaagaagcatacaattccctcatgaaaagctatgtctcagagaaagatgtcacatctgctaaagcactgtatgaacatttgactgcaaagaatacaaaattggatgatctgtttctaaagcgttacgcatctttgctgaagtatgctggagagcctgtccctttcattgaaccccctgaaagctttgaattttatgcacagcagctaagaaaattgagggaaaactcttcttgaaataaccaggcgatactttgttttgtatatatttgtgattctgtgtctacatgttattttgaagtatatctgagggaaaaataaatgaaaattttctttatgtacttatgtatgtgtgatgcatgttcaaagtcttattgaccataactctgtgcacttggttattggacatttttggagtttttttctctgggaaaaatcgatagtgttttcttcaatgctgctgctgtgtgaagccatactttttcaggattcttcccctaattggctctttggtttccctgctctgtttcatttatttcattaaaatgttattcctttatttaagattcacttattagtctgctgtttctctgaaaaattttagagctaggtatagtgaccgtgaactttctaacgcataatattctgtgatacagccattccgtacatgtgtgaagtcctgcataactttcgaactttgttaaatgttggcactaggagtcatcagatctaggcttcatcattttccagtgagaagcagagacccaaagggcctgttacttgtgcttggtcaggggactgtctgtcatgcctggaggctcttcggcacacttccccatctttcccttctgccactgtggcttcaagcacctctgttcatagagcgtctctgaaattgagtctcggtcatgacttatcccgaagtagagcaatgtgtttcctctcattgtagtttcaggactttgtcagtacaagctctgccctaggcttgttactttatactcatatcctgaaaagatgtgatttcatctatgaaggggtaaaatattggtttgtatttaattgtttgaaataaaagtgatccctatattga

SEQ ID NO: 441288 - DNA, 1196 bp, Homo sapiens
agcggccgatactaatactaaatttgcggacgacagacctaggaaacaaggaagggcatcaactgtgaaatctgtgttagaattgattcctgaattaaatgaaaaggaagaagcatacaattccctcatgaaaagctatgtctcagagaaagatgtcacatctgctaaagcactgtatgaacatttgactgcaaagaatacaaaattggatgatctgtttctaaagcgttacgcatctttgctgaagtatgctggagagcctgtccctttcattgaaccccctgaaagctttgaattttatgcacagcagctaagaaaattgagggaaaactcttcttgaaataaccaggcgatactttgttttgtatatatttgtgattctgtgtctacatgttattttgaagtatatctgagggaaaaataaatgaaaattttctttatgtacttatgtatgtgtgatgcatgttcaaagtcttattgaccataactctgtgcacttggttattggacatttttggagtttttttctctgggaaaaatcgatagtgttttcttcaatgctgctgctgtgtgaagccatactttttcaggattcttcccctaattggctctttggtttccctgctctgtttcatttatttcattaaaatgttattcctttatttaagattcacttattagtctgctgtttctctgaaaaattttagagctaggtatagtgaccgtgaactttctaacgcataatattctgtgatacagccattccgtacatgtgtgaagtcctgcataactttcgaactttgttaaatgttggcactaggagtcatcagatctaggcttcatcattttccagtgagaagcagagacccaaagggcctgttacttgtgcttggtcaggggactgtctgtcatgcctggaggctcttcggcacacttccccatctttcccttctgccactgtggcttcaagcacctctgttcatagagcgtctctgaaattgagtctcggtcatgacttatcccgaagtagagcaatgtgtttcctctcattgtagtttcaggactttgtcagtacaagctctgccctaggcttgttactttatactcatatcctgaaaagatgtgatttcatctatgaaggggtaaaatattggtttgtatttaattgtttgaaataaaagtgatccctatattga

SEQ ID NO: 441289 - DNA, 3284 bp, Homo sapiens
ggtagaattcatttattttctaaagcgaggccccgcgtacgcgcttagggtggggacctgcgcgttcctttacactgttcccaggccctgataatccacatcctatcatgttgaacctgggaggcaaacggcaaggtgcaaaagacctccacggtttctccggcccgcgtttctgagagtgaagggccgttcctattggacatggcgtcagggctgaacgttagcagcaacatctgcactcgggggcgggggaaaccttcccacgtcctgggatcttcatagtcggctctcctcgagagttctcggtatttttactagttggcctcccacaagcctctgcgccaacctgggaggagttgacctcttgcggctctaccaacagaggagtgcaggggtgcagcgaatgaacacgatgcccagatcggagacggaagacggaaaagaaaagcttcgataatgaatcaagcaacatcgtttatgtaaatattacattgggtcttctgtcctcggagaagtgcggttttccatcttccaacctaaaacaatccgtcgctccccccacatttggcacgcccggcagttggtctctgccgcgccaggctaccctgcggtcacatgctcctcctgtccttctggcggagcgtgcttcccgctgcggggacgttcgagcaatggcagccctgctgagatccgcgcgttggttgctgcgtgccggggcggccccgcgcctcccgctctccctgcgcctcctccctggcggcccgggccggctgcatgccgcctcctatctgcccgccgctcgcgccgggcccgtggccggaggactactgagcccagccaggctgtatgccattgctgccaaagaaaaagatattcaagaggagtccactttttcttctaggaagatttccaatcagtttgattgggctctaatgagactagatctttctgttcgaagaactggccgcattccaaagaagcttctacaaaaagtttttaatgatacctgccgctcaggtggcctaggtggtagtcatgccttgcttctactacgtagttgtggttctctcttgcctgaactaaagcttgaagagagaacagaatttgctcataggatatgggacacacttcagaaattaggtgctgtgtatgatgtgagtcactataatgctttacttaaagtctatcttcaaaatgaatataaattctcaccaactgatttcctggcaaaaatggaggaagcaaacattcaaccaaatcgagtgacataccagagattgattgcttcttattgtaatgtaggagatattgaaggtgccagcaagattcttggatttatgaaaactaaggatctcccagttacagaggcagtattcagtgcccttgtgacagggcatgccagagctggtgatatggagaatgcagaaaacattctcacagtgatgagagatgccggaattgagcctggtccagacacatacctcgcattattgaatgcatatgctgagaagggcgacattgaccatgttaagcagactctggagaaggtggagaagtccgagcttcaccttatggaccgtgatttactgcaaattatttttagcttcagtaaagctgggtatcctcagtatgtctcagaaattttggaaaaagttacatgtgaaagaagatatattccagatgcaatgaacctcattttacttttagtcactgaaaaattggaagatgtagcgttgcaaattttactagcatgccccgtatcaaaggaagatggcccaagtgtctttggcagtttctttttacaacactgtgtgactatgaatacgcctgtggagaagctaacagactactgtaagaagttaaaggaagtccagatgcactcctttcctctgcagttcaccctccattgtgctttactcgccaataaaactgatttggcaaaagccttaatgaaggctgtgaaggaggaaggttttcctatcagacctcactatttctggccattgctagttggacgtcggaaggaaaaaaatgttcaaggtataattgaaatcctcaaaggaatgcaagaattgggagtacatcctgatcaggaaacatatacagattatgtgattccatgctttgatagtgtaaactcagcacgagccattttgcaggaaaatggatgtctgtctgatagtgatatgttttctcaagctggattgagaagtgaagcagcaaatgggaacttagactttgtattatcatttttgaaatcaaatacattgcccatctcgctgcagtctataagaagtagcctactgctaggcttcaggaggtctatgaatataaatctttggagcgagataacagaattgttgtacaaggatggacgttattgccaggagcctcgaggaccgacggaagctgttggctattttctttataacttgattgacagcatgagtgactcagaggtacaggccaaggaggagcatttgagacaatacttccatcagctggagaagatgaatgtaaaaattcctgaaaatatctacagaggcattcgtaatctcctggaaagctaccatgttcctgaattgattaaggatgctcacttgttggttgagagtaagaatttagactttcaaaaaactgtgcaacttacatcatctgaattggagtccacacttgaaacactaaaagctgaaaatcaacctataagagatgtcctaaagcaactcatattagtgctttgttcagaagagaatatgcaaaaagcccttgaattgaaagcaaaatatgaatccgacatggttactggtggctatgcagctttaataaatttatgctgtcgacatgataaagtagaagatgccttgaacttgaaagaagaatttgaccgcttagattcatctgctgtccttgacaccggcaagtatgtaggccttgtaagagtattggcaaagcatggcaagctccaagatgctattaacattctgaaggagatgaaagagaaggatgttcttatcaaagatacaacagccttgtcctttttccacatgctaaatggcgcagctttaagaggtgaaattgaaacagtaaaacagttgcatgaagccatcgtgactctagggttagcagaaccatccaccaacataagtttcccattggtcactgtacacttggaaaaggagagctgaatttgactgaaacgcagaaatatctcactgtggatgtagtgtgtatgttgtcctgttgatgccaggagaaaaataaaatatgtattttaacggttctca

SEQ ID NO: 441290 - DNA, 3343 bp, Homo sapiens
ggtagaattcatttattttctaaagcgaggccccgcgtacgcgcttagggtggggacctgcgcgttcctttacactgttcccaggccctgataatccacatcctatcatgttgaacctgggaggcaaacggcaaggtgcaaaagacctccacggtttctccggcccgcgtttctgagagtgaagggccgttcctattggacatggcgtcagggctgaacgttagcagcaacatctgcactcgggggcgggggaaaccttcccacgtcctgggatcttcatagtcggctctcctcgagagttctcggtatttttactagttggcctcccacaagcctctgcgccaacctgggaggagttgacctcttgcggctctaccaacagaggagtgcaggggtgcagcgaatgaacacgatgcccagatcggagacggaagacggaaaagaaaagcttcgataatgaatcaagcaacatcgtttatgtaaatattacattgggtcttctgtcctcggagaagtgcggttttccatcttccaacctaaaacaatccgtcgctccccccacatttggcacgcccggcagttggtctctgccgcgccaggctaccctgcggtcacatgctcctcctgtccttctggcggagcgtgcttcccgctgcggggacgttcgagcaatggcagccctgctgagatccgcgcgttggttgctgcgtgccggggcggccccgcgcctcccgctctccctgcgcctcctccctggcggcccgggccggctgcatgccgcctcctatctgcccgccgctcgcgccgggcccgtggccggaggactactgagcccagccaggctgtatgccattgctgccaaagaaaaagatattcaagaggagtccactttttcttctaggaagatttccaatcagtttgattgggctctaatgagactagatctttctgttcgaagaactggccgcattccaaagaagcttctacaaaaagtttttaatgatacctgccgctcaggtggcctaggtggtagtcatgccttgcttctactacgtagttgtggttctctcttgcctgaactaaagcttgaagagagaacagaatttgctcataggatatgggacacacttcagaaattaggtgctgtgtatgatgtgagtcactataatgctttacttaaagtctatcttcaaaatgaatataaattctcaccaactgatttcctggcaaaaatggaggaagcaaacattcaaccaaatcgagtgacataccagagattgattgcttcttattgtaatgtaggagatattgaaggtgccagcaagattcttggatttatgaaaactaaggatctcccagttacagaggcagtattcagtgcccttgtgacagggcatgccagagctggtgatatggagaatgcagaaaacattctcacagtgatgagagatgccggaattgagcctggtccagacacatacctcgcattattgaatgcatatgctgagaagggcgacattgaccatgttaagcagactctggagaaggtggagaagtccgagcttcaccttatggaccgtgatttactgcaaattatttttagcttcagtaaagctgggtatcctcagtatgtctcagaaattttggaaaaagttacatgtgaaagaagatatattccagatgcaatgaacctcattttacttttagtcactgaaaaattggaagatgtagcgttgcaaattttactagcatgccccgtatcaaaggaagatggcccaagtgtctttggcagtttctttttacaacactgtgtgactatgaatacgcctgtggagaagctaacagactactgtaagaagttaaaggaagtccagatgcactcctttcctctgcagttcaccctccattgtgctttactcgccaataaaactgatttggcaaaagccttaatgaaggctgtgaaggaggaaggttttcctatcagacctcactatttctggccattgctagttggacgtcggaaggaaaaaaatgttcaaggtataattgaaatcctcaaaggaatgcaagaattgggagtacatcctgatcaggaaacatatacagattatgtgattccatgctttgatagtgtaaactcagcacgagccattttgcaggaaaatggatgtctgtctgatagtgatatgttttctcaagctggattgagaagtgaagcagcaaatgggaacttagactttgtattatcatttttgaaatcaaatacattgcccatctcgctgcagtctataagaagtagcctactgctaggcttcaggaggtctatgaatataaatctttggagcgagataacagaattgttgtacaaggatggacgttattgccaggagcctcgaggaccgacggaagctgttggctattttctttataacttgattgacagcatgagtgactcagaggtacaggccaaggaggagcatttgagacaatacttcacttccccatctttcccttctgccactgtggcttcaagcacctctgttcatagagcgtctctgaaattgagtctcggtcatgacttatcccgaagtagagcaatgtgtttcctctcattgtagtttcaggactttgtcagtacaagctctgccctaggcttgttactttatactcatatcctgaaaagatgtgatttcatctatgaaggggtaaaatattggtttgtatttaattgtttgaaataaaagtgatccctatattgaatctcatgcctgttaatatctacactgtaagtagtgacttcaaaaaaattctaagataggtagtcaggagagtttgccattataaaaggtgtcttaataatatggaatattgacctaactggagatgaggtaattaattaccgaaatgttgaaaatgttttgagaactctccccattttggggtattccttgttcatttgaatttggtgactccctactgttccagtttcagtgccaacttgggtcacactgttcacatcaggggagaccttgccttggggacgtaggcgggcctcttgcaacttgtgctgttgaccttctgtcttgtggaactctctctcctgcatctgctacctgcccgcagatggtgtgagggagggttgatggcgggaagccaggaagtagatgtcatcatggtattggccaggcttttacttcaactcttttgtggcgttagatttaaggaagcagggggcatggccaacgttgagtctggcccagtggacatagtgcggctttcccttgagcactgcccagatgcaggacctgcacatgttacaggtttgccaaaagcatcttttttt

SEQ ID NO: 441291 - DNA, 6296 bp, Homo sapiens
ggtagaattcatttattttctaaagcgaggccccgcgtacgcgcttagggtggggacctgcgcgttcctttacactgttcccaggccctgataatccacatcctatcatgttgaacctgggaggcaaacggcaaggtgcaaaagacctccacggtttctccggcccgcgtttctgagagtgaagggccgttcctattggacatggcgtcagggctgaacgttagcagcaacatctgcactcgggggcgggggaaaccttcccacgtcctgggatcttcatagtcggctctcctcgagagttctcggtatttttactagttggcctcccacaagcctctgcgccaacctgggaggagttgacctcttgcggctctaccaacagaggagtgcaggggtgcagcgaatgaacacgatgcccagatcggagacggaagacggaaaagaaaagcttcgataatgaatcaagcaacatcgtttatgtaaatattacattgggtcttctgtcctcggagaagtgcggttttccatcttccaacctaaaacaatccgtcgctccccccacatttggcacgcccggcagttggtctctgccgcgccaggctaccctgcggtcacatgctcctcctgtccttctggcggagcgtgcttcccgctgcggggacgttcgagcaatggcagccctgctgagatccgcgcgttggttgctgcgtgccggggcggccccgcgcctcccgctctccctgcgcctcctccctggcggcccgggccggctgcatgccgcctcctatctgcccgccgctcgcgccgggcccgtggccggaggactactgagcccagccaggctgtatgccattgctgccaaagaaaaagatattcaagaggagtccactttttcttctaggaagatttccaatcagtttgattgggctctaatgagactagatctttctgttcgaagaactggccgcattccaaagaagcttctacaaaaagtttttaatgatacctgccgctcaggtggcctaggtggtagtcatgccttgcttctactacgtagttgtggttctctcttgcctgaactaaagcttgaagagagaacagaatttgctcataggatatgggacacacttcagaaattaggtgctgtgtatgatgtgagtcactataatgctttacttaaagtctatcttcaaaatgaatataaattctcaccaactgatttcctggcaaaaatggaggaagcaaacattcaaccaaatcgagtgacataccagagattgattgcttcttattgtaatgtaggagatattgaaggtgccagcaagattcttggatttatgaaaactaaggatctcccagttacagaggcagtattcagtgcccttgtgacagggcatgccagagctggtgatatggagaatgcagaaaacattctcacagtgatgagagatgccggaattgagcctggtccagacacatacctcgcattattgaatgcatatgctgagaagggcgacattgaccatgttaagcagactctggagaaggtggagaagtccgagcttcaccttatggaccgtgatttactgcaaattatttttagcttcagtaaagctgggtatcctcagtatgtctcagaaattttggaaaaagttacatgtgaaagaagatatattccagatgcaatgaacctcattttacttttagtcactgaaaaattggaagatgtagcgttgcaaattttactagcatgccccgtatcaaaggaagatggcccaagtgtctttggcagtttctttttacaacactgtgtgactatgaatacgcctgtggagaagctaacagactactgtaagaagttaaaggaagtccagatgcactcctttcctctgcagttcaccctccattgtgctttactcgccaataaaactgatttggcaaaagccttaatgaaggctgtgaaggaggaaggttttcctatcagacctcactatttctggccattgctagttggacgtcggaaggaaaaaaatgttcaaggtataattgaaatcctcaaaggaatgcaagaattgggagtacatcctgatcaggaaacatatacagattatgtgattccatgctttgatagtgtaaactcagcacgagccattttgcaggaaaatggatgtctgtctgatagtgatatgttttctcaagctggattgagaagtgaagcagcaaatgggaacttagactttgtattatcatttttgaaatcaaatacattgcccatctcgctgcagtctataagaagtagcctactgctaggcttcaggaggtctatgaatataaatctttggagcgagataacagaattgttgtacaaggatggacgttattgccaggagcctcgaggaccgacggaagctgttggctattttctttataacttgattgacagcatgagtgactcagaggtacaggccaaggaggagcatttgagacaatacttccatcagctggagaagatgaatgtaaaaattcctgaaaatatctacagaggcattcgtaatctcctggaaagctaccatgttcctgaattgattaaggatgctcacttgttggttgagagtaagaatttagactttcaaaaaactgtgcaacttacatcatctgaattggagtccacacttgaaacactaaaagctgaaaatcaacctataagagatgtcctaaagcaactcatattagtgctttgttcagaagagaatatgcaaaaagcccttgaattgaaagcaaaatatgaatccgacatggttactggtggctatgcagctttaataaatttatgctgtcgacatgataaagtagaagatgccttgaacttgaaagaagaatttgaccgcttagattcatctgctgtccttgacaccggcaagtatgtaggccttgtaagagtattggcaaagcatggcaagctccaagatgctattaacattctgaaggagatgaaagagaaggatgttcttatcaaagatacaacagccttgtcctttttccacatgctaaatggcgcagctttaagaggtgaaattgaaacagtaaaacagttgcatgaagccatcgtgactctagggttagcagaaccatccaccaacataagtttcccattggtcactgtacacttggaaaagggcgacctatctactgctcttgaggtcgccattgactgctatgaaaagtataaagtattaccaaggattcatgatgtcttgtgtaaactggtagagaaaggcgagactgatctaattcagaaagcaatggactttgtgagccaagaacaaggtgaaatggtgatgctctatgatctcttctttgccttcctacaaacaggaaattacaaagaggccaagaagatcattgagactccagggattagagctcgatctgcaaggcttcagtggttttgtgacagatgtgttgcaaataatcaggttgaaactctggaaaaattagtggagctgacacagaagctatttgaatgtgatagagaccagatgtactacaatctgctaaaactgtataaaataaacggtgactggcaaagagctgatgcagtctggaataaaatccaagaagaaaatgttattcctcgtgaaaagacattaagattattagcagaaatccttagagagggtaaccaggaagttccgtttgacgtacctgagttgtggtatgaagatgaaaaacattccctgaattcttcgtcagcctcaaccacagaacctgatttccagaaagatatattgattgcctgccgattgaaccaaaaaaaaggggcatatgatattttcctgaatgcaaaagagcaaaacattgtgtttaatgctgaaacctacagcaatctcattaaattactgatgtcagaagattattttacacaagcaatggaagtgaaagcattcgcggagacccacatcaagggcttcacactgaacgatgctgccaacagccgcctcatcataacgcaagttaggcgggattatttgaaagaggctgtgacaacactgaaaacagtattggatcagcagcagaccccttctaggttagcagtgacccgtgtcatccaggcattggccatgaagggtgatgttgaaaacatagaagtagttcagaagatgttaaatggactcgaagactccattggactttcaaaaatggttttcatcaataacattgctttggctcaaataaagaataataacatagatgccgcaatagaaaacattgaaaatatgcttacttcagagaataaagtcattgaaccccaatacttcggcttggcatacttattcagaaaagtaatagaggagcagttggaaccagcagttgaaaagataagcatcatggcggagagattggccaatcagtttgcaatttataaacctgtcactgattttttccttcaacttgtggatgcaggcaaggtggatgatgccagagctctcctacagagatgtggtgcaattgctgaacaaaccccgattttgttgttgttcctccttaggaattctaggaaacaaggaaaggcatcaactgtgaaatctgtgttagaattgattcctgaattaaatgaaaaggaagaagcatacaattccctcatgaaaagctatgtctcagagaaagatgtcacatctgctaaagcactgtatgaacatttgactgcaaagaatacaaaattggatgatctgtttctaaagcgttacgcatctttgctgaagtatgctggagagcctgtccctttcattgaaccccctgaaagctttgaattttatgcacagcagctaagaaaattgagggaaaactcttcttgaaataaccaggcgatactttgttttgtatatatttgtgattctgtgtctacatgttattttgaagtatatctgagggaaaaataaatgaaaattttctttatgtacttatgtatgtgtgatgcatgttcaaagtcttattgaccataactctgtgcacttggttattggacatttttggagtttttttctctgggaaaaatcgatagtgttttcttcaatgctgctgctgtgtgaagccatactttttcaggattcttcccctaattggctctttggtttccctgctctgtttcatttatttcattaaaatgttattcctttatttaagattcacttattagtctgctgtttctctgaaaaattttagagctaggtatagtgaccgtgaactttctaacgcataatattctgtgatacagccattccgtacatgtgtgaagtcctgcataactttcgaactttgttaaatgttggcactaggagtcatcagatctaggcttcatcattttccagtgagaagcagagacccaaagggcctgttacttgtgcttggtcaggggactgtctgtcatgcctggaggctcttcggcacacttccccatctttcccttctgccactgtggcttcaagcacctctgttcatagagcgtctctgaaattgagtctcggtcatgacttatcccgaagtagagcaatgtgtttcctctcattgtagtttcaggactttgtcagtacaagctctgccctaggcttgttactttatactcatatcctgaaaagatgtgatttcatctatgaaggggtaaaatattggtttgtatttaattgtttgaaataaaagtgatccctatattgaatctcatgcctgttaatatctacactgtaagtagtgacttcaaaaaaattctaagataggtagtcaggagagtttgccattataaaaggtgtcttaataatatggaatattgacctaactggagatgaggtaattaattaccgaaatgttgaaaatgttttgagaactctccccattttggggtattccttgttcatttgaatttggtgactccctactgttccagtttcagtgccaacttgggtcacactgttcacatcaggggagaccttgccttggggacgtaggcgggcctcttgcaacttgtgctgttgaccttctgtcttgtggaactctctctcctgcatctgctacctgcccgcagatggtgtgagggagggttgatggcgggaagccaggaagtagatgtcatcatggtattggccaggcttttacttcaactcttttgtggcgttagatttaaggaagcagggggcatggccaacgttgagtctggcccagtggacatagtgcggctttcccttgagcactgcccagatgcaggacctgcacatgttacaggtttgccaaaagcatcttttttt

SEQ ID NO: 441292 - DNA, 5637 bp, Homo sapiens
ggtagaattcatttattttctaaagcgaggccccgcgtacgcgcttagggtggggacctgcgcgttcctttacactgttcccaggccctgataatccacatcctatcatgttgaacctgggaggcaaacggcaaggtgcaaaagacctccacggtttctccggcccgcgtttctgagagtgaagggccgttcctattggacatggcgtcagggctgaacgttagcagcaacatctgcactcgggggcgggggaaaccttcccacgtcctgggatcttcatagtcggctctcctcgagagttctcggtatttttactagttggcctcccacaagcctctgcgccaacctgggaggagttgacctcttgcggctctaccaacagaggagtgcaggggtgcagcgaatgaacacgatgcccagatcggagacggaagacggaaaagaaaagcttcgataatgaatcaagcaacatcgtttatgtaaatattacattgggtcttctgtcctcggagaagtgcggttttccatcttccaacctaaaacaatccgtcgctccccccacatttggcacgcccggcagttggtctctgccgcgccaggctaccctgcggtcacatgctcctcctgtccttctggcggagcgtgcttcccgctgcggggacgttcgagcaatggcagccctgctgagatccgcgcgttggttgctgcgtgccggggcggccccgcgcctcccgctctccctgcgcctcctccctggcggcccgggccggctgcatgccgcctcctatctgcccgccgctcgcgccgggcccgtggccggaggactactgagcccagccaggctgtatgccattgctgccaaagaaaaagatattcaagaggagtccactttttcttctaggaagatttccaatcagtttgattgggctctaatgagactagatctttctgttcgaagaactggccgcattccaaagaagcttctacaaaaagtttttaatgatacctgccgctcaggtggcctaggtggtagtcatgccttgcttctactacgtagttgtggttctctcttgcctgaactaaagcttgaagagagaacagaatttgctcataggatatgggacacacttcagaaattaggtgctgtgtatgatgtgagtcactataatgctttacttaaagtctatcttcaaaatgaatataaattctcaccaactgatttcctggcaaaaatggaggaagcaaacattcaaccaaatcgagtgacataccagagattgattgcttcttattgtaatgtaggagatattgaaggtgccagcaagattcttggatttatgaaaactaaggatctcccagttacagaggcagtattcagtgcccttgtgacagggcatgccagagctggtgatatggagaatgcagaaaacattctcacagtgatgagagatgccggaattgagcctggtccagacacatacctcgcattattgaatgcatatgctgagaagggcgacattgaccatgttaagcagactctggagaaggtggagaagtccgagcttcaccttatggaccgtgatttactgcaaattatttttagcttcagtaaagctgggtatcctcagtatgtctcagaaattttggaaaaagttacatgtgaaagaagatatattccagatgcaatgaacctcattttacttttagtcactgaaaaattggaagatgtagcgttgcaaattttactagcatgccccgtatcaaaggaagatggcccaagtgtctttggcagtttctttttacaacactgtgtgactatgaatacgcctgtggagaagctaacagactactgtaagaagttaaaggaagtccagatgcactcctttcctctgcagttcaccctccattgtgctttactcgccaataaaactgatttggcaaaagccttaatgaaggctgtgaaggaggaaggttttcctatcagacctcactatttctggccattgctagttggacgtcggaaggaaaaaaatgttcaaggtataattgaaatcctcaaaggaatgcaagaattgggagtacatcctgatcaggaaacatatacagattatgtgattccatgctttgatagtgtaaactcagcacgagccattttgcaggaaaatggatgtctgtctgatagtgatatgttttctcaagctggattgagaagtgaagcagcaaatgggaacttagactttgtattatcatttttgaaatcaaatacattgcccatctcgctgcagtctataagaagtagcctactgctaggcttcaggaggtctatgaatataaatctttggagcgagataacagaattgttgtacaaggatggacgttattgccaggagcctcgaggaccgacggaagctgttggctattttctttataacttgattgacagcatgagtgactcagaggtacaggccaaggaggagcatttgagacaatacttccatcagctggagaagatgaatgtaaaaattcctgaaaatatctacagaggcattcgtaatctcctggaaagctaccatgttcctgaattgattaaggatgctcacttgttggttgagagtaagaatttagactttcaaaaaactgtgcaacttacatcatctgaattggagtccacacttgaaacactaaaagctgaaaatcaacctataagagatgtcctaaagcaactcatattagtgctttgttcagaagagaatatgcaaaaagcccttgaattgaaagcaaaatatgaatccgacatggttactggtggctatgcagctttaataaatttatgctgtcgacatgataaagtagaagatgccttgaacttgaaagaagaatttgaccgcttagattcatctgctgtccttgacaccggcaagtatgtaggccttgtaagagtattggcaaagcatggcaagctccaagatgctattaacattctgaaggagatgaaagagaaggatgttcttatcaaagatacaacagccttgtcctttttccacatgctaaatggcgcagctttaagaggtgaaattgaaacagtaaaacagttgcatgaagccatcgtgactctagggttagcagaaccatccaccaacataagtttcccattggtcactgtacacttggaaaagggcgacctatctactgctcttgaggtcgccattgactgctatgaaaagtataaagtattaccaaggattcatgatgtcttgtgtaaactggtagagaaaggcgagactgatctaattcagaaagcaatggactttgtgagccaagaacaaggtgaaatggtgatgctctatgatctcttctttgccttcctacaaacaggaaattacaaagaggccaagaagatcattgagactccagggattagagctcgatctgcaaggcttcagtggttttgtgacagatgtgttgcaaataatcaggttgaaactctggaaaaattagtggagctgacacagaagctatttgaatgtgatagagaccagatgtactacaatctgctaaaactgtataaaataaacggtgactggcaaagagctgatgcagtctggaataaaatccaagaagaaaatgttattcctcgtgaaaagacattaagattattagcagaaatccttagagagggtaaccaggaagttccgtttgacgtacctgagttgtggtatgaagatgaaaaacattccctgaattcttcgtcagcctcaaccacagaacctgatttccagaaagatatattgattgcctgccgattgaaccaaaaaaaaggggcatatgatattttcctgaatgcaaaagagcaaaacattgtgtttaatgctgaaacctacagcaatctcattaaattactgatgtcagaagattattttacacaagcaatggaagtgaaagcattcgcggagacccacatcaagggcttcacactgaacgatgctgccaacagccgcctcatcataacgcaagttaggcgggattatttgaaagaggctgtgacaacactgaaaacagtattggatcagcagcagaccccttctaggttagcagtgacccgtgtcatccaggcattggccatgaagggtgatgttgaaaacatagaagtagttcagaagatgttaaatggactcgaagactccattggactttcaaaaatggttttcatcaataacattgctttggctcaaataaagaataataacatagatgccgcaatagaaaacattgaaaatatgcttacttcagagaataaagtcattgaaccccaatacttcggcttggcatacttattcagaaaagtaatagaggagcagttggaaccagcagttgaaaagataagcatcatggcggagagattggccaatcagtttgcaatttataaacctgtcactgattttttccttcaacttgtggatgcaggcaaggtggatgatgccagagctctcctacaggcatcaactgtgaaatctgtgttagaattgattcctgaattaaatgaaaaggaagaagcatacaattccctcatgaaaagctatgtctcagagaaagatgtcacatctgctaaagcactgtatgaacatttgactgcaaagaatacaaaattggatgatctgtttctaaagcgttacgcatctttgctgaagtatgctggagagcctgtccctttcattgaaccccctgaaagctttgaattttatgcacagcagctaagaaaattgagggaaaactcttcttgaaataaccaggcgatactttgttttgtatatatttgtgattctgtgtctacatgttattttgaagtatatctgagggaaaaataaatgaaaattttctttatgtacttatgtatgtgtgatgcatgttcaaagtcttattgaccataactctgtgcacttggttattggacatttttggagtttttttctctgggaaaaatcgatagtgttttcttcaatgctgctgctgtgtgaagccatactttttcaggattcttcccctaattggctctttggtttccctgctctgtttcatttatttcattaaaatgttattcctttatttaagattcacttattagtctgctgtttctctgaaaaattttagagctaggtatagtgaccgtgaactttctaacgcataatattctgtgatacagccattccgtacatgtgtgaagtcctgcataactttcgaactttgttaaatgttggcactaggagtcatcagatctaggcttcatcattttccagtgagaagcagagacccaaagggcctgttacttgtgcttggtcaggggactgtctgtcatgcctggaggctcttcggcacacttccccatctttcccttctgccactgtggcttcaagcacctctgttcatagagcgtctctgaaattgagtctcggtcatgacttatcccgaagtagagcaatgtgtttcctctcattgtagtttcaggactttgtcagtacaagctctgccctaggcttgttactttatactcatatcctgaaaagatgtgatttcatctatgaaggggtaaaatattggtttgtatttaattgtttgaaataaaagtgatccctatattga

SEQ ID NO: 441293 - DNA, 4960 bp, Homo sapiens
ggtagaattcatttattttctaaagcgaggccccgcgtacgcgcttagggtggggacctgcgcgttcctttacactgttcccaggccctgataatccacatcctatcatgttgaacctgggaggcaaacggcaaggtgcaaaagacctccacggtttctccggcccgcgtttctgagagtgaagggccgttcctattggacatggcgtcagggctgaacgttagcagcaacatctgcactcgggggcgggggaaaccttcccacgtcctgggatcttcatagtcggctctcctcgagagttctcggtatttttactagttggcctcccacaagcctctgcgccaacctgggaggagttgacctcttgcggctctaccaacagaggagtgcaggggtgcagcgaatgaacacgatgcccagatcggagacggaagacggaaaagaaaagcttcgataatgaatcaagcaacatcgtttatgtaaatattacattgggtcttctgtcctcggagaagtgcggttttccatcttccaacctaaaacaatccgtcgctccccccacatttggcacgcccggcagttggtctctgccgcgccaggctaccctgcggtcacatgctcctcctgtccttctggcggagcgtgcttcccgctgcggggacgttcgagcaatggcagccctgctgagatccgcgcgttggttgctgcgtgccggggcggccccgcgcctcccgctctccctgcgcctcctccctggcggcccgggccggctgcatgccgcctcctatctgcccgccgctcgcgccgggcccgtggccggaggactactgagcccagccaggctgtatgccattgctgccaaagaaaaagatattcaagaggagtccactttttcttctaggaagatttccaatcagtttgattgggctctaatgagactagatctttctgttcgaagaactggccgcattccaaagaagcttctacaaaaagtttttaatgatacctgccgctcaggtggcctaggtggtagtcatgccttgcttctactacgtagttgtggttctctcttgcctgaactaaagcttgaagagagaacagaatttgctcataggatatgggacacacttcagaaattaggtgctgtgtatgatgtgagtcactataatgctttacttaaagtctatcttcaaaatgaatataaattctcaccaactgatttcctggcaaaaatggaggaagcaaacattcaaccaaatcgagtgacataccagagattgattgcttcttattgtaatgtaggagatattgaaggtgccagcaagattcttggatttatgaaaactaaggatctcccagttacagaggcagtattcagtgcccttgtgacagggcatgccagagctggtgatatggagaatgcagaaaacattctcacagtgatgagagatgccggaattgagcctggtccagacacatacctcgcattattgaatgcatatgctgagaagggcgacattgaccatgttaagcagactctggagaaggtggagaagtccgagcttcaccttatggaccgtgatttactgcaaattatttttagcttcagtaaagctgggtatcctcagtatgtctcagaaattttggaaaaagttacatgtgaaagaagatatattccagatgcaatgaacctcattttacttttagtcactgaaaaattggaagatgtagcgttgcaaattttactagcatgccccgtatcaaaggaagatggcccaagtgtctttggcagtttctttttacaacactgtgtgactatgaatacgcctgtggagaagctaacagactactgtaagaagttaaaggaagtccagatgcactcctttcctctgcagttcaccctccattgtgctttactcgccaataaaactgatttggcaaaagccttaatgaaggctgtgaaggaggaaggttttcctatcagacctcactatttctggccattgctagttggacgtcggaaggaaaaaaatgttcaaggtataattgaaatcctcaaaggaatgcaagaattgggagtacatcctgatcaggaaacatatacagattatgtgattccatgctttgatagtgtaaactcagcacgagccattttgcaggaaaatggatgtctgtctgatagtgatatgttttctcaagctggattgagaagtgaagcagcaaatgggaacttagactttgtattatcatttttgaaatcaaatacattgcccatctcgctgcagtctataagaagtagcctactgctaggcttcaggaggtctatgaatataaatctttggagcgagataacagaattgttgtacaaggatggacgttattgccaggagcctcgaggaccgacggaagctgttggctattttctttataacttgattgacagcatgagtgactcagaggtacaggccaaggaggagcatttgagacaatacttccatcagctggagaagatgaatgtaaaaattcctgaaaatatctacagaggcattcgtaatctcctggaaagctaccatgttcctgaattgattaaggatgctcacttgttggttgagagtaagaatttagactttcaaaaaactgtgcaacttacatcatctgaattggagtccacacttgaaacactaaaagctgaaaatcaacctataagagatgtcctaaagcaactcatattagtgctttgttcagaagagaatatgcaaaaagcccttgaattgaaagcaaaatatgaatccgacatggttactggtggctatgcagctttaataaatttatgctgtcgacatgataaagtagaagatgccttgaacttgaaagaagaatttgaccgcttagattcatctgctgtccttgacaccggcaagtatgtaggccttgtaagagtattggcaaagcatggcaagctccaagatgctattaacattctgaaggagatgaaagagaaggatgttcttatcaaagatacaacagccttgtcctttttccacatgctaaatggcgcagctttaagaggtgaaattgaaacagtaaaacagttgcatgaagccatcgtgactctagggttagcagaaccatccaccaacataagtttcccattggtcactgtacacttggaaaagggcgacctatctactgctcttgaggtcgccattgactgctatgaaaagtataaagtattaccaaggattcatgatgtcttgtgtaaactggtagagaaaggcgagactgatctaattcagaaagcaatggactttgtgagccaagaacaaggtgaaatggtgatgctctatgatctcttctttgccttcctacaaacaggaaattacaaagaggccaagaagatcattgagactccagggattagagctcgatctgcaaggcttcagtggttttgtgacagatgtgttgcaaataatcaggttgaaactctggaaaaattagtggagctgacacagaagctatttgaatgtgatagagaccagatgtactacaatctgctaaaactgtataaaataaacggtgactggcaaagagctgatgcagtctggaataaaatccaagaagaaaatgttattcctcgtgaaaagacattaagattattagcagaaatccttagagagggtaaccaggaagttccgtttgacgtacctgagttgtggtatgaagatgaaaaacattccctgaattcttcgtcagcctcaaccacagaacctgatttccagaaagatatattgattgcctgccgattgaaccaaaaaaaaggggcatatgatattttcctgaatgcaaaagagcaaaacattgtgtttaatgctgaaacctacagcaatctcattaaattactgatgtcagaagattattttacacaagcaatggaagtgaaagcattcgcggagacccacatcaagggcttcacactgaacgatgctgccaacagccgcctcatcataacgcaagttaggcgggattatttgaaagaggctgtgacaacactgaaaacagtattggatcagcagcagaccccttctaggttagcagtgacccgtgtcatccaggcattggccatgaagggtgatgttgaaaacatagaagtagttcagaagatgttaaatggactcgaagactccattggactttcaaaaatggttttcatcaataacattgctttggctcaaataaagaataataacatagatgccgcaatagaaaacattgaaaatatgcttacttcagagaataaagtcattgaaccccaatacttcggcttggcatacttattcagaaaagtaatagaggagcagttggaaccagcagttgaaaagataagcatcatggcggagagattggccaatcagtttgcaatttataaacctgtcactgattttttccttcaacttgtggatgcaggcaaggtggatgatgccagagctctcctacagagatgtggtgcaattgctgaacaaaccccgattttgttgttgttcctccttaggaattctaggaaacaaggaaaggcatcaactgtgaaatctgtgttagaattgattcctgaattaaatgaaaaggaagaagcatacaattccctcatgaaaagctatgtctcagagaaagatgtcacatctgctaaagcactgtatgaacatttgactgcaaagaatacaaaattggatgatctgtttctaaagcgttacgcatctttgctgaagtatgctggagagcctgtccctttcattgaaccccctgaaagctttgaattttatgcacagcagctaagaaaattgagggaaaactcttcttgaaataaccaggcgatactttgttttgtatatatttgtgattctgtgtctacatgttattttgaagtatatctgagggaaaaataaatgaaaattttctttatgta

SEQ ID NO: 441294 - DNA, 4968 bp, Homo sapiens
ggtagaattcatttattttctaaagcgaggccccgcgtacgcgcttagggtggggacctgcgcgttcctttacactgttcccaggccctgataatccacatcctatcatgttgaacctgggaggcaaacggcaaggtgcaaaagacctccacggtttctccggcccgcgtttctgagagtgaagggccgttcctattggacatggcgtcagggctgaacgttagcagcaacatctgcactcgggggcgggggaaaccttcccacgtcctgggatcttcatagtcggctctcctcgagagttctcggtatttttactagttggcctcccacaagcctctgcgccaacctgggaggagttgacctcttgcggctctaccaacagaggagtgcaggggtgcagcgaatgaacacgatgcccagatcggagacggaagacggaaaagaaaagcttcgataatgaatcaagcaacatcgtttatgtaaatattacattgggtcttctgtcctcggagaagtgcggttttccatcttccaacctaaaacaatccgtcgctccccccacatttggcacgcccggcagttggtctctgccgcgccaggctaccctgcggtcacatgctcctcctgtccttctggcggagcgtgcttcccgctgcggggacgttcgagcaatggcagccctgctgagatccgcgcgttggttgctgcgtgccggggcggccccgcgcctcccgctctccctgcgcctcctccctggcggcccgggccggctgcatgccgcctcctatctgcccgccgctcgcgccgggcccgtggccggaggactactgagcccagccaggctgtatgccattgctgccaaagaaaaagatattcaagaggagtccactttttcttctaggaagatttccaatcagtttgattgggctctaatgagactagatctttctgttcgaagaactggccgcattccaaagaagcttctacaaaaagtttttaatgatacctgccgctcaggtggcctaggtggtagtcatgccttgcttctactacgtagttgtggttctctcttgcctgaactaaagcttgaagagagaacagaatttgctcataggatatgggacacacttcagaaattaggtgctgtgtatgatgtgagtcactataatgctttacttaaagtctatcttcaaaatgaatataaattctcaccaactgatttcctggcaaaaatggaggaagcaaacattcaaccaaatcgagtgacataccagagattgattgcttcttattgtaatgtaggagatattgaaggtgccagcaagattcttggatttatgaaaactaaggatctcccagttacagaggcagtattcagtgcccttgtgacagggcatgccagagctggtgatatggagaatgcagaaaacattctcacagtgatgagagatgccggaattgagcctggtccagacacatacctcgcattattgaatgcatatgctgagaagggcgacattgaccatgttaagcagactctggagaaggtggagaagtccgagcttcaccttatggaccgtgatttactgcaaattatttttagcttcagtaaagctgggtatcctcagtatgtctcagaaattttggaaaaagttacatgtgaaagaagatatattccagatgcaatgaacctcattttacttttagtcactgaaaaattggaagatgtagcgttgcaaattttactagcatgccccgtatcaaaggaagatggcccaagtgtctttggcagtttctttttacaacactgtgtgactatgaatacgcctgtggagaagctaacagactactgtaagaagttaaaggaagtccagatgcactcctttcctctgcagttcaccctccattgtgctttactcgccaataaaactgatttggcaaaagccttaatgaaggctgtgaaggaggaaggttttcctatcagacctcactatttctggccattgctagttggacgtcggaaggaaaaaaatgttcaaggtataattgaaatcctcaaaggaatgcaagaattgggagtacatcctgatcaggaaacatatacagattatgtgattccatgctttgatagtgtaaactcagcacgagccattttgcaggaaaatggatgtctgtctgatagtgatatgttttctcaagctggattgagaagtgaagcagcaaatgggaacttagactttgtattatcatttttgaaatcaaatacattgcccatctcgctgcagtctataagaagtagcctactgctaggcttcaggaggtctatgaatataaatctttggagcgagataacagaattgttgtacaaggatggacgttattgccaggagcctcgaggaccgacggaagctgttggctattttctttataacttgattgacagcatgagtgactcagaggtacaggccaaggaggagcatttgagacaatacttccatcagctggagaagatgaatgtaaaaattcctgaaaatatctacagaggcattcgtaatctcctggaaagctaccatgttcctgaattgattaaggatgctcacttgttggttgagagtaagaatttagactttcaaaaaactgtgcaacttacatcatctgaattggagtccacacttgaaacactaaaagctgaaaatcaacctataagagatgtcctaaagcaactcatattagtgctttgttcagaagagaatatgcaaaaagcccttgaattgaaagcaaaatatgaatccgacatggttactggtggctatgcagctttaataaatttatgctgtcgacatgataaagtagaagatgccttgaacttgaaagaagaatttgaccgcttagattcatctgctgtccttgacaccggcaagtatgtaggccttgtaagagtattggcaaagcatggcaagctccaagatgctattaacattctgaaggagatgaaagagaaggatgttcttatcaaagatacaacagccttgtcctttttccacatgctaaatggcgcagctttaagaggtgaaattgaaacagtaaaacagttgcatgaagccatcgtgactctagggttagcagaaccatccaccaacataagtttcccattggtcactgtacacttggaaaagggcgacctatctactgctcttgaggtcgccattgactgctatgaaaagtataaagtattaccaaggattcatgatgtcttgtgtaaactggtagagaaaggcgagactgatctaattcagaaagcaatggactttgtgagccaagaacaaggtgaaatggtgatgctctatgatctcttctttgccttcctacaaacaggaaattacaaagaggccaagaagatcattgagactccagggattagagctcgatctgcaaggcttcagtggttttgtgacagatgtgttgcaaataatcaggttgaaactctggaaaaattagtggagctgacacagaagctatttgaatgtgatagagaccagatgtactacaatctgctaaaactgtataaaataaacggtgactggcaaagagctgatgcagtctggaataaaatccaagaagaaaatgttattcctcgtgaaaagacattaagattattagcagaaatccttagagagggtaaccaggaagttccgtttgacgtacctgagttgtggtatgaagatgaaaaacattccctgaattcttcgtcagcctcaaccacagaacctgatttccagaaagatatattgattgcctgccgattgaaccaaaaaaaaggggcatatgatattttcctgaatgcaaaagagcaaaacattgtgtttaatgctgaaacctacagcaatctcattaaattactgatgtcagaagattattttacacaagcaatggaagtgaaagcattcgcggagacccacatcaagggcttcacactgaacgatgctgccaacagccgcctcatcataacgcaagttaggcgggattatttgaaagaggctgtgacaacactgaaaacagtattggatcagcagcagaccccttctaggttagcagtgacccgtgtcatccaggcattggccatgaagggtgatgttgaaaacatagaagtagttcagaagatgttaaatggactcgaagactccattggactttcaaaaatggttttcatcaataacattgctttggctcaaataaagaataataacatagatgccgcaatagaaaacattgaaaatatgcttacttcagagaataaagtcattgaaccccaatacttcggcttggcatacttattcagaaaagtaatagaggagcagttggaaccagcagttgaaaagataagcatcatggcggagagattggccaatcagtttgcaatttataaacctgtcactgattttttccttcaacttgtggatgcaggcaaggtggatgatgccagagctctcctacagagatgtggtgcaattgctgaacaaaccccgattttgttgttgttcctccttaggaattctaggaaacaaggaaaggtactgtgctttacctgcttacaaatcaatgatactgtacgtgccttgctcagaagtattgaatttaacataaaagcctgttgtttcaggaccttatttgagaatactatagagattcaagactttgcttgtctctacttagagtcagttttgtcgtctgttagctgtactggaaatgtaaaacaagttcacgcaggaattttccacttacacaggtatgcattgagagccccaagaaaaggcccttaaaaaatgcaagattaggctgggcatggtggctcacacctgtaatcccagcactttgggaggccgaggcgggtggatcacttgaggtcaggagtttcagagtttgagaccagcctggccagcatggcgaaacctggtctttacaaaaaaa

SEQ ID NO: 441295 - DNA, 4567 bp, Homo sapiens
ggtagaattcatttattttctaaagcgaggccccgcgtacgcgcttagggtggggacctgcgcgttcctttacactgttcccaggccctgataatccacatcctatcatgttgaacctgggaggcaaacggcaaggtgcaaaagacctccacggtttctccggcccgcgtttctgagagtgaagggccgttcctattggacatggcgtcagggctgaacgttagcagcaacatctgcactcgggggcgggggaaaccttcccacgtcctgggatcttcatagtcggctctcctcgagagttctcggtatttttactagttggcctcccacaagcctctgcgccaacctgggaggagttgacctcttgcggctctaccaacagaggagtgcaggggtgcagcgaatgaacacgatgcccagatcggagacggaagacggaaaagaaaagcttcgataatgaatcaagcaacatcgtttatgtaaatattacattgggtcttctgtcctcggagaagtgcggttttccatcttccaacctaaaacaatccgtcgctccccccacatttggcacgcccggcagttggtctctgccgcgccaggctaccctgcggtcacatgctcctcctgtccttctggcggagcgtgcttcccgctgcggggacgttcgagcaatggcagccctgctgagatccgcgcgttggttgctgcgtgccggggcggccccgcgcctcccgctctccctgcgcctcctccctggcggcccgggccggctgcatgccgcctcctatctgcccgccgctcgcgccgggcccgtggccggaggactactgagcccagccaggctgtatgccattgctgccaaagaaaaagatattcaagaggagtccactttttcttctaggaagatttccaatcagtttgattgggctctaatgagactagatctttctgttcgaagaactggccgcattccaaagaagcttctacaaaaagtttttaatgatacctgccgctcaggtggcctaggtggtagtcatgccttgcttctactacgtagttgtggttctctcttgcctgaactaaagcttgaagagagaacagaatttgctcataggatatgggacacacttcagaaattaggtgctgtgtatgatgtgagtcactataatgctttacttaaagtctatcttcaaaatgaatataaattctcaccaactgatttcctggcaaaaatggaggaagcaaacattcaaccaaatcgagtgacataccagagattgattgcttcttattgtaatgtaggagatattgaaggtgccagcaagattcttggatttatgaaaactaaggatctcccagttacagaggcagtattcagtgcccttgtgacagggcatgccagagctggtgatatggagaatgcagaaaacattctcacagtgatgagagatgccggaattgagcctggtccagacacatacctcgcattattgaatgcatatgctgagaagggcgacattgaccatgttaagcagactctggagaaggtggagaagtccgagcttcaccttatggaccgtgatttactgcaaattatttttagcttcagtaaagctgggtatcctcagtatgtctcagaaattttggaaaaagttacatgtgaaagaagatatattccagatgcaatgaacctcattttacttttagtcactgaaaaattggaagatgtagcgttgcaaattttactagcatgccccgtatcaaaggaagatggcccaagtgtctttggcagtttctttttacaacactgtgtgactatgaatacgcctgtggagaagctaacagactactgtaagaagttaaaggaagtccagatgcactcctttcctctgcagttcaccctccattgtgctttactcgccaataaaactgatttggcaaaagccttaatgaaggctgtgaaggaggaaggttttcctatcagacctcactatttctggccattgctagttggacgtcggaaggaaaaaaatgttcaaggtataattgaaatcctcaaaggaatgcaagaattgggagtacatcctgatcaggaaacatatacagattatgtgattccatgctttgatagtgtaaactcagcacgagccattttgcaggaaaatggatgtctgtctgatagtgatatgttttctcaagctggattgagaagtgaagcagcaaatgggaacttagactttgtattatcatttttgaaatcaaatacattgcccatctcgctgcagtctataagaagtagcctactgctaggcttcaggaggtctatgaatataaatctttggagcgagataacagaattgttgtacaaggatggacgttattgccaggagcctcgaggaccgacggaagctgttggctattttctttataacttgattgacagcatgagtgactcagaggtacaggccaaggaggagcatttgagacaatacttccatcagctggagaagatgaatgtaaaaattcctgaaaatatctacagaggcattcgtaatctcctggaaagctaccatgttcctgaattgattaaggatgctcacttgttggttgagagtaagaatttagactttcaaaaaactgtgcaacttacatcatctgaattggagtccacacttgaaacactaaaagctgaaaatcaacctataagagatgtcctaaagcaactcatattagtgctttgttcagaagagaatatgcaaaaagcccttgaattgaaagcaaaatatgaatccgacatggttactggtggctatgcagctttaataaatttatgctgtcgacatgataaagtagaagatgccttgaacttgaaagaagaatttgaccgcttagattcatctgctgtccttgacaccggcaagtatgtaggccttgtaagagtattggcaaagcatggcaagctccaagatgctattaacattctgaaggagatgaaagagaaggatgttcttatcaaagatacaacagccttgtcctttttccacatgctaaatggcgcagctttaagaggtgaaattgaaacagtaaaacagttgcatgaagccatcgtgactctagggttagcagaaccatccaccaacataagtttcccattggtcactgtacacttggaaaagggcgacctatctactgctcttgaggtcgccattgactgctatgaaaagtataaagtattaccaaggattcatgatgtcttgtgtaaactggtagagaaaggcgagactgatctaattcagaaagcaatggactttgtgagccaagaacaaggtgaaatggtgatgctctatgatctcttctttgccttcctacaaacaggaaattacaaagaggccaagaagatcattgagactccagggattagagctcgatctgcaaggcttcagtggttttgtgacagatgtgttgcaaataatcaggttgaaactctggaaaaattagtggagctgacacagaagctatttgaatgtgatagagaccagatgtactacaatctgctaaaactgtataaaataaacggtgactggcaaagagctgatgcagtctggaataaaatccaagaagaaaatgttattcctcgtgaaaagacattaagattattagcagaaatccttagagagggtaaccaggaagttccgtttgacgtacctgagttgtggtatgaagatgaaaaacattccctgaattcttcgtcagcctcaaccacagaacctgatttccagaaagatatattgattgcctgccgattgaaccaaaaaaaaggggcatatgatattttcctgaatgcaaaagagcaaaacattgtgtttaatgctgaaacctacagcaatctcattaaattactgatgtcagaagattattttacacaagcaatggaagtgaaagcattcgcggagacccacatcaagggcttcacactgaacgatgctgccaacagccgcctcatcataacgcaagttaggcgggattatttgaaagaggctgtgacaacactgaaaacagtattggatcagcagcagaccccttctaggttagcagtgacccgtgtcatccaggcattggccatgaagggtgatgttgaaaacatagaagtatcctgcataactttcgaactttgttaaatgttggcactaggagtcatcagatctaggcttcatcattttccagtgagaagcagagacccaaagggcctgttacttgtgcttggtcaggggactgtctgtcatgcctggaggctcttcggcacacttccccatctttcccttctgccactgtggcttcaagcacctctgttcatagagcgtctctgaaattgagtctcggtcatgacttatcccgaagtagagcaatgtgtttcctctcattgtagtttcaggactttgtcagtacaagctctgccctaggcttgttactttatactcatatcctgaaaagatgtgatttcatctatgaaggggtaaaatattggtttgtatttaattgtttgaaataaaagtgatccctatattga

SEQ ID NO: 441296 - DNA, 3957 bp, Homo sapiens
ggtagaattcatttattttctaaagcgaggccccgcgtacgcgcttagggtggggacctgcgcgttcctttacactgttcccaggccctgataatccacatcctatcatgttgaacctgggaggcaaacggcaaggtgcaaaagacctccacggtttctccggcccgcgtttctgagagtgaagggccgttcctattggacatggcgtcagggctgaacgttagcagcaacatctgcactcgggggcgggggaaaccttcccacgtcctgggatcttcatagtcggctctcctcgagagttctcggtatttttactagttggcctcccacaagcctctgcgccaacctgggaggagttgacctcttgcggctctaccaacagaggagtgcaggggtgcagcgaatgaacacgatgcccagatcggagacggaagacggaaaagaaaagcttcgataatgaatcaagcaacatcgtttatgtaaatattacattgggtcttctgtcctcggagaagtgcggttttccatcttccaacctaaaacaatccgtcgctccccccacatttggcacgcccggcagttggtctctgccgcgccaggctaccctgcggtcacatgctcctcctgtccttctggcggagcgtgcttcccgctgcggggacgttcgagcaatggcagccctgctgagatccgcgcgttggttgctgcgtgccggggcggccccgcgcctcccgctctccctgcgcctcctccctggcggcccgggccggctgcatgccgcctcctatctgcccgccgctcgcgccgggcccgtggccggaggactactgagcccagccaggctgtatgccattgctgccaaagaaaaagatattcaagaggagtccactttttcttctaggaagatttccaatcagtttgattgggctctaatgagactagatctttctgttcgaagaactggccgcattccaaagaagcttctacaaaaagtttttaatgatacctgccgctcaggtggcctaggtggtagtcatgccttgcttctactacgtagttgtggttctctcttgcctgaactaaagcttgaagagagaacagaatttgctcataggatatgggacacacttcagaaattaggtgctgtgtatgatgtgagtcactataatgctttacttaaagtctatcttcaaaatgaatataaattctcaccaactgatttcctggcaaaaatggaggaagcaaacattcaaccaaatcgagtgacataccagagattgattgcttcttattgtaatgtaggagatattgaaggtgccagcaagattcttggatttatgaaaactaaggatctcccagttacagaggcagtattcagtgcccttgtgacagggcatgccagagctggtgatatggagaatgcagaaaacattctcacagtgatgagagatgccggaattgagcctggtccagacacatacctcgcattattgaatgcatatgctgagaagggcgacattgaccatgttaagcagactctggagaaggtggagaagtccgagcttcaccttatggaccgtgatttactgcaaattatttttagcttcagtaaagctgggtatcctcagtatgtctcagaaattttggaaaaagttacatgtgaaagaagatatattccagatgcaatgaacctcattttacttttagtcactgaaaaattggaagatgtagcgttgcaaattttactagcatgccccgtatcaaaggaagatggcccaagtgtctttggcagtttctttttacaacactgtgtgactatgaatacgcctgtggagaagctaacagactactgtaagaagttaaaggaagtccagatgcactcctttcctctgcagttcaccctccattgtgctttactcgccaataaaactgatttggcaaaagccttaatgaaggctgtgaaggaggaaggttttcctatcagacctcactatttctggccattgctagttggacgtcggaaggaaaaaaatgttcaaggtataattgaaatcctcaaaggaatgcaagaattgggagtacatcctgatcaggaaacatatacagattatgtgattccatgctttgatagtgtaaactcagcacgagccattttgcaggaaaatggatgtctgtctgatagtgatatgttttctcaagctggattgagaagtgaagcagcaaatgggaacttagactttgtattatcatttttgaaatcaaatacattgcccatctcgctgcagtctataagaagtagcctactgctaggcttcaggaggtctatgaatataaatctttggagcgagataacagaattgttgtacaaggatggacgttattgccaggagcctcgaggaccgacggaagctgttggctattttctttataacttgattgacagcatgagtgactcagaggtacaggccaaggaggagcatttgagacaatacttccatcagctggagaagatgaatgtaaaaattcctgaaaatatctacagaggcattcgtaatctcctggaaagctaccatgttcctgaattgattaaggatgctcacttgttggttgagagtaagaatttagactttcaaaaaactgtgcaacttacatcatctgaattggagtccacacttgaaacactaaaagctgaaaatcaacctataagagatgtcctaaagcaactcatattagtgctttgttcagaagagaatatgcaaaaagcccttgaattgaaagcaaaatatgaatccgacatggttactggtggctatgcagctttaataaatttatgctgtcgacatgataaagtagaagatgccttgaacttgaaagaagaatttgaccgcttagattcatctgctgtccttgacaccggcaagtatgtaggccttgtaagagtattggcaaagcatggcaagctccaagatgctattaacattctgaaggagatgaaagagaaggatgttcttatcaaagatacaacagccttgtcctttttccacatgctaaatggcgcagctttaagaggtgaaattgaaacagtaaaacagttgcatgaagccatcgtgactctagggttagcagaaccatccaccaacataagtttcccattggtcactgtacacttggaaaagggcgacctatctactgctcttgaggtcgccattgactgctatgaaaagtataaagtattaccaaggattcatgatgtcttgtgtaaactggtagagaaaggcgagactgatctaattcagaaagcaatggactttgtgagccaagaacaaggtgaaatggtgatgctctatgatctcttctttgccttcctacaaacaggaaattacaaagaggccaagaagatcattgagactccagggattagagctcgatctgcaaggcttcagtggttttgtgacagatgtgttgcaaataatcaggttgaaactctggaaaaattagtggagctgacacagaagctatttgaatgtgatagagaccagatgtactacaatctgctaaaactgtataaaataaacggtgactggcaaagagctgatgcagtctggaataaaatccaagaagaaaatgttattcctcgtgaaaagacattaagattattagcagaaatccttagagagggtaaccaggaagttccgtttgacgtacctgagttgtggtatgaagatgaaaaacattccctgaattcttcgtcagcctcaaccacagaacctgatttccagaaagatatattgattgcctgccgattgaaccaaaaaaaaggcaagcacatacggggatgggggtgtgtgtgggggggtggtcttctttctaatagcagtgtggggtgtaagcccaaccaattagaagtgctctaggatagagataggacttaaattttacatatttcttgtccccttc

SEQ ID NO: 441297 - DNA, 686 bp, Homo sapiens
tgctctagagatccccctcataaggggtgcccagaaaacattgaaaatatgcttacttcagagaataaagtcattgaaccccaatacttcggcttggcatacttattcagaaaagtaatagaggagcagttggaaccagcagttgaaaagataagcatcatggcggagagattggccaatcagtttgcaatttataaacctgtcactgattttttccttcaacttgtggatgcaggcaaggtggatgatgccagagctctcctacaggaattctaggaaacaaggaaaggtactgtgctttacctgcttacaaatcaatgatactgtacgtgccttgctcagaagtattgaatttaacataaaagcctgttgtttcaggaccttatttgagaatactatagagattcaagactttgcttgtctctacttagagtcagttttgtcgtctgttagctgtactggaaatgtaaaacaagttcacgcaggaattttccacttacacaggtatgcattgagagccccaagaaaaggcccttaaaaaatgcaagattaggctgggcatggtggctcacacctgtaatcccagcactttgggaggccgaggcgggtggatcacttgaggtcaggagtttcagagtttgagaccagcctggccagcatggcgaaacctggtctttacaaaaaaa

SEQ ID NO: 441298 - DNA, 10415 bp, Homo sapiens
cgcgcggaaaggattaaggcggtagtacgaggcctgggggtggcggctgtggcggggcccggcggggagcgggtccggagcaggctcccggacccaaaactgaagggggcgtctgaggcgtcagggagctccctcgcctggctctcggcggcctgatggagtaagaggggttggctgtgaatgtgtgacgttgagtgcttcagatctggtcactatggtacgagaacgaaaatgcatattatgccacatcgtgtacagctcaaaaaaggagatggacgaacacatgcggagcatgttgcatcacagggaacttgagaacctcaagggcagggacattagtcatgagtgccgagtgtgcggggtcacagaagtgggtctttctgcatatgcaaagcacatttctggccagttgcacaaagataacgttgatgcccaggaaagagaagatgatggaaaaggagaggaagaggaagaagattattttgacaaggaactcattcagttaataaaacaaaggaaagaacaaagtcgacaagatgaaccttccaatagcaaccaagaaataaactctgatgacagacgaccccaatggagacgagaagaccgaattccttaccaagacagagagagttacagtcagcctgcatggcatcatcgtggacctccacagcgggattggaaatgggaaaaagatggctttaataatactaggaaaaacagctttccacattctttgaggaatggtggtggaccaagaggacgttccgggtggcataagggtgttgcaggaggctcctcgacttggtttcacaaccatagtaattctggaggtggttggctttcaaatagtggagcagtagattggaatcataatggtacaggaaggaattccagttggctttctgaaggaacaggtggcttttccagttggcatatgaacaacagtaacggaaactggaaatccagtgtacgtagtacaaataattggaattacagtggccctggagacaaatttcaaccaggcagaaacagaaattctaactgtcaaatggaagacatgactatgctatggaacaagaaatctaataagtcaaacaaatacagtcacgacagatataattggcagcggcaagaaaatgacaaacttggtacagttgccacatatagaggtccttctgaaggatttacaagtgataaatttccttcagaaggcttactcgacttcaattttgagcagctggaaagccaaaccactaaacaagcagacactgctacttccaaagttagtggaaagaatggcagtgcggcaagggaaaagcctcgtcgctggacgccttacccttctcagaagactctggatttacagtcgggattgaaagacatcactggtaacaagtcagaaatgatagagaaacctctctttgattttagcttgataactacaggaatacaggagccccaaactgatgaaacacgtaattccccaacacagaaaacacaaaaagaaatacatactggatctcttaatcacaaggcctcttctgattccgctgcttccttcgaggtggtgagacagtgccccactgcagaaaaacctgaacaagagcatacaccaaataaaatgccatcattgaaatccccactccttccatgtccagccactaaatcattgtctcaaaagcaagatccaaagaatatctcaaaaaacaccaaaacaaattttttttcccctggagaacactcaaatccctcgaacaagcccactgtggaagataaccatggtccttacatatccaaactgcgtagttcatgtcctcatgttttaaaagggaataaaagtacatttggctctcaaaagcaatctggtgataatttaaatgatactttacgaaaggccaaagaggtgctacagtgtcatgagtcattgcaaaatccacttcttagcacttctaaaagtaccaggaactatgcaaaagcaagtagaaatgtagaagaatctgaaaaagggtctttgaaaattgagtttcaagtgcacgcactagaagatgaaagtgatggagagacatctgacacggaaaagcatggaacaaaaattggaaccctaggttctgcaactacagaattgttatctggcagcactcgaactgctgatgagaaagaggaggatgaccgcatcctgaagacttctagagagctatccacttccccatgtaatcccatagttcgccagaaagaatctgaattacaaatgacatctgcagccagtccacaccctggcttattgctagacttgaaaacctctctagaagatgcacaggttgatgactctattaaatctcatgtatcttatgaaacagaaggctttgagagtgctagcttggatgcagagcttcaaaaaagtgacatcagtcagccctcgggccctctcctgcctgaactaagtaagcttggctttcctgcctcacttcagagggatctaacccggcacattagtttgaagagcaaaactggagtacaccttcctgagccaaacctcaatagtgcccgccgcattcgcaatattagcggtcaccgaaagagtgagacagagaaggagtctgggctcaagccaaccctacggcagattctaaatgcatctcggagaaatgtcaactgggaacaggtcattcagcaagtaaccaagaaaaagcaagagctgggcaaaggcttacccaggtttggcatagaaatggtaccccttgttcaaaatgaacaagaagccttagatttggatggggaacctgatctgtccagtctagaaggattccagtgggaaggtgtttccatttcctcgtcccctggcttggcaagaaagcgaagcctttctgagagcagcgtgatcatggacagagctccttctgtgtatagcttcttcagtgaggaaggtacaggcaaagaaaatgagccccagcagatggtttcacctagtaactcattgagggctggacagagccagaaagcaaccatgcacctcaaacaagaagtgacacctcgggctgcctccctccgaacaggtgaaagggctgaaaatgttgctacccaaaggcgacatagtgcacaattatcctctgaccatataatacctttgatgcatttggcaaaagacttgaacagccaggagaggtctataccaccgtcagagaatcagaattcccaggagagtaatggagagggaaactgtctgtcatcaagcgcatcctcagcccttgcgatctccagtttagcggatgcagccacagatagtagctgtacctctggtgctgaacaaaatgatggccaaagtattagaaagaaacgaagagccactggagatggatcttctcctgaactcccaagtcttgagagaaaaaataaaagaaggaaaattaaaggaaaaaaagaacgttctcaggttgaccagctgctgaatatttctttaagggaggaagaacttagtaagtcattgcagtgcatggataacaatcttctgcaagcccgtgcagcccttcagacagcttatgtggaagttcagaggctacttatgctcaagcagcagataactatggagatgagtgcactgaggacccatagaatacagattctacagggattacaagaaacatatgaaccttctgagcacccagaccaggttccctgtagcctcacacgagaacgaaggaacagtagatctcaaacatccattgatgccgcactgctgcccactccctttttcccactttttctggagcctccatcttcccatgtgtctccatcacccaccggagcctctcttcaaataaccacgtctcctactttccaaacccatggcagtgtccctgctccagactcatcagttcagattaaacaagagcccatgtctcctgaacaagatgagaatgtgaatgctgtgccaccaagctctgcctgcaatgtgtccaaggaattactggaagctaatagagagatcagtgacagttgtccagtttatccagtcatcactgctagattgtccttaccagagtcaacagaaagtttccatgagcctagccaagaactgaagttttctgtggagcaaagaaataccagaaacagagaaaactctccctcttcccaatcagctggtctttctagcataaataaagaaggggaagagccaaccaaaggcaatagtgggtctgaagcctgtaccagttcttttctaagattgtcttttgcttcagaaacccctttggagaaggaaccccactctccagctgaccagcctgaacaacaggcagaatccactttgacatcagctgagactaggggaagcaagaaaaagaagaaactccggaagaagaaaagtctacgggctgcccatgttcctgagaatagtgacactgaacaggatgttttgactgttaaacctgtaaggaaagtaaaagctggaaagttaattaaaggggggaaagtaacaacctccacttgggaagacagcaggactggtcgggagcaggagagtgtcagagatgagccagatagtgactcgtctctggaagtcctagaaattcctaatcctcagttagaagtagtagccattgattcttcagaatcaggagaagagaaaccagacagcccatctaaaaaggatatttggaactctacagagcaaaacccactagaaacgtctcgttctgggtgtgatgaagttagctctaccagtgaaattggcactcgctataaagatggcatccctgtaagtgtggcagaaactcagactgtgatctcctccataaaaggatcaaagaattcttcagaaatatcttcagagccaggagatgatgatgaacccacagaaggaagctttgagggacaccaagctgccgtaaatgcaattcagatatttgggaacttgctatatacctgttcagcagataaaactgttcgggtttataatctggtgagtcggaaatgtattggtgtctttgagggtcatacctccaaagttaactgcctcctggttactcagacctccgggaagaatgctgccctttacaccgggtccagtgaccataccatccgctgctataatgttaagagccgagagtgtgtggagcagttacagctggaagaccgggtcctctgcctccacagtagatggcgaatcctctatgcgggactggcaaatggcactgtggtcaccttcaacataaagaacaacaaacgacttgagatctttgaatgccatggccctcgggcagtcagctgtcttgctacagctcaggaaggtgcccgaaaactgctggtcgtggggtcttatgactgcacaattagtgtacgcgatgcccggaatggactgctcctcagaactctggagggccatagcaaaaccattctttgcatgaaggtggtgaatgatctcgtgttcagtggctccagtgatcagtcagtccatgctcacaacattcacactggtgagctcgtgcggatctataaaggtcacaatcatgcagtgactgtggtgaatatcctaggaaaagtgatggtgactgcttgcctggataaatttgttcgtgtctatgaattacagtctcatgatcgattacaagtttatggaggacacaaagacatgattatgtgtatgaccatccataaaagcatgatttacactggctgttatgatggcagtattcaggccgtgaggcttaatctgatgcagaattaccgctgttggtggcatggttgctctctgatatttggcgttgtagatcatttaaaacaacacttgctgaccgaccacactaatcccaacttccagactctgaaatgtcgctggaagaactgcgatgcttttttcactgctaggaaaggatccaaacaggatgctgcaggacatattgaacgacatgctgaagatgacagcaaaattgattcatgaagttttttgcctcccacgttgggaagtcattagttgaactattttcacattggccccccacacaggccactctcttccctttcttggtgaagtaaggaaggagaaagtggttactagccaggcatacccctagcataagtctgggcagctctatgggatgataaattacacttttaagttcttgctggaggttttaaatagatttagacaaatgttaaggaaccatacttctctgggacagcatggcatatagtgatatatgctatttgcgttctccagatgtttattgaagatacagatcctaattggttacccagtttgaccctaatcatatgtatattttattgatttcagtttgcaatttttaatttatgttcttatgatggtttaaacctatagtcaggcttttaagtacaagtttgtttaagtgccagactttgaggatcagttttaatttctccatttgtaatagctgggtatttaaactggaagcaaatagttttctttcttaacaattatgtgcagtgtgtgtcactgttttcttgctttatagatagagctggctttaagtgctaaaggacacagtagatttttgacaaacagtggctgctctgctgactatcttttaggaattcaggaagcaaatcacatagtgacaagtccttacagacaccacttctagtaaatctctgtaaatgtggatagaaagctcagtgtgaggcagtgcgtagacctaacgtctacctttacatctgctgttgaacctgggcactacctgttacagatcctgtcaggctgttgaactggaggtgtacctttatcttcctttctagtgtctgaccctgcaagcctaatgttggtttgaacccttttggtttgttcagttgccagcctccatctctcccactgtatggccgtgcctagaccgatggcagccatcgaatattcctctgggctcacggggtgttttccacccccctgcagcaactaagatggtgggggagagggggttagaataaagcatctgaatacagttttcaggacctcaagcagacttcctagagacttgtttctgagacagttctttgccttcacttccctgctagctgggaaagaagagtggagcagagactctgcctggccactgagaacagccaaattcacaaaccctcagtggggctttgtttttggattttctccggactcatcagtaaacctgtagaagtgtcgctttccagccttttgtttctggatcctcaaaactcagaacgtggccgggcgtggtggctcacgcctgtaatcccagcactttgggaggctgaggcaggcagatcacctgaggctaggagttgcagaccagcctggccaacatggcaaaaccccgtctctactaaaaatacaaaaagccgggcgtggtgggcgcctgtaatcccagctgctcaggaggctgaggcaggagaatcgcttgaacccgggaggcagagattgcagtaagctgagatcgtgccactgcactccagcctggtgacagagtgagactccgtctcaaaaaaaaaaaaaaaaactcagcttcttcagagagataaaattgggggaggagcccagggccacataccaagctttgggacatggtgcctcatgctctctgggattgcagaccatccaggtctgtcttcgcccctgttagtgcacatatatccactcacatgtcttccctcaggctatcgggcagggggacttcaccagggggtttatggataggcttcaagagggtctgtgagcccccagaaattgtgtgtgagactgagtatgtgttcttttttccaggaaaggctccagtggttcttacttgatccaaaaaatgtcaagaattaatctaggaggccgggcctggtggctcacacctgtaatcccagctctttgggaggccgaggcgggtggatcactcaaggtcaggcatttgagaccagcctggccaacatagtgaaaccccgtctctattaaaaatacaaaaattagctgggtgtggtggtatgtgcctgtagtctcagctactcaggaggctgagacaggagaatcacttgaaccctggaggtagaagttgcagtgagccaagatcatactactgcactccagcctgggcgacaagagtgaaactccacctcaaaaaaaaaaaaaaaagagttaatctaggagataatgaatggcctagtactagataatatatggccccacaagctcttgacttctgtccttggggaaagccattttgttaaccacactagtgagatttacatgatgcttaatggagaacagagaagatcttgttgcaaaaggtgtattaaatatttgtgctgtttctgtatgagattgagaagcttttcccacctctcacccctatttcctataaggatatccagagaagccaaactgttctgtgggtttgggaatggtcatttcccgggaaaatgcatctggatcgatgactaaacctggcccttttctctgggctgtagtgaagccgcattttcacgctggctggcagtgtgctgagagcctcgaatgctctgcggcgtagtgcccttctgccctgcctgacgatgtatcgaaaagatgagagtgaaggagactttgtgcagcaggaaacgggtaggtgaggtgttgggcagttgtgggaacttctgagagtattacagagtggtagaatcggtaagaactctgatttggacttcgctttggtggaactgtgtgcctatacctgcctgtgtgtgtgcaagtgtgcaggttcctttgtatgtatgtgtacgtgtgggaacctgtgtttgtcatatttttcttcatttcacaaaggctttttttgaagcagtggcagtatgcctttgtttcaagaacacatgaaattcttttaacaccagattagtgtgttaccccaaatgaacggttctagccctctattaagaaataaagggaccataagcattttggctgcttatggctgtgtgttactacttacaagagtcttgaaaattatacagaactttgccttctttttttaatgtcttccacaatgttgtgactgattataaccctgtttcccctcagagaagagctatggctcagggatctgtgttgactctggcatttagtggctttgtgaaggaaagaaaccattaaatgacctgacaaaaactgactcatgtctttaaagtagttgaagccacttttagaatgttactctcggttgcttttgtctaattctaatggcttaaagccaagaaaaccatagtataaatctttttgtgtacctatgctagtgtttaaatggcagttcgttgtgataaagtatcagtcacttcaagttttctgtgaaagtttttaattaggttaaaaataattttggcatacgtctctactcagtttataaagcagttccacaccatgcaaacaaaactctaacagcaaaggttatcttgacctgatgttacttgaatctgagagaaagtcattacttactactgcactcctgcttttgtgggaaaaattttcttcttccccagaagagttaacagttgagtgttcagctcctgacttacctttaatttagaggcaatattattactgtttaagtgattatttgcttaacacaggttttattttgtctttttgctggtagattatacaagggacaactttagtgatgaggcatgtggatgatttggtgggagtaggtatatacttagtggaatggtttattttatggaagagaattcattggaggtgagattgaagtatattgtgaagtgggatttgaacagcacatatgctctggtttgctcaaataactgcagtttatgcttacatctaaattttgtttctgttacctaaacgggagcttctagaattacgaaggccatacctgccacatttataaaataatggttttatccctgcccccaaatcatcaggttcctcgggtttaagagaagtggtctaatagacaggaatagaagttgtggtggaggtgatttgggatagactaggtttccttatgcaagtggatatgagctcctcatagaaaccagacctactgtattagacagtaacctctaacctcacctccaagcccaagtatatggccctgctgggttacctggtgactacatttcccagattcactctaaattcaaggtagtgacccaaataaattgggaaaggagggggtcaaggaggaaaagctgttgaaaatctttctcctatttaagagaaatatatgccctagagctgctccagcacccttggtttctgatttttttaatattgaatatggattagaagaatgaaatcagatgacacctgactgcaaaaatgtttataagcaaatagccttcttacattttggtataaagctgtgaacttcgtaactttgtaaagcaagatataaagcaaatacaagaggaaaataaagtacttttactaattg

SEQ ID NO: 441299 - DNA, 10411 bp, Homo sapiens
  misc_feature (37)..(37): n is a, c, g, or t
taaacaaaaacctacgctaggtacgaggccgggttgnggcggctgtggcggggcccggcggggagcgggtccggagcaggctcccggacccaaaactgaagggggcgtctgaggcgtcagggagctccctcgcctggctctcggcggcctgatggagtaagaggggttggctgtgaatgtgtgacgttgagtgcttcagatctggtcactatggtacgagaacgaaaatgcatattatgccacatcgtgtacagctcaaaaaaggagatggacgaacacatgcggagcatgttgcatcacagggaacttgagaacctcaagggcagggacattagtcatgagtgccgagtgtgcggggtcacagaagtgggtctttctgcatatgcaaagcacatttctggccagttgcacaaagataacgttgatgcccaggaaagagaagatgatggaaaaggagaggaagaggaagaagattattttgacaaggaactcattcagttaataaaacaaaggaaagaacaaagtcgacaagatgaaccttccaatagcaaccaagaaataaactctgatgacagacgaccccaatggagacgagaagaccgaattccttaccaagacagagagagttacagtcagcctgcatggcatcatcgtggacctccacagcgggattggaaatgggaaaaagatggctttaataatactaggaaaaacagctttccacattctttgaggaatggtggtggaccaagaggacgttccgggtggcataagggtgttgcaggaggctcctcgacttggtttcacaaccatagtaattctggaggtggttggctttcaaatagtggagcagtagattggaatcataatggtacaggaaggaattccagttggctttctgaaggaacaggtggcttttccagttggcatatgaacaacagtaacggaaactggaaatccagtgtacgtagtacaaataattggaattacagtggccctggagacaaatttcaaccaggcagaaacagaaattctaactgtcaaatggaagacatgactatgctatggaacaagaaatctaataagtcaaacaaatacagtcacgacagatataattggcagcggcaagaaaatgacaaacttggtacagttgccacatatagaggtccttctgaaggatttacaagtgataaatttccttcagaaggcttactcgacttcaattttgagcagctggaaagccaaaccactaaacaagcagacactgctacttccaaagttagtggaaagaatggcagtgcggcaagggaaaagcctcgtcgctggacgccttacccttctcagaagactctggatttacagtcgggattgaaagacatcactggtaacaagtcagaaatgatagagaaacctctctttgattttagcttgataactacaggaatacaggagccccaaactgatgaaacacgtaattccccaacacagaaaacacaaaaagaaatacatactggatctcttaatcacaaggcctcttctgattccgctgcttccttcgaggtggtgagacagtgccccactgcagaaaaacctgaacaagagcatacaccaaataaaatgccatcattgaaatccccactccttccatgtccagccactaaatcattgtctcaaaagcaagatccaaagaatatctcaaaaaacaccaaaacaaattttttttcccctggagaacactcaaatccctcgaacaagcccactgtggaagataaccatggtccttacatatccaaactgcgtagttcatgtcctcatgttttaaaagggaataaaagtacatttggctctcaaaagcaatctggtgataatttaaatgatactttacgaaaggccaaagaggtgctacagtgtcatgagtcattgcaaaatccacttcttagcacttctaaaagtaccaggaactatgcaaaagcaagtagaaatgtagaagaatctgaaaaagggtctttgaaaattgagtttcaagtgcacgcactagaagatgaaagtgatggagagacatctgacacggaaaagcatggaacaaaaattggaaccctaggttctgcaactacagaattgttatctggcagcactcgaactgctgatgagaaagaggaggatgaccgcatcctgaagacttctagagagctatccacttccccatgtaatcccatagttcgccagaaagaatctgaattacaaatgacatctgcagccagtccacaccctggcttattgctagacttgaaaacctctctagaagatgcacaggttgatgactctattaaatctcatgtatcttatgaaacagaaggctttgagagtgctagcttggatgcagagcttcaaaaaagtgacatcagtcagccctcgggccctctcctgcctgaactaagtaagcttggctttcctgcctcacttcagagggatctaacccggcacattagtttgaagagcaaaactggagtacaccttcctgagccaaacctcaatagtgcccgccgcattcgcaatattagcggtcaccgaaagagtgagacagagaaggagtctgggctcaagccaaccctacggcagattctaaatgcatctcggagaaatgtcaactgggaacaggtcattcagcaagtaaccaagaaaaagcaagagctgggcaaaggcttacccaggtttggcatagaaatggtaccccttgttcaaaatgaacaagaagccttagatttggatggggaacctgatctgtccagtctagaaggattccagtgggaaggtgtttccatttcctcgtcccctggcttggcaagaaagcgaagcctttctgagagcagcgtgatcatggacagagctccttctgtgtatagcttcttcagtgaggaaggtacaggcaaagaaaatgagccccagcagatggtttcacctagtaactcattgagggctggacagagccagaaagcaaccatgcacctcaaacaagaagtgacacctcgggctgcctccctccgaacaggtgaaagggctgaaaatgttgctacccaaaggcgacatagtgcacaattatcctctgaccatataatacctttgatgcatttggcaaaagacttgaacagccaggagaggtctataccaccgtcagagaatcagaattcccaggagagtaatggagagggaaactgtctgtcatcaagcgcatcctcagcccttgcgatctccagtttagcggatgcagccacagatagtagctgtacctctggtgctgaacaaaatgatggccaaagtattagaaagaaacgaagagccactggagatggatcttctcctgaactcccaagtcttgagagaaaaaataaaagaaggaaaattaaaggaaaaaaagaacgttctcaggttgaccagctgctgaatatttctttaagggaggaagaacttagtaagtcattgcagtgcatggataacaatcttctgcaagcccgtgcagcccttcagacagcttatgtggaagttcagaggctacttatgctcaagcagcagataactatggagatgagtgcactgaggacccatagaatacagattctacagggattacaagaaacatatgaaccttctgagcacccagaccaggttccctgtagcctcacacgagaacgaaggaacagtagatctcaaacatccattgatgccgcactgctgcccactccctttttcccactttttctggagcctccatcttcccatgtgtctccatcacccaccggagcctctcttcaaataaccacgtctcctactttccaaacccatggcagtgtccctgctccagactcatcagttcagattaaacaagagcccatgtctcctgaacaagatgagaatgtgaatgctgtgccaccaagctctgcctgcaatgtgtccaaggaattactggaagctaatagagagatcagtgacagttgtccagtttatccagtcatcactgctagattgtccttaccagagtcaacagaaagtttccatgagcctagccaagaactgaagttttctgtggagcaaagaaataccagaaacagagaaaactctccctcttcccaatcagctggtctttctagcataaataaagaaggggaagagccaaccaaaggcaatagtgggtctgaagcctgtaccagttcttttctaagattgtcttttgcttcagaaacccctttggagaaggaaccccactctccagctgaccagcctgaacaacaggcagaatccactttgacatcagctgagactaggggaagcaagaaaaagaagaaactccggaagaagaaaagtctacgggctgcccatgttcctgagaatagtgacactgaacaggatgttttgactgttaaacctgtaaggaaagtaaaagctggaaagttaattaaaggggggaaagtaacaacctccacttgggaagacagcaggactggtcgggagcaggagagtgtcagagatgagccagatagtgactcgtctctggaagtcctagaaattcctaatcctcagttagaagtagtagccattgattcttcagaatcaggagaagagaaaccagacagcccatctaaaaaggatatttggaactctacagagcaaaacccactagaaacgtctcgttctgggtgtgatgaagttagctctaccagtgaaattggcactcgctataaagatggcatccctgtaagtgtggcagaaactcagactgtgatctcctccataaaaggatcaaagaattcttcagaaatatcttcagagccaggagatgatgatgaacccacagaaggaagctttgagggacaccaagctgccgtaaatgcaattcagatatttgggaacttgctatatacctgttcagcagataaaactgttcgggtttataatctggtgagtcggaaatgtattggtgtctttgagggtcatacctccaaagttaactgcctcctggttactcagacctccgggaagaatgctgccctttacaccgggtccagtgaccataccatccgctgctataatgttaagagccgagagtgtgtggagcagttacagctggaagaccgggtcctctgcctccacagtagatggcgaatcctctatgcgggactggcaaatggcactgtggtcaccttcaacataaagaacaacaaacgacttgagatctttgaatgccatggccctcgggcagtcagctgtcttgctacagctcaggaaggtgcccgaaaactgctggtcgtggggtcttatgactgcacaattagtgtacgcgatgcccggaatggactgctcctcagaactctggagggccatagcaaaaccattctttgcatgaaggtggtgaatgatctcgtgttcagtggctccagtgatcagtcagtccatgctcacaacattcacactggtgagctcgtgcggatctataaaggtcacaatcatgcagtgactgtggtgaatatcctaggaaaagtgatggtgactgcttgcctggataaatttgttcgtgtctatgaattacagtctcatgatcgattacaagtttatggaggacacaaagacatgattatgtgtatgaccatccataaaagcatgatttacactggctgttatgatggcagtattcaggccgtgaggcttaatctgatgcagaattaccgctgttggtggcatggttgctctctgatatttggcgttgtagatcatttaaaacaacacttgctgaccgaccacactaatcccaacttccagactctgaaatgtcgctggaagaactgcgatgcttttttcactgctaggaaaggatccaaacaggatgctgcaggacatattgaacgacatgctgaagatgacagcaaaattgattcatgaagttttttgcctcccacgttgggaagtcattagttgaactattttcacattggccccccacacaggccactctcttccctttcttggtgaagtaaggaaggagaaagtggttactagccaggcatacccctagcataagtctgggcagctctatgggatgataaattacacttttaagttcttgctggaggttttaaatagatttagacaaatgttaaggaaccatacttctctgggacagcatggcatatagtgatatatgctatttgcgttctccagatgtttattgaagatacagatcctaattggttacccagtttgaccctaatcatatgtatattttattgatttcagtttgcaatttttaatttatgttcttatgatggtttaaacctatagtcaggcttttaagtacaagtttgtttaagtgccagactttgaggatcagttttaatttctccatttgtaatagctgggtatttaaactggaagcaaatagttttctttcttaacaattatgtgcagtgtgtgtcactgttttcttgctttatagatagagctggctttaagtgctaaaggacacagtagatttttgacaaacagtggctgctctgctgactatcttttaggaattcaggaagcaaatcacatagtgacaagtccttacagacaccacttctagtaaatctctgtaaatgtggatagaaagctcagtgtgaggcagtgcgtagacctaacgtctacctttacatctgctgttgaacctgggcactacctgttacagatcctgtcaggctgttgaactggaggtgtacctttatcttcctttctagtgtctgaccctgcaagcctaatgttggtttgaacccttttggtttgttcagttgccagcctccatctctcccactgtatggccgtgcctagaccgatggcagccatcgaatattcctctgggctcacggggtgttttccacccccctgcagcaactaagatggtgggggagagggggttagaataaagcatctgaatacagttttcaggacctcaagcagacttcctagagacttgtttctgagacagttctttgccttcacttccctgctagctgggaaagaagagtggagcagagactctgcctggccactgagaacagccaaattcacaaaccctcagtggggctttgtttttggattttctccggactcatcagtaaacctgtagaagtgtcgctttccagccttttgtttctggatcctcaaaactcagaacgtggccgggcgtggtggctcacgcctgtaatcccagcactttgggaggctgaggcaggcagatcacctgaggctaggagttgcagaccagcctggccaacatggcaaaaccccgtctctactaaaaatacaaaaagccgggcgtggtgggcgcctgtaatcccagctgctcaggaggctgaggcaggagaatcgcttgaacccgggaggcagagattgcagtaagctgagatcgtgccactgcactccagcctggtgacagagtgagactccgtctcaaaaaaaaaaaaaaaaactcagcttcttcagagagataaaattgggggaggagcccagggccacataccaagctttgggacatggtgcctcatgctctctgggattgcagaccatccaggtctgtcttcgcccctgttagtgcacatatatccactcacatgtcttccctcaggctatcgggcagggggacttcaccagggggtttatggataggcttcaagagggtctgtgagcccccagaaattgtgtgtgagactgagtatgtgttcttttttccaggaaaggctccagtggttcttacttgatccaaaaaatgtcaagaattaatctaggaggccgggcctggtggctcacacctgtaatcccagctctttgggaggccgaggcgggtggatcactcaaggtcaggcatttgagaccagcctggccaacatagtgaaaccccgtctctattaaaaatacaaaaattagctgggtgtggtggtatgtgcctgtagtctcagctactcaggaggctgagacaggagaatcacttgaaccctggaggtagaagttgcagtgagccaagatcatactactgcactccagcctgggcgacaagagtgaaactccacctcaaaaaaaaaaaaaaaagagttaatctaggagataatgaatggcctagtactagataatatatggccccacaagctcttgacttctgtccttggggaaagccattttgttaaccacactagtgagatttacatgatgcttaatggagaacagagaagatcttgttgcaaaaggtgtattaaatatttgtgctgtttctgtatgagattgagaagcttttcccacctctcacccctatttcctataaggatatccagagaagccaaactgttctgtgggtttgggaatggtcatttcccgggaaaatgcatctggatcgatgactaaacctggcccttttctctgggctgtagtgaagccgcattttcacgctggctggcagtgtgctgagagcctcgaatgctctgcggcgtagtgcccttctgccctgcctgacgatgtatcgaaaagatgagagtgaaggagactttgtgcagcaggaaacgggtaggtgaggtgttgggcagttgtgggaacttctgagagtattacagagtggtagaatcggtaagaactctgatttggacttcgctttggtggaactgtgtgcctatacctgcctgtgtgtgtgcaagtgtgcaggttcctttgtatgtatgtgtacgtgtgggaacctgtgtttgtcatatttttcttcatttcacaaaggctttttttgaagcagtggcagtatgcctttgtttcaagaacacatgaaattcttttaacaccagattagtgtgttaccccaaatgaacggttctagccctctattaagaaataaagggaccataagcattttggctgcttatggctgtgtgttactacttacaagagtcttgaaaattatacagaactttgccttctttttttaatgtcttccacaatgttgtgactgattataaccctgtttcccctcagagaagagctatggctcagggatctgtgttgactctggcatttagtggctttgtgaaggaaagaaaccattaaatgacctgacaaaaactgactcatgtctttaaagtagttgaagccacttttagaatgttactctcggttgcttttgtctaattctaatggcttaaagccaagaaaaccatagtataaatctttttgtgtacctatgctagtgtttaaatggcagttcgttgtgataaagtatcagtcacttcaagttttctgtgaaagtttttaattaggttaaaaataattttggcatacgtctctactcagtttataaagcagttccacaccatgcaaacaaaactctaacagcaaaggttatcttgacctgatgttacttgaatctgagagaaagtcattacttactactgcactcctgcttttgtgggaaaaattttcttcttccccagaagagttaacagttgagtgttcagctcctgacttacctttaatttagaggcaatattattactgtttaagtgattatttgcttaacacaggttttattttgtctttttgctggtagattatacaagggacaactttagtgatgaggcatgtggatgatttggtgggagtaggtatatacttagtggaatggtttattttatggaagagaattcattggaggtgagattgaagtatattgtgaagtgggatttgaacagcacatatgctctggtttgctcaaataactgcagtttatgcttacatctaaattttgtttctgttacctaaacgggagcttctagaattacgaaggccatacctgccacatttataaaataatggttttatccctgcccccaaatcatcaggttcctcgggtttaagagaagtggtctaatagacaggaatagaagttgtggtggaggtgatttgggatagactaggtttccttatgcaagtggatatgagctcctcatagaaaccagacctactgtattagacagtaacctctaacctcacctccaagcccaagtatatggccctgctgggttacctggtgactacatttcccagattcactctaaattcaaggtagtgacccaaataaattgggaaaggagggggtcaaggaggaaaagctgttgaaaatctttctcctatttaagagaaatatatgccctagagctgctccagcacccttggtttctgatttttttaatattgaatatggattagaagaatgaaatcagatgacacctgactgcaaaaatgtttataagcaaatagccttcttacattttggtataaagctgtgaacttcgtaactttgtaaagcaagatataaagcaaatacaagaggaaaataaagtacttttactaattg

SEQ ID NO: 441300 - DNA, 10019 bp, Homo sapiens
gtgtccatcccccttcgggtgtccatcccccttcgtgtgtccatcccccttcgtttccagtttgtcacggatagctcaagcagcgcctggcaaggaactcattcagttaataaaacaaaggaaagaacaaagtcgacaagatgaaccttccaatagcaaccaagaaataaactctgatgacagacgaccccaatggagacgagaagaccgaattccttaccaagacagagagagttacagtcagcctgcatggcatcatcgtggacctccacagcgggattggaaatgggaaaaagatggctttaataatactaggaaaaacagctttccacattctttgaggaatggtggtggaccaagaggacgttccgggtggcataagggtgttgcaggaggctcctcgacttggtttcacaaccatagtaattctggaggtggttggctttcaaatagtggagcagtagattggaatcataatggtacaggaaggaattccagttggctttctgaaggaacaggtggcttttccagttggcatatgaacaacagtaacggaaactggaaatccagtgtacgtagtacaaataattggaattacagtggccctggagacaaatttcaaccaggcagaaacagaaattctaactgtcaaatggaagacatgactatgctatggaacaagaaatctaataagtcaaacaaatacagtcacgacagatataattggcagcggcaagaaaatgacaaacttggtacagttgccacatatagaggtccttctgaaggatttacaagtgataaatttccttcagaaggcttactcgacttcaattttgagcagctggaaagccaaaccactaaacaagcagacactgctacttccaaagttagtggaaagaatggcagtgcggcaagggaaaagcctcgtcgctggacgccttacccttctcagaagactctggatttacagtcgggattgaaagacatcactggtaacaagtcagaaatgatagagaaacctctctttgattttagcttgataactacaggaatacaggagccccaaactgatgaaacacgtaattccccaacacagaaaacacaaaaagaaatacatactggatctcttaatcacaaggcctcttctgattccgctgcttccttcgaggtggtgagacagtgccccactgcagaaaaacctgaacaagagcatacaccaaataaaatgccatcattgaaatccccactccttccatgtccagccactaaatcattgtctcaaaagcaagatccaaagaatatctcaaaaaacaccaaaacaaattttttttcccctggagaacactcaaatccctcgaacaagcccactgtggaagataaccatggtccttacatatccaaactgcgtagttcatgtcctcatgttttaaaagggaataaaagtacatttggctctcaaaagcaatctggtgataatttaaatgatactttacgaaaggccaaagaggtgctacagtgtcatgagtcattgcaaaatccacttcttagcacttctaaaagtaccaggaactatgcaaaagcaagtagaaatgtagaagaatctgaaaaagggtctttgaaaattgagtttcaagtgcacgcactagaagatgaaagtgatggagagacatctgacacggaaaagcatggaacaaaaattggaaccctaggttctgcaactacagaattgttatctggcagcactcgaactgctgatgagaaagaggaggatgaccgcatcctgaagacttctagagagctatccacttccccatgtaatcccatagttcgccagaaagaatctgaattacaaatgacatctgcagccagtccacaccctggcttattgctagacttgaaaacctctctagaagatgcacaggttgatgactctattaaatctcatgtatcttatgaaacagaaggctttgagagtgctagcttggatgcagagcttcaaaaaagtgacatcagtcagccctcgggccctctcctgcctgaactaagtaagcttggctttcctgcctcacttcagagggatctaacccggcacattagtttgaagagcaaaactggagtacaccttcctgagccaaacctcaatagtgcccgccgcattcgcaatattagcggtcaccgaaagagtgagacagagaaggagtctgggctcaagccaaccctacggcagattctaaatgcatctcggagaaatgtcaactgggaacaggtcattcagcaagtaaccaagaaaaagcaagagctgggcaaaggcttacccaggtttggcatagaaatggtaccccttgttcaaaatgaacaagaagccttagatttggatggggaacctgatctgtccagtctagaaggattccagtgggaaggtgtttccatttcctcgtcccctggcttggcaagaaagcgaagcctttctgagagcagcgtgatcatggacagagctccttctgtgtatagcttcttcagtgaggaaggtacaggcaaagaaaatgagccccagcagatggtttcacctagtaactcattgagggctggacagagccagaaagcaaccatgcacctcaaacaagaagtgacacctcgggctgcctccctccgaacaggtgaaagggctgaaaatgttgctacccaaaggcgacatagtgcacaattatcctctgaccatataatacctttgatgcatttggcaaaagacttgaacagccaggagaggtctataccaccgtcagagaatcagaattcccaggagagtaatggagagggaaactgtctgtcatcaagcgcatcctcagcccttgcgatctccagtttagcggatgcagccacagatagtagctgtacctctggtgctgaacaaaatgatggccaaagtattagaaagaaacgaagagccactggagatggatcttctcctgaactcccaagtcttgagagaaaaaataaaagaaggaaaattaaaggaaaaaaagaacgttctcaggttgaccagctgctgaatatttctttaagggaggaagaacttagtaagtcattgcagtgcatggataacaatcttctgcaagcccgtgcagcccttcagacagcttatgtggaagttcagaggctacttatgctcaagcagcagataactatggagatgagtgcactgaggacccatagaatacagattctacagggattacaagaaacatatgaaccttctgagcacccagaccaggttccctgtagcctcacacgagaacgaaggaacagtagatctcaaacatccattgatgccgcactgctgcccactccctttttcccactttttctggagcctccatcttcccatgtgtctccatcacccaccggagcctctcttcaaataaccacgtctcctactttccaaacccatggcagtgtccctgctccagactcatcagttcagattaaacaagagcccatgtctcctgaacaagatgagaatgtgaatgctgtgccaccaagctctgcctgcaatgtgtccaaggaattactggaagctaatagagagatcagtgacagttgtccagtttatccagtcatcactgctagattgtccttaccagagtcaacagaaagtttccatgagcctagccaagaactgaagttttctgtggagcaaagaaataccagaaacagagaaaactctccctcttcccaatcagctggtctttctagcataaataaagaaggggaagagccaaccaaaggcaatagtgggtctgaagcctgtaccagttcttttctaagattgtcttttgcttcagaaacccctttggagaaggaaccccactctccagctgaccagcctgaacaacaggcagaatccactttgacatcagctgagactaggggaagcaagaaaaagaagaaactccggaagaagaaaagtctacgggctgcccatgttcctgagaatagtgacactgaacaggatgttttgactgttaaacctgtaaggaaagtaaaagctggaaagttaattaaaggggggaaagtaacaacctccacttgggaagacagcaggactggtcgggagcaggagagtgtcagagatgagccagatagtgactcgtctctggaagtcctagaaattcctaatcctcagttagaagtagtagccattgattcttcagaatcaggagaagagaaaccagacagcccatctaaaaaggatatttggaactctacagagcaaaacccactagaaacgtctcgttctgggtgtgatgaagttagctctaccagtgaaattggcactcgctataaagatggcatccctgtaagtgtggcagaaactcagactgtgatctcctccataaaaggatcaaagaattcttcagaaatatcttcagagccaggagatgatgatgaacccacagaaggaagctttgagggacaccaagctgccgtaaatgcaattcagatatttgggaacttgctatatacctgttcagcagataaaactgttcgggtttataatctggtgagtcggaaatgtattggtgtctttgagggtcatacctccaaagttaactgcctcctggttactcagacctccgggaagaatgctgccctttacaccgggtccagtgaccataccatccgctgctataatgttaagagccgagagtgtgtggagcagttacagctggaagaccgggtcctctgcctccacagtagatggcgaatcctctatgcgggactggcaaatggcactgtggtcaccttcaacataaagaacaacaaacgacttgagatctttgaatgccatggccctcgggcagtcagctgtcttgctacagctcaggaaggtgcccgaaaactgctggtcgtggggtcttatgactgcacaattagtgtacgcgatgcccggaatggactgctcctcagaactctggagggccatagcaaaaccattctttgcatgaaggtggtgaatgatctcgtgttcagtggctccagtgatcagtcagtccatgctcacaacattcacactggtgagctcgtgcggatctataaaggtcacaatcatgcagtgactgtggtgaatatcctaggaaaagtgatggtgactgcttgcctggataaatttgttcgtgtctatgaattacagtctcatgatcgattacaagtttatggaggacacaaagacatgattatgtgtatgaccatccataaaagcatgatttacactggctgttatgatggcagtattcaggccgtgaggcttaatctgatgcagaattaccgctgttggtggcatggttgctctctgatatttggcgttgtagatcatttaaaacaacacttgctgaccgaccacactaatcccaacttccagactctgaaatgtcgctggaagaactgcgatgcttttttcactgctaggaaaggatccaaacaggatgctgcaggacatattgaacgacatgctgaagatgacagcaaaattgattcatgaagttttttgcctcccacgttgggaagtcattagttgaactattttcacattggccccccacacaggccactctcttccctttcttggtgaagtaaggaaggagaaagtggttactagccaggcatacccctagcataagtctgggcagctctatgggatgataaattacacttttaagttcttgctggaggttttaaatagatttagacaaatgttaaggaaccatacttctctgggacagcatggcatatagtgatatatgctatttgcgttctccagatgtttattgaagatacagatcctaattggttacccagtttgaccctaatcatatgtatattttattgatttcagtttgcaatttttaatttatgttcttatgatggtttaaacctatagtcaggcttttaagtacaagtttgtttaagtgccagactttgaggatcagttttaatttctccatttgtaatagctgggtatttaaactggaagcaaatagttttctttcttaacaattatgtgcagtgtgtgtcactgttttcttgctttatagatagagctggctttaagtgctaaaggacacagtagatttttgacaaacagtggctgctctgctgactatcttttaggaattcaggaagcaaatcacatagtgacaagtccttacagacaccacttctagtaaatctctgtaaatgtggatagaaagctcagtgtgaggcagtgcgtagacctaacgtctacctttacatctgctgttgaacctgggcactacctgttacagatcctgtcaggctgttgaactggaggtgtacctttatcttcctttctagtgtctgaccctgcaagcctaatgttggtttgaacccttttggtttgttcagttgccagcctccatctctcccactgtatggccgtgcctagaccgatggcagccatcgaatattcctctgggctcacggggtgttttccacccccctgcagcaactaagatggtgggggagagggggttagaataaagcatctgaatacagttttcaggacctcaagcagacttcctagagacttgtttctgagacagttctttgccttcacttccctgctagctgggaaagaagagtggagcagagactctgcctggccactgagaacagccaaattcacaaaccctcagtggggctttgtttttggattttctccggactcatcagtaaacctgtagaagtgtcgctttccagccttttgtttctggatcctcaaaactcagaacgtggccgggcgtggtggctcacgcctgtaatcccagcactttgggaggctgaggcaggcagatcacctgaggctaggagttgcagaccagcctggccaacatggcaaaaccccgtctctactaaaaatacaaaaagccgggcgtggtgggcgcctgtaatcccagctgctcaggaggctgaggcaggagaatcgcttgaacccgggaggcagagattgcagtaagctgagatcgtgccactgcactccagcctggtgacagagtgagactccgtctcaaaaaaaaaaaaaaaaactcagcttcttcagagagataaaattgggggaggagcccagggccacataccaagctttgggacatggtgcctcatgctctctgggattgcagaccatccaggtctgtcttcgcccctgttagtgcacatatatccactcacatgtcttccctcaggctatcgggcagggggacttcaccagggggtttatggataggcttcaagagggtctgtgagcccccagaaattgtgtgtgagactgagtatgtgttcttttttccaggaaaggctccagtggttcttacttgatccaaaaaatgtcaagaattaatctaggaggccgggcctggtggctcacacctgtaatcccagctctttgggaggccgaggcgggtggatcactcaaggtcaggcatttgagaccagcctggccaacatagtgaaaccccgtctctattaaaaatacaaaaattagctgggtgtggtggtatgtgcctgtagtctcagctactcaggaggctgagacaggagaatcacttgaaccctggaggtagaagttgcagtgagccaagatcatactactgcactccagcctgggcgacaagagtgaaactccacctcaaaaaaaaaaaaaaaagagttaatctaggagataatgaatggcctagtactagataatatatggccccacaagctcttgacttctgtccttggggaaagccattttgttaaccacactagtgagatttacatgatgcttaatggagaacagagaagatcttgttgcaaaaggtgtattaaatatttgtgctgtttctgtatgagattgagaagcttttcccacctctcacccctatttcctataaggatatccagagaagccaaactgttctgtgggtttgggaatggtcatttcccgggaaaatgcatctggatcgatgactaaacctggcccttttctctgggctgtagtgaagccgcattttcacgctggctggcagtgtgctgagagcctcgaatgctctgcggcgtagtgcccttctgccctgcctgacgatgtatcgaaaagatgagagtgaaggagactttgtgcagcaggaaacgggtaggtgaggtgttgggcagttgtgggaacttctgagagtattacagagtggtagaatcggtaagaactctgatttggacttcgctttggtggaactgtgtgcctatacctgcctgtgtgtgtgcaagtgtgcaggttcctttgtatgtatgtgtacgtgtgggaacctgtgtttgtcatatttttcttcatttcacaaaggctttttttgaagcagtggcagtatgcctttgtttcaagaacacatgaaattcttttaacaccagattagtgtgttaccccaaatgaacggttctagccctctattaagaaataaagggaccataagcattttggctgcttatggctgtgtgttactacttacaagagtcttgaaaattatacagaactttgccttctttttttaatgtcttccacaatgttgtgactgattataaccctgtttcccctcagagaagagctatggctcagggatctgtgttgactctggcatttagtggctttgtgaaggaaagaaaccattaaatgacctgacaaaaactgactcatgtctttaaagtagttgaagccacttttagaatgttactctcggttgcttttgtctaattctaatggcttaaagccaagaaaaccatagtataaatctttttgtgtacctatgctagtgtttaaatggcagttcgttgtgataaagtatcagtcacttcaagttttctgtgaaagtttttaattaggttaaaaataattttggcatacgtctctactcagtttataaagcagttccacaccatgcaaacaaaactctaacagcaaaggttatcttgacctgatgttacttgaatctgagagaaagtcattacttactactgcactcctgcttttgtgggaaaaattttcttcttccccagaagagttaacagttgagtgttcagctcctgacttacctttaatttagaggcaatattattactgtttaagtgattatttgcttaacacaggttttattttgtctttttgctggtagattatacaagggacaactttagtgatgaggcatgtggatgatttggtgggagtaggtatatacttagtggaatggtttattttatggaagagaattcattggaggtgagattgaagtatattgtgaagtgggatttgaacagcacatatgctctggtttgctcaaataactgcagtttatgcttacatctaaattttgtttctgttacctaaacgggagcttctagaattacgaaggccatacctgccacatttataaaataatggttttatccctgcccccaaatcatcaggttcctcgggtttaagagaagtggtctaatagacaggaatagaagttgtggtggaggtgatttgggatagactaggtttccttatgcaagtggatatgagctcctcatagaaaccagacctactgtattagacagtaacctctaacctcacctccaagcccaagtatatggccctgctgggttacctggtgactacatttcccagattcactctaaattcaaggtagtgacccaaataaattgggaaaggagggggtcaaggaggaaaagctgttgaaaatctttctcctatttaagagaaatatatgccctagagctgctccagcacccttggtttctgatttttttaatattgaatatggattagaagaatgaaatcagatgacacctgactgcaaaaatgtttataagcaaatagccttcttacattttggtataaagctgtgaacttcgtaactttgtaaagcaagatataaagcaaatacaagaggaaaataaagtacttttactaattg

SEQ ID NO: 441301 - DNA, 8030 bp, Homo sapiens
cgcgcggaaaggattaaggcggtagtacgaggcctgggggtggcggctgtggcggggcccggcggggagcgggtccggagcaggctcccggacccaaaactgaagggggcgtctgaggcgtcagggagctccctcgcctggctctcggcggcctgatggagtaagaggggttggctgtgaatgtgtgacgttgagtgcttcagatctggtcactatggtacgagaacgaaaatgcatattatgccacatcgtgtacagctcaaaaaaggagatggacgaacacatgcggagcatgttgcatcacagggaacttgagaacctcaagggcaggtttggcatagaaatggtaccccttgttcaaaatgaacaagaagccttagatttggatggggaacctgatctgtccagtctagaaggattccagtgggaaggtgtttccatttcctcgtcccctggcttggcaagaaagcgaagcctttctgagagcagcgtgatcatggacagagctccttctgtgtatagcttcttcagtgaggaaggtacaggcaaagaaaatgagccccagcagatggtttcacctagtaactcattgagggctggacagagccagaaagcaaccatgcacctcaaacaagaagtgacacctcgggctgcctccctccgaacaggtgaaagggctgaaaatgttgctacccaaaggcgacatagtgcacaattatcctctgaccatataatacctttgatgcatttggcaaaagacttgaacagccaggagaggtctataccaccgtcagagaatcagaattcccaggagagtaatggagagggaaactgtctgtcatcaagcgcatcctcagcccttgcgatctccagtttagcggatgcagccacagatagtagctgtacctctggtgctgaacaaaatgatggccaaagtattagaaagaaacgaagagccactggagatggatcttctcctgaactcccaagtcttgagagaaaaaataaaagaaggaaaattaaaggaaaaaaagaacgttctcaggttgaccagctgctgaatatttctttaagggaggaagaacttagtaagtcattgcagtgcatggataacaatcttctgcaagcccgtgcagcccttcagacagcttatgtggaagttcagaggctacttatgctcaagcagcagataactatggagatgagtgcactgaggacccatagaatacagattctacagggattacaagaaacatatgaaccttctgagcacccagaccaggttccctgtagcctcacacgagaacgaaggaacagtagatctcaaacatccattgatgccgcactgctgcccactccctttttcccactttttctggagcctccatcttcccatgtgtctccatcacccaccggagcctctcttcaaataaccacgtctcctactttccaaacccatggcagtgtccctgctccagactcatcagttcagattaaacaagagcccatgtctcctgaacaagatgagaatgtgaatgctgtgccaccaagctctgcctgcaatgtgtccaaggaattactggaagctaatagagagatcagtgacagttgtccagtttatccagtcatcactgctagattgtccttaccagagtcaacagaaagtttccatgagcctagccaagaactgaagttttctgtggagcaaagaaataccagaaacagagaaaactctccctcttcccaatcagctggtctttctagcataaataaagaaggggaagagccaaccaaaggcaatagtgggtctgaagcctgtaccagttcttttctaagattgtcttttgcttcagaaacccctttggagaaggaaccccactctccagctgaccagcctgaacaacaggcagaatccactttgacatcagctgagactaggggaagcaagaaaaagaagaaactccggaagaagaaaagtctacgggctgcccatgttcctgagaatagtgacactgaacaggatgttttgactgttaaacctgtaaggaaagtaaaagctggaaagttaattaaaggggggaaagtaacaacctccacttgggaagacagcaggactggtcgggagcaggagagtgtcagagatgagccagatagtgactcgtctctggaagtcctagaaattcctaatcctcagttagaagtagtagccattgattcttcagaatcaggagaagagaaaccagacagcccatctaaaaaggatatttggaactctacagagcaaaacccactagaaacgtctcgttctgggtgtgatgaagttagctctaccagtgaaattggcactcgctataaagatggcatccctgtaagtgtggcagaaactcagactgtgatctcctccataaaaggatcaaagaattcttcagaaatatcttcagagccaggagatgatgatgaacccacagaaggaagctttgagggacaccaagctgccgtaaatgcaattcagatatttgggaacttgctatatacctgttcagcagataaaactgttcgggtttataatctggtgagtcggaaatgtattggtgtctttgagggtcatacctccaaagttaactgcctcctggttactcagacctccgggaagaatgctgccctttacaccgggtccagtgaccataccatccgctgctataatgttaagagccgagagtgtgtggagcagttacagctggaagaccgggtcctctgcctccacagtagatggcgaatcctctatgcgggactggcaaatggcactgtggtcaccttcaacataaagaacaacaaacgacttgagatctttgaatgccatggccctcgggcagtcagctgtcttgctacagctcaggaaggtgcccgaaaactgctggtcgtggggtcttatgactgcacaattagtgtacgcgatgcccggaatggactgctcctcagaactctggagggccatagcaaaaccattctttgcatgaaggtggtgaatgatctcgtgttcagtggctccagtgatcagtcagtccatgctcacaacattcacactggtgagctcgtgcggatctataaaggtcacaatcatgcagtgactgtggtgaatatcctaggaaaagtgatggtgactgcttgcctggataaatttgttcgtgtctatgaattacagtctcatgatcgattacaagtttatggaggacacaaagacatgattatgtgtatgaccatccataaaagcatgatttacactggctgttatgatggcagtattcaggccgtgaggcttaatctgatgcagaattaccgctgttggtggcatggttgctctctgatatttggcgttgtagatcatttaaaacaacacttgctgaccgaccacactaatcccaacttccagactctgaaatgtcgctggaagaactgcgatgcttttttcactgctaggaaaggatccaaacaggatgctgcaggacatattgaacgacatgctgaagatgacagcaaaattgattcatgaagttttttgcctcccacgttgggaagtcattagttgaactattttcacattggccccccacacaggccactctcttccctttcttggtgaagtaaggaaggagaaagtggttactagccaggcatacccctagcataagtctgggcagctctatgggatgataaattacacttttaagttcttgctggaggttttaaatagatttagacaaatgttaaggaaccatacttctctgggacagcatggcatatagtgatatatgctatttgcgttctccagatgtttattgaagatacagatcctaattggttacccagtttgaccctaatcatatgtatattttattgatttcagtttgcaatttttaatttatgttcttatgatggtttaaacctatagtcaggcttttaagtacaagtttgtttaagtgccagactttgaggatcagttttaatttctccatttgtaatagctgggtatttaaactggaagcaaatagttttctttcttaacaattatgtgcagtgtgtgtcactgttttcttgctttatagatagagctggctttaagtgctaaaggacacagtagatttttgacaaacagtggctgctctgctgactatcttttaggaattcaggaagcaaatcacatagtgacaagtccttacagacaccacttctagtaaatctctgtaaatgtggatagaaagctcagtgtgaggcagtgcgtagacctaacgtctacctttacatctgctgttgaacctgggcactacctgttacagatcctgtcaggctgttgaactggaggtgtacctttatcttcctttctagtgtctgaccctgcaagcctaatgttggtttgaacccttttggtttgttcagttgccagcctccatctctcccactgtatggccgtgcctagaccgatggcagccatcgaatattcctctgggctcacggggtgttttccacccccctgcagcaactaagatggtgggggagagggggttagaataaagcatctgaatacagttttcaggacctcaagcagacttcctagagacttgtttctgagacagttctttgccttcacttccctgctagctgggaaagaagagtggagcagagactctgcctggccactgagaacagccaaattcacaaaccctcagtggggctttgtttttggattttctccggactcatcagtaaacctgtagaagtgtcgctttccagccttttgtttctggatcctcaaaactcagaacgtggccgggcgtggtggctcacgcctgtaatcccagcactttgggaggctgaggcaggcagatcacctgaggctaggagttgcagaccagcctggccaacatggcaaaaccccgtctctactaaaaatacaaaaagccgggcgtggtgggcgcctgtaatcccagctgctcaggaggctgaggcaggagaatcgcttgaacccgggaggcagagattgcagtaagctgagatcgtgccactgcactccagcctggtgacagagtgagactccgtctcaaaaaaaaaaaaaaaaactcagcttcttcagagagataaaattgggggaggagcccagggccacataccaagctttgggacatggtgcctcatgctctctgggattgcagaccatccaggtctgtcttcgcccctgttagtgcacatatatccactcacatgtcttccctcaggctatcgggcagggggacttcaccagggggtttatggataggcttcaagagggtctgtgagcccccagaaattgtgtgtgagactgagtatgtgttcttttttccaggaaaggctccagtggttcttacttgatccaaaaaatgtcaagaattaatctaggaggccgggcctggtggctcacacctgtaatcccagctctttgggaggccgaggcgggtggatcactcaaggtcaggcatttgagaccagcctggccaacatagtgaaaccccgtctctattaaaaatacaaaaattagctgggtgtggtggtatgtgcctgtagtctcagctactcaggaggctgagacaggagaatcacttgaaccctggaggtagaagttgcagtgagccaagatcatactactgcactccagcctgggcgacaagagtgaaactccacctcaaaaaaaaaaaaaaaagagttaatctaggagataatgaatggcctagtactagataatatatggccccacaagctcttgacttctgtccttggggaaagccattttgttaaccacactagtgagatttacatgatgcttaatggagaacagagaagatcttgttgcaaaaggtgtattaaatatttgtgctgtttctgtatgagattgagaagcttttcccacctctcacccctatttcctataaggatatccagagaagccaaactgttctgtgggtttgggaatggtcatttcccgggaaaatgcatctggatcgatgactaaacctggcccttttctctgggctgtagtgaagccgcattttcacgctggctggcagtgtgctgagagcctcgaatgctctgcggcgtagtgcccttctgccctgcctgacgatgtatcgaaaagatgagagtgaaggagactttgtgcagcaggaaacgggtaggtgaggtgttgggcagttgtgggaacttctgagagtattacagagtggtagaatcggtaagaactctgatttggacttcgctttggtggaactgtgtgcctatacctgcctgtgtgtgtgcaagtgtgcaggttcctttgtatgtatgtgtacgtgtgggaacctgtgtttgtcatatttttcttcatttcacaaaggctttttttgaagcagtggcagtatgcctttgtttcaagaacacatgaaattcttttaacaccagattagtgtgttaccccaaatgaacggttctagccctctattaagaaataaagggaccataagcattttggctgcttatggctgtgtgttactacttacaagagtcttgaaaattatacagaactttgccttctttttttaatgtcttccacaatgttgtgactgattataaccctgtttcccctcagagaagagctatggctcagggatctgtgttgactctggcatttagtggctttgtgaaggaaagaaaccattaaatgacctgacaaaaactgactcatgtctttaaagtagttgaagccacttttagaatgttactctcggttgcttttgtctaattctaatggcttaaagccaagaaaaccatagtataaatctttttgtgtacctatgctagtgtttaaatggcagttcgttgtgataaagtatcagtcacttcaagttttctgtgaaagtttttaattaggttaaaaataattttggcatacgtctctactcagtttataaagcagttccacaccatgcaaacaaaactctaacagcaaaggttatcttgacctgatgttacttgaatctgagagaaagtcattacttactactgcactcctgcttttgtgggaaaaattttcttcttccccagaagagttaacagttgagtgttcagctcctgacttacctttaatttagaggcaatattattactgtttaagtgattatttgcttaacacaggttttattttgtctttttgctggtagattatacaagggacaactttagtgatgaggcatgtggatgatttggtgggagtaggtatatacttagtggaatggtttattttatggaagagaattcattggaggtgagattgaagtatattgtgaagtgggatttgaacagcacatatgctctggtttgctcaaataactgcagtttatgcttacatctaaattttgtttctgttacctaaacgggagcttctagaattacgaaggccatacctgccacatttataaaataatggttttatccctgcccccaaatcatcaggttcctcgggtttaagagaagtggtctaatagacaggaatagaagttgtggtggaggtgatttgggatagactaggtttccttatgcaagtggatatgagctcctcatagaaaccagacctactgtattagacagtaacctctaacctcacctccaagcccaagtatatggccctgctgggttacctggtgactacatttcccagattcactctaaattcaaggtagtgacccaaataaattgggaaaggagggggtcaaggaggaaaagctgttgaaaatctttctcctatttaagagaaatatatgccctagagctgctccagcacccttggtttctgatttttttaatattgaatatggattagaagaatgaaatcagatgacacctgactgcaaaaatgtttataagcaaatagccttcttacattttggtataaagctgtgaacttcgtaactttgtaaagcaagatataaagcaaatacaagaggaaaataaagtacttttactaattg

SEQ ID NO: 441302 - DNA, 10404 bp, Homo sapiens
acgcgggggagtgcagctggcaccatgggtgtgctccagagcaacttctgcttgctctgagccccctgccctgcctcccctttcaccatgtttcctctgacaagattttaagtacagcaattcaagaagatttctcctcctaaacgacatttatctgaagtctattgcctcttgattgctggaaaagaatcttaaaatcatttcaaaagtaacttataaacaaacttattaaaagtgatgaaaggagcattgaaattaattagcactaatttttcactgtgccaaagtgtgcagtgtccttcagaggaaacaataacagatctggtgagtgtgccatgccagtggggagaattgaatgtccctcatctccctctttccctagggacattagtcatgagtgccgagtgtgcggggtcacagaagtgggtctttctgcatatgcaaagcacatttctggccagttgcacaaagataacgttgatgcccaggaaagagaagatgatggaaaaggagaggaagaggaagaagattattttgacaaggaactcattcagttaataaaacaaaggaaagaacaaagtcgacaagatgaaccttccaatagcaaccaagaaataaactctgatgacagacgaccccaatggagacgagaagaccgaattccttaccaagacagagagagttacagtcagcctgcatggcatcatcgtggacctccacagcgggattggaaatgggaaaaagatggctttaataatactaggaaaaacagctttccacattctttgaggaatggtggtggaccaagaggacgttccgggtggcataagggtgttgcaggaggctcctcgacttggtttcacaaccatagtaattctggaggtggttggctttcaaatagtggagcagtagattggaatcataatggtacaggaaggaattccagttggctttctgaaggaacaggtggcttttccagttggcatatgaacaacagtaacggaaactggaaatccagtgtacgtagtacaaataattggaattacagtggccctggagacaaatttcaaccaggcagaaacagaaattctaactgtcaaatggaagacatgactatgctatggaacaagaaatctaataagtcaaacaaatacagtcacgacagatataattggcagcggcaagaaaatgacaaacttggtacagttgccacatatagaggtccttctgaaggatttacaagtgataaatttccttcagaaggcttactcgacttcaattttgagcagctggaaagccaaaccactaaacaagcagacactgctacttccaaagttagtggaaagaatggcagtgcggcaagggaaaagcctcgtcgctggacgccttacccttctcagaagactctggatttacagtcgggattgaaagacatcactggtaacaagtcagaaatgatagagaaacctctctttgattttagcttgataactacaggaatacaggagccccaaactgatgaaacacgtaattccccaacacagaaaacacaaaaagaaatacatactggatctcttaatcacaaggcctcttctgattccgctgcttccttcgaggtggtgagacagtgccccactgcagaaaaacctgaacaagagcatacaccaaataaaatgccatcattgaaatccccactccttccatgtccagccactaaatcattgtctcaaaagcaagatccaaagaatatctcaaaaaacaccaaaacaaattttttttcccctggagaacactcaaatccctcgaacaagcccactgtggaagataaccatggtccttacatatccaaactgcgtagttcatgtcctcatgttttaaaagggaataaaagtacatttggctctcaaaagcaatctggtgataatttaaatgatactttacgaaaggccaaagaggtgctacagtgtcatgagtcattgcaaaatccacttcttagcacttctaaaagtaccaggaactatgcaaaagcaagtagaaatgtagaagaatctgaaaaagggtctttgaaaattgagtttcaagtgcacgcactagaagatgaaagtgatggagagacatctgacacggaaaagcatggaacaaaaattggaaccctaggttctgcaactacagaattgttatctggcagcactcgaactgctgatgagaaagaggaggatgaccgcatcctgaagacttctagagagctatccacttccccatgtaatcccatagttcgccagaaagaatctgaattacaaatgacatctgcagccagtccacaccctggcttattgctagacttgaaaacctctctagaagatgcacaggttgatgactctattaaatctcatgtatcttatgaaacagaaggctttgagagtgctagcttggatgcagagcttcaaaaaagtgacatcagtcagccctcgggccctctcctgcctgaactaagtaagcttggctttcctgcctcacttcagagggatctaacccggcacattagtttgaagagcaaaactggagtacaccttcctgagccaaacctcaatagtgcccgccgcattcgcaatattagcggtcaccgaaagagtgagacagagaaggagtctgggctcaagccaaccctacggcagattctaaatgcatctcggagaaatgtcaactgggaacaggtcattcagcaagtaaccaagaaaaagcaagagctgggcaaaggcttacccaggtttggcatagaaatggtaccccttgttcaaaatgaacaagaagccttagatttggatggggaacctgatctgtccagtctagaaggattccagtgggaaggtgtttccatttcctcgtcccctggcttggcaagaaagcgaagcctttctgagagcagcgtgatcatggacagagctccttctgtgtatagcttcttcagtgaggaaggtacaggcaaagaaaatgagccccagcagatggtttcacctagtaactcattgagggctggacagagccagaaagcaaccatgcacctcaaacaagaagtgacacctcgggctgcctccctccgaacaggtgaaagggctgaaaatgttgctacccaaaggcgacatagtgcacaattatcctctgaccatataatacctttgatgcatttggcaaaagacttgaacagccaggagaggtctataccaccgtcagagaatcagaattcccaggagagtaatggagagggaaactgtctgtcatcaagcgcatcctcagcccttgcgatctccagtttagcggatgcagccacagatagtagctgtacctctggtgctgaacaaaatgatggccaaagtattagaaagaaacgaagagccactggagatggatcttctcctgaactcccaagtcttgagagaaaaaataaaagaaggaaaattaaaggaaaaaaagaacgttctcaggttgaccagctgctgaatatttctttaagggaggaagaacttagtaagtcattgcagtgcatggataacaatcttctgcaagcccgtgcagcccttcagacagcttatgtggaagttcagaggctacttatgctcaagcagcagataactatggagatgagtgcactgaggacccatagaatacagattctacagggattacaagaaacatatgaaccttctgagcacccagaccaggttccctgtagcctcacacgagaacgaaggaacagtagatctcaaacatccattgatgccgcactgctgcccactccctttttcccactttttctggagcctccatcttcccatgtgtctccatcacccaccggagcctctcttcaaataaccacgtctcctactttccaaacccatggcagtgtccctgctccagactcatcagttcagattaaacaagagcccatgtctcctgaacaagatgagaatgtgaatgctgtgccaccaagctctgcctgcaatgtgtccaaggaattactggaagctaatagagagatcagtgacagttgtccagtttatccagtcatcactgctagattgtccttaccagagtcaacagaaagtttccatgagcctagccaagaactgaagttttctgtggagcaaagaaataccagaaacagagaaaactctccctcttcccaatcagctggtctttctagcataaataaagaaggggaagagccaaccaaaggcaatagtgggtctgaagcctgtaccagttcttttctaagattgtcttttgcttcagaaacccctttggagaaggaaccccactctccagctgaccagcctgaacaacaggcagaatccactttgacatcagctgagactaggggaagcaagaaaaagaagaaactccggaagaagaaaagtctacgggctgcccatgttcctgagaatagtgacactgaacaggatgttttgactgttaaacctgtaaggaaagtaaaagctggaaagttaattaaaggggggaaagtaacaacctccacttgggaagacagcaggactggtcgggagcaggagagtgtcagagatgagccagatagtgactcgtctctggaagtcctagaaattcctaatcctcagttagaagtagtagccattgattcttcagaatcaggagaagagaaaccagacagcccatctaaaaaggatatttggaactctacagagcaaaacccactagaaacgtctcgttctgggtgtgatgaagttagctctaccagtgaaattggcactcgctataaagatggcatccctgtaagtgtggcagaaactcagactgtgatctcctccataaaaggatcaaagaattcttcagaaatatcttcagagccaggagatgatgatgaacccacagaaggaagctttgagggacaccaagctgccgtaaatgcaattcagatatttgggaacttgctatatacctgttcagcagataaaactgttcgggtttataatctggtgagtcggaaatgtattggtgtctttgagggtcatacctccaaagttaactgcctcctggttactcagacctccgggaagaatgctgccctttacaccgggtccagtgaccataccatccgctgctataatgttaagagccgagagtgtgtggagcagttacagctggaagaccgggtcctctgcctccacagtagatggcgaatcctctatgcgggactggcaaatggcactgtggtcaccttcaacataaagaacaacaaacgacttgagatctttgaatgccatggccctcgggcagtcagctgtcttgctacagctcaggaaggtgcccgaaaactgctggtcgtggggtcttatgactgcacaattagtgtacgcgatgcccggaatggactgctcctcagaactctggagggccatagcaaaaccattctttgcatgaagactggtgagctcgtgcggatctataaaggtcacaatcatgcagtgactgtggtgaatatcctaggaaaagtgatggtgactgcttgcctggataaatttgttcgtgtctatgaattacagtctcatgatcgattacaagtttatggaggacacaaagacatgattatgtgtatgaccatccataaaagcatgatttacactggctgttatgatggcagtattcaggccgtgaggcttaatctgatgcagaattaccgctgttggtggcatggttgctctctgatatttggcgttgtagatcatttaaaacaacacttgctgaccgaccacactaatcccaacttccagactctgaaatgtcgctggaagaactgcgatgcttttttcactgctaggaaaggatccaaacaggatgctgcaggacatattgaacgacatgctgaagatgacagcaaaattgattcatgaagttttttgcctcccacgttgggaagtcattagttgaactattttcacattggccccccacacaggccactctcttccctttcttggtgaagtaaggaaggagaaagtggttactagccaggcatacccctagcataagtctgggcagctctatgggatgataaattacacttttaagttcttgctggaggttttaaatagatttagacaaatgttaaggaaccatacttctctgggacagcatggcatatagtgatatatgctatttgcgttctccagatgtttattgaagatacagatcctaattggttacccagtttgaccctaatcatatgtatattttattgatttcagtttgcaatttttaatttatgttcttatgatggtttaaacctatagtcaggcttttaagtacaagtttgtttaagtgccagactttgaggatcagttttaatttctccatttgtaatagctgggtatttaaactggaagcaaatagttttctttcttaacaattatgtgcagtgtgtgtcactgttttcttgctttatagatagagctggctttaagtgctaaaggacacagtagatttttgacaaacagtggctgctctgctgactatcttttaggaattcaggaagcaaatcacatagtgacaagtccttacagacaccacttctagtaaatctctgtaaatgtggatagaaagctcagtgtgaggcagtgcgtagacctaacgtctacctttacatctgctgttgaacctgggcactacctgttacagatcctgtcaggctgttgaactggaggtgtacctttatcttcctttctagtgtctgaccctgcaagcctaatgttggtttgaacccttttggtttgttcagttgccagcctccatctctcccactgtatggccgtgcctagaccgatggcagccatcgaatattcctctgggctcacggggtgttttccacccccctgcagcaactaagatggtgggggagagggggttagaataaagcatctgaatacagttttcaggacctcaagcagacttcctagagacttgtttctgagacagttctttgccttcacttccctgctagctgggaaagaagagtggagcagagactctgcctggccactgagaacagccaaattcacaaaccctcagtggggctttgtttttggattttctccggactcatcagtaaacctgtagaagtgtcgctttccagccttttgtttctggatcctcaaaactcagaacgtggccgggcgtggtggctcacgcctgtaatcccagcactttgggaggctgaggcaggcagatcacctgaggctaggagttgcagaccagcctggccaacatggcaaaaccccgtctctactaaaaatacaaaaagccgggcgtggtgggcgcctgtaatcccagctgctcaggaggctgaggcaggagaatcgcttgaacccgggaggcagagattgcagtaagctgagatcgtgccactgcactccagcctggtgacagagtgagactccgtctcaaaaaaaaaaaaaaaaactcagcttcttcagagagataaaattgggggaggagcccagggccacataccaagctttgggacatggtgcctcatgctctctgggattgcagaccatccaggtctgtcttcgcccctgttagtgcacatatatccactcacatgtcttccctcaggctatcgggcagggggacttcaccagggggtttatggataggcttcaagagggtctgtgagcccccagaaattgtgtgtgagactgagtatgtgttcttttttccaggaaaggctccagtggttcttacttgatccaaaaaatgtcaagaattaatctaggaggccgggcctggtggctcacacctgtaatcccagctctttgggaggccgaggcgggtggatcactcaaggtcaggcatttgagaccagcctggccaacatagtgaaaccccgtctctattaaaaatacaaaaattagctgggtgtggtggtatgtgcctgtagtctcagctactcaggaggctgagacaggagaatcacttgaaccctggaggtagaagttgcagtgagccaagatcatactactgcactccagcctgggcgacaagagtgaaactccacctcaaaaaaaaaaaaaaaagagttaatctaggagataatgaatggcctagtactagataatatatggccccacaagctcttgacttctgtccttggggaaagccattttgttaaccacactagtgagatttacatgatgcttaatggagaacagagaagatcttgttgcaaaaggtgtattaaatatttgtgctgtttctgtatgagattgagaagcttttcccacctctcacccctatttcctataaggatatccagagaagccaaactgttctgtgggtttgggaatggtcatttcccgggaaaatgcatctggatcgatgactaaacctggcccttttctctgggctgtagtgaagccgcattttcacgctggctggcagtgtgctgagagcctcgaatgctctgcggcgtagtgcccttctgccctgcctgacgatgtatcgaaaagatgagagtgaaggagactttgtgcagcaggaaacgggtaggtgaggtgttgggcagttgtgggaacttctgagagtattacagagtggtagaatcggtaagaactctgatttggacttcgctttggtggaactgtgtgcctatacctgcctgtgtgtgtgcaagtgtgcaggttcctttgtatgtatgtgtacgtgtgggaacctgtgtttgtcatatttttcttcatttcacaaaggctttttttgaagcagtggcagtatgcctttgtttcaagaacacatgaaattcttttaacaccagattagtgtgttaccccaaatgaacggttctagccctctattaagaaataaagggaccataagcattttggctgcttatggctgtgtgttactacttacaagagtcttgaaaattatacagaactttgccttctttttttaatgtcttccacaatgttgtgactgattataaccctgtttcccctcagagaagagctatggctcagggatctgtgttgactctggcatttagtggctttgtgaaggaaagaaaccattaaatgacctgacaaaaactgactcatgtctttaaagtagttgaagccacttttagaatgttactctcggttgcttttgtctaattctaatggcttaaagccaagaaaaccatagtataaatctttttgtgtacctatgctagtgtttaaatggcagttcgttgtgataaagtatcagtcacttcaagttttctgtgaaagtttttaattaggttaaaaataattttggcatacgtctctactcagtttataaagcagttccacaccatgcaaacaaaactctaacagcaaaggttatcttgacctgatgttacttgaatctgagagaaagtcattacttactactgcactcctgcttttgtgggaaaaattttcttcttccccagaagagttaacagttgagtgttcagctcctgacttacctttaatttagaggcaatattattactgtttaagtgattatttgcttaacacaggttttattttgtctttttgctggtagattatacaagggacaactttagtgatgaggcatgtggatgatttggtgggagtaggtatatacttagtggaatggtttattttatggaagagaattcattggaggtgagattgaagtatattgtgaagtgggatttgaacagcacatatgctctggtttgctcaaataactgcagtttatgcttacatctaaattttgtttctgttacctaaacgggagcttctagaattacgaaggccatacctgccacatttataaaataatggttttatccctgcccccaaatcatcaggttcctcgggtttaagagaagtggtctaatagacaggaatagaagttgtggtggaggtgatttgggatagactaggtttccttatgcaagtggatatgagctcctcatagaaaccagacctactgtattagacagtaacctctaacctcacctccaagcccaagtatatggccctgctgggttacctggtgactacatttcccagattcactctaaattcaaggtagtgacccaaataaattgggaaaggagggggtcaaggaggaaaagctgttgaaaatctttctcctatttaagagaaatatatgccctagagctgctccagcacccttggtttctgatttttttaatattgaatatggattagaagaatgaaatcagatgacacctgactgcaaaaatgtttataagcaaatagccttcttacattttggtataaagctgtgaacttcgtaactttgtaaagcaagatataaagcaaatacaagaggaaaataaagtacttttactaattg

SEQ ID NO: 441303 - DNA, 10413 bp, Homo sapiens
acgcgggggagtgcagctggcaccatgggtgtgctccagagcaacttctgcttgctctgagccccctgccctgcctcccctttcaccatgtttcctctgacaagattttaagtacagcaattcaagaagatttctcctcctaaacgacatttatctgaagtctattgcctcttgattgctggaaaagaatcttaaaatcatttcaaaagtaacttataaacaaacttattaaaagtgatgaaaggagcattgaaattaattagcactaatttttcactgtgccaaagtgtgcagtgtccttcagaggaaacaataacagatctggtgagtgtgccatgccagtggggagaattgaatgtccctcatctccctctttccctagggacattagtcatgagtgccgagtgtgcggggtcacagaagtgggtctttctgcatatgcaaagcacatttctggccagttgcacaaagataacgttgatgcccaggaaagagaagatgatggaaaaggagaggaagaggaagaagattattttgacaaggaactcattcagttaataaaacaaaggaaagaacaaagtcgacaagatgaaccttccaatagcaaccaagaaataaactctgatgacagacgaccccaatggagacgagaagaccgaattccttaccaagacagagagagttacagtcagcctgcatggcatcatcgtggacctccacagcgggattggaaatgggaaaaagatggctttaataatactaggaaaaacagctttccacattctttgaggaatggtggtggaccaagaggacgttccgggtggcataagggtgttgcaggaggctcctcgacttggtttcacaaccatagtaattctggaggtggttggctttcaaatagtggagcagtagattggaatcataatggtacaggaaggaattccagttggctttctgaaggaacaggtggcttttccagttggcatatgaacaacagtaacggaaactggaaatccagtgtacgtagtacaaataattggaattacagtggccctggagacaaatttcaaccaggcagaaacagaaattctaactgtcaaatggaagacatgactatgctatggaacaagaaatctaataagtcaaacaaatacagtcacgacagatataattggcagcggcaagaaaatgacaaacttggtacagttgccacatatagaggtccttctgaaggatttacaagtgataaatttccttcagaaggcttactcgacttcaattttgagcagctggaaagccaaaccactaaacaagcagacactgctacttccaaagttagtggaaagaatggcagtgcggcaagggaaaagcctcgtcgctggacgccttacccttctcagaagactctggatttacagtcgggattgaaagacatcactggtaacaagtcagaaatgatagagaaacctctctttgattttagcttgataactacaggaatacaggagccccaaactgatgaaacacgtaattccccaacacagaaaacacaaaaagaaatacatactggatctcttaatcacaaggcctcttctgattccgctgcttccttcgaggtggtgagacagtgccccactgcagaaaaacctgaacaagagcatacaccaaataaaatgccatcattgaaatccccactccttccatgtccagccactaaatcattgtctcaaaagcaagatccaaagaatatctcaaaaaacaccaaaacaaattttttttcccctggagaacactcaaatccctcgaacaagcccactgtggaagataaccatggtccttacatatccaaactgcgtagttcatgtcctcatgttttaaaagggaataaaagtacatttggctctcaaaagcaatctggtgataatttaaatgatactttacgaaaggccaaagaggtgctacagtgtcatgagtcattgcaaaatccacttcttagcacttctaaaagtaccaggaactatgcaaaagcaagtagaaatgtagaagaatctgaaaaagggtctttgaaaattgagtttcaagtgcacgcactagaagatgaaagtgatggagagacatctgacacggaaaagcatggaacaaaaattggaaccctaggttctgcaactacagaattgttatctggcagcactcgaactgctgatgagaaagaggaggatgaccgcatcctgaagacttctagagagctatccacttccccatgtaatcccatagttcgccagaaagaatctgaattacaaatgacatctgcagccagtccacaccctggcttattgctagacttgaaaacctctctagaagatgcacaggttgatgactctattaaatctcatgtatcttatgaaacagaaggctttgagagtgctagcttggatgcagagcttcaaaaaagtgacatcagtcagccctcgggccctctcctgcctgaactaagtaagcttggctttcctgcctcacttcagagggatctaacccggcacattagtttgaagagcaaaactggagtacaccttcctgagccaaacctcaatagtgcccgccgcattcgcaatattagcggtcaccgaaagagtgagacagagaaggagtctgggctcaagccaaccctacggcagattctaaatgcatctcggagaaatgtcaactgggaacaggtcattcagcaagtaaccaagaaaaagcaagagctgggcaaaggcttacccaggtttggcatagaaatggtaccccttgttcaaaatgaacaagaagccttagatttggatggggaacctgatctgtccagtctagaaggattccagtgggaaggtgtttccatttcctcgtcccctggcttggcaagaaagcgaagcctttctgagagcagcgtgatcatggacagagctccttctgtgtatagcttcttcagtgaggaaggtacaggcaaagaaaatgagccccagcagatggtttcacctagtaactcattgagggctggacagagccagaaagcaaccatgcacctcaaacaagaagtgacacctcgggctgcctccctccgaacaggtgaaagggctgaaaatgttgctacccaaaggcgacatagtgcacaattatcctctgaccatataatacctttgatgcatttggcaaaagacttgaacagccaggagaggtctataccaccgtcagagaatcagaattcccaggagagtaatggagagggaaactgtctgtcatcaagcgcatcctcagcccttgcgatctccagtttagcggatgcagccacagatagtagctgtacctctggtgctgaacaaaatgatggccaaagtattagaaagaaacgaagagccactggagatggatcttctcctgaactcccaagtcttgagagaaaaaataaaagaaggaaaattaaaggaaaaaaagaacgttctcaggttgaccagctgctgaatatttctttaagggaggaagaacttagtaagtcattgcagtgcatggataacaatcttctgcaagcccgtgcagcccttcagacagcttatgtggaagttcagaggctacttatgctcaagcagcagataactatggagatgagtgcactgaggacccatagaatacagattctacagggattacaagaaacatatgaaccttctgagcacccagaccaggttccctgtagcctcacacgagaacgaaggaacagtagatctcaaacatccattgatgccgcactgctgcccactccctttttcccactttttctggagcctccatcttcccatgtgtctccatcacccaccggagcctctcttcaaataaccacgtctcctactttccaaacccatggcagtgtccctgctccagactcatcagttcagattaaacaagagcccatgtctcctgaacaagatgagaatgtgaatgctgtgccaccaagctctgcctgcaatgtgtccaaggaattactggaagctaatagagagatcagtgacagttgtccagtttatccagtcatcactgctagattgtccttaccagagtcaacagaaagtttccatgagcctagccaagaactgaagttttctgtggagcaaagaaataccagaaacagagaaaactctccctcttcccaatcagctggtctttctagcataaataaagaaggggaagagccaaccaaaggcaatagtgggtctgaagcctgtaccagttcttttctaagattgtcttttgcttcagaaacccctttggagaaggaaccccactctccagctgaccagcctgaacaacaggcagaatccactttgacatcagctgagactaggggaagcaagaaaaagaagaaactccggaagaagaaaagtctacgggctgcccatgttcctgagaatagtgacactgaacaggatgttttgactgttaaacctgtaaggaaagtaaaagctggaaagttaattaaaggggggaaagtaacaacctccacttgggaagacagcaggactggtcgggagcaggagagtgtcagagatgagccagatagtgactcgtctctggaagtcctagaaattcctaatcctcagttagaagtagtagccattgattcttcagaatcaggagaagagaaaccagacagcccatctaaaaaggatatttggaactctacagagcaaaacccactagaaacgtctcgttctgggtgtgatgaagttagctctaccagtgaaattggcactcgctataaagatggcatccctgtaagtgtggcagaaactcagactgtgatctcctccataaaaggatcaaagaattcttcagaaatatcttcagagccaggagatgatgatgaacccacagaaggaagctttgagggacaccaagctgccgtaaatgcaattcagatatttgggaacttgctatatacctgttcagcagataaaactgttcgggtttataatctggtgagtcggaaatgtattggtgtctttgagggtcatacctccaaagttaactgcctcctggttactcagacctccgggaagaatgctgccctttacaccgggtccagtgaccataccatccgctgctataatgttaagagccgagagtgtgtggagcagttacagctggaagaccgggtcctctgcctccacagtagatggcgaatcctctatgcgggactggcaaatggcactgtggtcaccttcaacataaagaacaacaaacgacttgagatctttgaatgccatggccctcgggcagtcagctgtcttgctacagctcaggaaggtgcccgaaaactgctggtcgtggggtcttatgactgcacaattagtgtacgcgatgcccggaatggactgctcctcagaactctggagggccatagcaaaaccattctttgcatgaaggtggtgaatgatctcgtgttcagtggctccagtgatcagtcagtccatgctcacaacattcacactggtgagctcgtgcggatctataaaggtcacaatcatgcagtgactgtggtgaatatcctaggaaaagtgatggtgactgcttgcctggataaatttgttcgtgtctatgaattacagtctcatgatcgattacaagtttatggaggacacaaagacatgattatgtgtatgaccatccataaaagcatgatttacactggctgttatgatggcagtattcaggccgtgaggcttaatctgatgcagaattaccgctgttggtggcatggttgctctctgatatttggcgttgtagatcatttaaaacaacacttgctgaccgaccacactaatcccaacttccagactctgaaatgtcgctggaagaactgcgatgcttttttcactgctaggaaaggatccaaacaggatgctgcaggacatattgaacgacatgctgaagatgacagcaaaattgattcatgaagttttttgcctcccacgttgggaagtcattagttgaactattttcacattggccccccacacaggccactctcttccctttcttggtgaagtaaggaaggagaaagtggttactagccaggcatacccctagcataagtctgggcagctctatgggatgataaattacacttttaagttcttgctggaggttttaaatagatttagacaaatgttaaggaaccatacttctctgggacagcatggcatatagtgatatatgctatttgcgttctccagatgtttattgaagatacagatcctaattggttacccagtttgaccctaatcatatgtatattttattgatttcagtttgcaatttttaatttatgttcttatgatggtttaaacctatagtcaggcttttaagtacaagtttgtttaagtgccagactttgaggatcagttttaatttctccatttgtaatagctgggtatttaaactggaagcaaatagttttctttcttaacaattatgtgcagtgtgtgtcactgttttcttgctttatagatagagctggctttaagtgctaaaggacacagtagatttttgacaaacagtggctgctctgctgactatcttttaggaattcaggaagcaaatcacatagtgacaagtccttacagacaccacttctagtaaatctctgtaaatgtggatagaaagctcagtgtgaggcagtgcgtagacctaacgtctacctttacatctgctgttgaacctgggcactacctgttacagatcctgtcaggctgttgaactggaggtgtacctttatcttcctttctagtgtctgaccctgcaagcctaatgttggtttgaacccttttggtttgttcagttgccagcctccatctctcccactgtatggccgtgcctagaccgatggcagccatcgaatattcctctgggctcacggggtgttttccacccccctgcagcaactaagatggtgggggagagggggttagaataaagcatctgaatacagttttcaggacctcaagcagacttcctagagacttgtttctgagacagttctttgccttcacttccctgctagctgggaaagaagagtggagcagagactctgcctggccactgagaacagccaaattcacaaaccctcagtggggctttgtttttggattttctccggactcatcagtaaacctgtagaagtgtcgctttccagccttttgtttctggatcctcaaaactcagaacgtggccgggcgtggtggctcacgcctgtaatcccagcactttgggaggctgaggcaggcagatcacctgaggctaggagttgcagaccagcctggccaacatggcaaaaccccgtctctactaaaaatacaggagaatcgcttgaacccgggaggcagagattgcagtaagctgagatcgtgccactgcactccagcctggtgacagagtgagactccgtctcaaaaaaaaaaaaaaaaactcagcttcttcagagagataaaattgggggaggagcccagggccacataccaagctttgggacatggtgcctcatgctctctgggattgcagaccatccaggtctgtcttcgcccctgttagtgcacatatatccactcacatgtcttccctcaggctatcgggcagggggacttcaccagggggtttatggataggcttcaagagggtctgtgagcccccagaaattgtgtgtgagactgagtatgtgttcttttttccaggaaaggctccagtggttcttacttgatccaaaaaatgtcaagaattaatctaggaggccgggcctggtggctcacacctgtaatcccagctctttgggaggccgaggcgggtggatcactcaaggtcaggcatttgagaccagcctggccaacatagtgaaaccccgtctctattaaaaatacaaaaattagctgggtgtggtggtatgtgcctgtagtctcagctactcaggaggctgagacaggagaatcacttgaaccctggaggtagaagttgcagtgagccaagatcatactactgcactccagcctgggcgacaagagtgaaactccacctcaaaaaaaaaaaaaaaagagttaatctaggagataatgaatggcctagtactagataatatatggccccacaagctcttgacttctgtccttggggaaagccattttgttaaccacactagtgagatttacatgatgcttaatggagaacagagaagatcttgttgcaaaaggtgtattaaatatttgtgctgtttctgtatgagattgagaagcttttcccacctctcacccctatttcctataaggatatccagagaagccaaactgttctgtgggtttgggaatggtcatttcccgggaaaatgcatctggatcgatgactaaacctggcccttttctctgggctgtagtgaagccgcattttcacgctggctggcagtgtgctgagagcctcgaatgctctgcggcgtagtgcccttctgccctgcctgacgatgtatcgaaaagatgagagtgaaggagactttgtgcagcaggaaacgggtaggtgaggtgttgggcagttgtgggaacttctgagagtattacagagtggtagaatcggtaagaactctgatttggacttcgctttggtggaactgtgtgcctatacctgcctgtgtgtgtgcaagtgtgcaggttcctttgtatgtatgtgtacgtgtgggaacctgtgtttgtcatatttttcttcatttcacaaaggctttttttgaagcagtggcagtatgcctttgtttcaagaacacatgaaattcttttaacaccagattagtgtgttaccccaaatgaacggttctagccctctattaagaaataaagggaccataagcattttggctgcttatggctgtgtgttactacttacaagagtcttgaaaattatacagaactttgccttctttttttaatgtcttccacaatgttgtgactgattataaccctgtttcccctcagagaagagctatggctcagggatctgtgttgactctggcatttagtggctttgtgaaggaaagaaaccattaaatgacctgacaaaaactgactcatgtctttaaagtagttgaagccacttttagaatgttactctcggttgcttttgtctaattctaatggcttaaagccaagaaaaccatagtataaatctttttgtgtacctatgctagtgtttaaatggcagttcgttgtgataaagtatcagtcacttcaagttttctgtgaaagtttttaattaggttaaaaataattttggcatacgtctctactcagtttataaagcagttccacaccatgcaaacaaaactctaacagcaaaggttatcttgacctgatgttacttgaatctgagagaaagtcattacttactactgcactcctgcttttgtgggaaaaattttcttcttccccagaagagttaacagttgagtgttcagctcctgacttacctttaatttagaggcaatattattactgtttaagtgattatttgcttaacacaggttttattttgtctttttgctggtagattatacaagggacaactttagtgatgaggcatgtggatgatttggtgggagtaggtatatacttagtggaatggtttattttatggaagagaattcattggaggtgagattgaagtatattgtgaagtgggatttgaacagcacatatgctctggtttgctcaaataactgcagtttatgcttacatctaaattttgtttctgttacctaaacgggagcttctagaattacgaaggccatacctgccacatttataaaataatggttttatccctgcccccaaatcatcaggttcctcgggtttaagagaagtggtctaatagacaggaatagaagttgtggtggaggtgatttgggatagactaggtttccttatgcaagtggatatgagctcctcatagaaaccagacctactgtattagacagtaacctctaacctcacctccaagcccaagtatatggccctgctgggttacctggtgactacatttcccagattcactctaaattcaaggtagtgacccaaataaattgggaaaggagggggtcaaggaggaaaagctgttgaaaatctttctcctatttaagagaaatatatgccctagagctgctccagcacccttggtttctgatttttttaatattgaatatggattagaagaatgaaatcagatgacacctgactgcaaaaatgtttataagcaaatagccttcttacattttggtataaagctgtgaacttcgtaactttgtaaagcaagatataaagcaaatacaagaggaaaataaagtacttttactaattg

SEQ ID NO: 441304 - DNA, 10471 bp, Homo sapiens
acgcgggggagtgcagctggcaccatgggtgtgctccagagcaacttctgcttgctctgagccccctgccctgcctcccctttcaccatgtttcctctgacaagattttaagtacagcaattcaagaagatttctcctcctaaacgacatttatctgaagtctattgcctcttgattgctggaaaagaatcttaaaatcatttcaaaagtaacttataaacaaacttattaaaagtgatgaaaggagcattgaaattaattagcactaatttttcactgtgccaaagtgtgcagtgtccttcagaggaaacaataacagatctggtgagtgtgccatgccagtggggagaattgaatgtccctcatctccctctttccctagggacattagtcatgagtgccgagtgtgcggggtcacagaagtgggtctttctgcatatgcaaagcacatttctggccagttgcacaaagataacgttgatgcccaggaaagagaagatgatggaaaaggagaggaagaggaagaagattattttgacaaggaactcattcagttaataaaacaaaggaaagaacaaagtcgacaagatgaaccttccaatagcaaccaagaaataaactctgatgacagacgaccccaatggagacgagaagaccgaattccttaccaagacagagagagttacagtcagcctgcatggcatcatcgtggacctccacagcgggattggaaatgggaaaaagatggctttaataatactaggaaaaacagctttccacattctttgaggaatggtggtggaccaagaggacgttccgggtggcataagggtgttgcaggaggctcctcgacttggtttcacaaccatagtaattctggaggtggttggctttcaaatagtggagcagtagattggaatcataatggtacaggaaggaattccagttggctttctgaaggaacaggtggcttttccagttggcatatgaacaacagtaacggaaactggaaatccagtgtacgtagtacaaataattggaattacagtggccctggagacaaatttcaaccaggcagaaacagaaattctaactgtcaaatggaagacatgactatgctatggaacaagaaatctaataagtcaaacaaatacagtcacgacagatataattggcagcggcaagaaaatgacaaacttggtacagttgccacatatagaggtccttctgaaggatttacaagtgataaatttccttcagaaggcttactcgacttcaattttgagcagctggaaagccaaaccactaaacaagcagacactgctacttccaaagttagtggaaagaatggcagtgcggcaagggaaaagcctcgtcgctggacgccttacccttctcagaagactctggatttacagtcgggattgaaagacatcactggtaacaagtcagaaatgatagagaaacctctctttgattttagcttgataactacaggaatacaggagccccaaactgatgaaacacgtaattccccaacacagaaaacacaaaaagaaatacatactggatctcttaatcacaaggcctcttctgattccgctgcttccttcgaggtggtgagacagtgccccactgcagaaaaacctgaacaagagcatacaccaaataaaatgccatcattgaaatccccactccttccatgtccagccactaaatcattgtctcaaaagcaagatccaaagaatatctcaaaaaacaccaaaacaaattttttttcccctggagaacactcaaatccctcgaacaagcccactgtggaagataaccatggtccttacatatccaaactgcgtagttcatgtcctcatgttttaaaagggaataaaagtacatttggctctcaaaagcaatctggtgataatttaaatgatactttacgaaaggccaaagaggtgctacagtgtcatgagtcattgcaaaatccacttcttagcacttctaaaagtaccaggaactatgcaaaagcaagtagaaatgtagaagaatctgaaaaagggtctttgaaaattgagtttcaagtgcacgcactagaagatgaaagtgatggagagacatctgacacggaaaagcatggaacaaaaattggaaccctaggttctgcaactacagaattgttatctggcagcactcgaactgctgatgagaaagaggaggatgaccgcatcctgaagacttctagagagctatccacttccccatgtaatcccatagttcgccagaaagaatctgaattacaaatgacatctgcagccagtccacaccctggcttattgctagacttgaaaacctctctagaagatgcacaggttgatgactctattaaatctcatgtatcttatgaaacagaaggctttgagagtgctagcttggatgcagagcttcaaaaaagtgacatcagtcagccctcgggccctctcctgcctgaactaagtaagcttggctttcctgcctcacttcagagggatctaacccggcacattagtttgaagagcaaaactggagtacaccttcctgagccaaacctcaatagtgcccgccgcattcgcaatattagcggtcaccgaaagagtgagacagagaaggagtctgggctcaagccaaccctacggcagattctaaatgcatctcggagaaatgtcaactgggaacaggtcattcagcaagtaaccaagaaaaagcaagagctgggcaaaggcttacccaggtttggcatagaaatggtaccccttgttcaaaatgaacaagaagccttagatttggatggggaacctgatctgtccagtctagaaggattccagtgggaaggtgtttccatttcctcgtcccctggcttggcaagaaagcgaagcctttctgagagcagcgtgatcatggacagagctccttctgtgtatagcttcttcagtgaggaaggtacaggcaaagaaaatgagccccagcagatggtttcacctagtaactcattgagggctggacagagccagaaagcaaccatgcacctcaaacaagaagtgacacctcgggctgcctccctccgaacaggtgaaagggctgaaaatgttgctacccaaaggcgacatagtgcacaattatcctctgaccatataatacctttgatgcatttggcaaaagacttgaacagccaggagaggtctataccaccgtcagagaatcagaattcccaggagagtaatggagagggaaactgtctgtcatcaagcgcatcctcagcccttgcgatctccagtttagcggatgcagccacagatagtagctgtacctctggtgctgaacaaaatgatggccaaagtattagaaagaaacgaagagccactggagatggatcttctcctgaactcccaagtcttgagagaaaaaataaaagaaggaaaattaaaggaaaaaaagaacgttctcaggttgaccagctgctgaatatttctttaagggaggaagaacttagtaagtcattgcagtgcatggataacaatcttctgcaagcccgtgcagcccttcagacagcttatgtggaagttcagaggctacttatgctcaagcagcagataactatggagatgagtgcactgaggacccatagaatacagattctacagggattacaagaaacatatgaaccttctgagcacccagaccaggttccctgtagcctcacacgagaacgaaggaacagtagatctcaaacatccattgatgccgcactgctgcccactccctttttcccactttttctggagcctccatcttcccatgtgtctccatcacccaccggagcctctcttcaaataaccacgtctcctactttccaaacccatggcagtgtccctgctccagactcatcagttcagattaaacaagagcccatgtctcctgaacaagatgagaatgtgaatgctgtgccaccaagctctgcctgcaatgtgtccaaggaattactggaagctaatagagagatcagtgacagttgtccagtttatccagtcatcactgctagattgtccttaccagagtcaacagaaagtttccatgagcctagccaagaactgaagttttctgtggagcaaagaaataccagaaacagagaaaactctccctcttcccaatcagctggtctttctagcataaataaagaaggggaagagccaaccaaaggcaatagtgggtctgaagcctgtaccagttcttttctaagattgtcttttgcttcagaaacccctttggagaaggaaccccactctccagctgaccagcctgaacaacaggcagaatccactttgacatcagctgagactaggggaagcaagaaaaagaagaaactccggaagaagaaaagtctacgggctgcccatgttcctgagaatagtgacactgaacaggatgttttgactgttaaacctgtaaggaaagtaaaagctggaaagttaattaaaggggggaaagtaacaacctccacttgggaagacagcaggactggtcgggagcaggagagtgtcagagatgagccagatagtgactcgtctctggaagtcctagaaattcctaatcctcagttagaagtagtagccattgattcttcagaatcaggagaagagaaaccagacagcccatctaaaaaggatatttggaactctacagagcaaaacccactagaaacgtctcgttctgggtgtgatgaagttagctctaccagtgaaattggcactcgctataaagatggcatccctgtaagtgtggcagaaactcagactgtgatctcctccataaaaggatcaaagaattcttcagaaatatcttcagagccaggagatgatgatgaacccacagaaggaagctttgagggacaccaagctgccgtaaatgcaattcagatatttgggaacttgctatatacctgttcagcagataaaactgttcgggtttataatctggtgagtcggaaatgtattggtgtctttgagggtcatacctccaaagttaactgcctcctggttactcagacctccgggaagaatgctgccctttacaccgggtccagtgaccataccatccgctgctataatgttaagagccgagagtgtgtggagcagttacagctggaagaccgggtcctctgcctccacagtagatggcgaatcctctatgcgggactggcaaatggcactgtggtcaccttcaacataaagaacaacaaacgacttgagatctttgaatgccatggccctcgggcagtcagctgtcttgctacagctcaggaaggtgcccgaaaactgctggtcgtggggtcttatgactgcacaattagtgtacgcgatgcccggaatggactgctcctcagaactctggagggccatagcaaaaccattctttgcatgaaggtggtgaatgatctcgtgttcagtggctccagtgatcagtcagtccatgctcacaacattcacactggtgagctcgtgcggatctataaaggtcacaatcatgcagtgactgtggtgaatatcctaggaaaagtgatggtgactgcttgcctggataaatttgttcgtgtctatgaattacagtctcatgatcgattacaagtttatggaggacacaaagacatgattatgtgtatgaccatccataaaagcatgatttacactggctgttatgatggcagtattcaggccgtgaggcttaatctgatgcagaattaccgctgttggtggcatggttgctctctgatatttggcgttgtagatcatttaaaacaacacttgctgaccgaccacactaatcccaacttccagactctgaaatgtcgctggaagaactgcgatgcttttttcactgctaggaaaggatccaaacaggatgctgcaggacatattgaacgacatgctgaagatgacagcaaaattgattcatgaagttttttgcctcccacgttgggaagtcattagttgaactattttcacattggccccccacacaggccactctcttccctttcttggtgaagtaaggaaggagaaagtggttactagccaggcatacccctagcataagtctgggcagctctatgggatgataaattacacttttaagttcttgctggaggttttaaatagatttagacaaatgttaaggaaccatacttctctgggacagcatggcatatagtgatatatgctatttgcgttctccagatgtttattgaagatacagatcctaattggttacccagtttgaccctaatcatatgtatattttattgatttcagtttgcaatttttaatttatgttcttatgatggtttaaacctatagtcaggcttttaagtacaagtttgtttaagtgccagactttgaggatcagttttaatttctccatttgtaatagctgggtatttaaactggaagcaaatagttttctttcttaacaattatgtgcagtgtgtgtcactgttttcttgctttatagatagagctggctttaagtgctaaaggacacagtagatttttgacaaacagtggctgctctgctgactatcttttaggaattcaggaagcaaatcacatagtgacaagtccttacagacaccacttctagtaaatctctgtaaatgtggatagaaagctcagtgtgaggcagtgcgtagacctaacgtctacctttacatctgctgttgaacctgggcactacctgttacagatcctgtcaggctgttgaactggaggtgtacctttatcttcctttctagtgtctgaccctgcaagcctaatgttggtttgaacccttttggtttgttcagttgccagcctccatctctcccactgtatggccgtgcctagaccgatggcagccatcgaatattcctctgggctcacggggtgttttccacccccctgcagcaactaagatggtgggggagagggggttagaataaagcatctgaatacagttttcaggacctcaagcagacttcctagagacttgtttctgagacagttctttgccttcacttccctgctagctgggaaagaagagtggagcagagactctgcctggccactgagaacagccaaattcacaaaccctcagtggggctttgtttttggattttctccggactcatcagtaaacctgtagaagtgtcgctttccagccttttgtttctggatcctcaaaactcagaacgtggccgggcgtggtggctcacgcctgtaatcccagcactttgggaggctgaggcaggcagatcacctgaggctaggagttgcagaccagcctggccaacatggcaaaaccccgtctctactaaaaatacaaaaagccgggcgtggtgggcgcctgtaatcccagctgctcaggaggctgaggcaggagaatcgcttgaacccgggaggcagagattgcagtaagctgagatcgtgccactgcactccagcctggtgacagagtgagactccgtctcaaaaaaaaaaaaaaaaactcagcttcttcagagagataaaattgggggaggagcccagggccacataccaagctttgggacatggtgcctcatgctctctgggattgcagaccatccaggtctgtcttcgcccctgttagtgcacatatatccactcacatgtcttccctcaggctatcgggcagggggacttcaccagggggtttatggataggcttcaagagggtctgtgagcccccagaaattgtgtgtgagactgagtatgtgttcttttttccaggaaaggctccagtggttcttacttgatccaaaaaatgtcaagaattaatctaggaggccgggcctggtggctcacacctgtaatcccagctctttgggaggccgaggcgggtggatcactcaaggtcaggcatttgagaccagcctggccaacatagtgaaaccccgtctctattaaaaatacaaaaattagctgggtgtggtggtatgtgcctgtagtctcagctactcaggaggctgagacaggagaatcacttgaaccctggaggtagaagttgcagtgagccaagatcatactactgcactccagcctgggcgacaagagtgaaactccacctcaaaaaaaaaaaaaaaagagttaatctaggagataatgaatggcctagtactagataatatatggccccacaagctcttgacttctgtccttggggaaagccattttgttaaccacactagtgagatttacatgatgcttaatggagaacagagaagatcttgttgcaaaaggtgtattaaatatttgtgctgtttctgtatgagattgagaagcttttcccacctctcacccctatttcctataaggatatccagagaagccaaactgttctgtgggtttgggaatggtcatttcccgggaaaatgcatctggatcgatgactaaacctggcccttttctctgggctgtagtgaagccgcattttcacgctggctggcagtgtgctgagagcctcgaatgctctgcggcgtagtgcccttctgccctgcctgacgatgtatcgaaaagatgagagtgaaggagactttgtgcagcaggaaacgggtaggtgaggtgttgggcagttgtgggaacttctgagagtattacagagtggtagaatcggtaagaactctgatttggacttcgctttggtggaactgtgtgcctatacctgcctgtgtgtgtgcaagtgtgcaggttcctttgtatgtatgtgtacgtgtgggaacctgtgtttgtcatatttttcttcatttcacaaaggctttttttgaagcagtggcagtatgcctttgtttcaagaacacatgaaattcttttaacaccagattagtgtgttaccccaaatgaacggttctagccctctattaagaaataaagggaccataagcattttggctgcttatggctgtgtgttactacttacaagagtcttgaaaattatacagaactttgccttctttttttaatgtcttccacaatgttgtgactgattataaccctgtttcccctcagagaagagctatggctcagggatctgtgttgactctggcatttagtggctttgtgaaggaaagaaaccattaaatgacctgacaaaaactgactcatgtctttaaagtagttgaagccacttttagaatgttactctcggttgcttttgtctaattctaatggcttaaagccaagaaaaccatagtataaatctttttgtgtacctatgctagtgtttaaatggcagttcgttgtgataaagtatcagtcacttcaagttttctgtgaaagtttttaattaggttaaaaataattttggcatacgtctctactcagtttataaagcagttccacaccatgcaaacaaaactctaacagcaaaggttatcttgacctgatgttacttgaatctgagagaaagtcattacttactactgcactcctgcttttgtgggaaaaattttcttcttccccagaagagttaacagttgagtgttcagctcctgacttacctttaatttagaggcaatattattactgtttaagtgattatttgcttaacacaggttttattttgtctttttgctggtagattatacaagggacaactttagtgatgaggcatgtggatgatttggtgggagtaggtatatacttagtggaatggtttattttatggaagagaattcattggaggtgagattgaagtatattgtgaagtgggatttgaacagcacatatgctctggtttgctcaaataactgcagtttatgcttacatctaaattttgtttctgttacctaaacgggagcttctagaattacgaaggccatacctgccacatttataaaataatggttttatccctgcccccaaatcatcaggttcctcgggtttaagagaagtggtctaatagacaggaatagaagttgtggtggaggtgatttgggatagactaggtttccttatgcaagtggatatgagctcctcatagaaaccagacctactgtattagacagtaacctctaacctcacctccaagcccaagtatatggccctgctgggttacctggtgactacatttcccagattcactctaaattcaaggtagtgacccaaataaattgggaaaggagggggtcaaggaggaaaagctgttgaaaatctttctcctatttaagagaaatatatgccctagagctgctccagcacccttggtttctgatttttttaatattgaatatggattagaagaatgaaatcagatgacacctgactgcaaaaatgtttataagcaaatagccttcttacattttggtataaagctgtgaacttcgtaactttgtaaagcaagatataaagcaaatacaagtggtttagctcaggatagaagtaaaaaaaaa

SEQ ID NO: 441305 - DNA, 5537 bp, Homo sapiens
tggcacaaatagaagggttttgaggccaggcgaggtggctcacgtctgtagtcccagcactttgggagggtgaggcagggggatcgcttgagctcagaagttcgagaccagccagggcaacatggcaaaactcgatctctacaaaaaaatacaaaaattagcgggatgttgtggtgtgcacctgtactacttatgaggctgaggtgggagaatcacttgagcaccaaagatcgaggctgcagtgagccatgattgtgccactgtactctagcatgggcaacagagtgagaccttgactcaagcaaagcaaaacaaaacaaagaagggttttaaatggcatttcccgtgttgtctcatgcatcatttagaagcaccaccttggaaagagcaaggagattgcaaaccttttctttacaccaacatcaccaagtgatgcactttcatttgagaaacaatgagtgtattttgttatactgtgggtatactcgaatgcccttctaggctgcttcataatcattctggaaaggtggtgaatgatctcgtgttcagtggctccagtgatcagtcagtccatgctcacaacattcacactggtgagctcgtgcggatctataaaggtcacaatcatgcagtgactgtggtgaatatcctaggaaaagtgatggtgactgcttgcctggataaatttgttcgtgtctatgaattacagtctcatgatcgattacaagtttatggaggacacaaagacatgattatgtgtatgaccatccataaaagcatgatttacactggctgttatgatggcagtattcaggccgtgaggcttaatctgatgcagaattaccgctgttggtggcatggttgctctctgatatttggcgttgtagatcatttaaaacaacacttgctgaccgaccacactaatcccaacttccagactctgaaatgtcgctggaagaactgcgatgcttttttcactgctaggaaaggatccaaacaggatgctgcaggacatattgaacgacatgctgaagatgacagcaaaattgattcatgaagttttttgcctcccacgttgggaagtcattagttgaactattttcacattggccccccacacaggccactctcttccctttcttggtgaagtaaggaaggagaaagtggttactagccaggcatacccctagcataagtctgggcagctctatgggatgataaattacacttttaagttcttgctggaggttttaaatagatttagacaaatgttaaggaaccatacttctctgggacagcatggcatatagtgatatatgctatttgcgttctccagatgtttattgaagatacagatcctaattggttacccagtttgaccctaatcatatgtatattttattgatttcagtttgcaatttttaatttatgttcttatgatggtttaaacctatagtcaggcttttaagtacaagtttgtttaagtgccagactttgaggatcagttttaatttctccatttgtaatagctgggtatttaaactggaagcaaatagttttctttcttaacaattatgtgcagtgtgtgtcactgttttcttgctttatagatagagctggctttaagtgctaaaggacacagtagatttttgacaaacagtggctgctctgctgactatcttttaggaattcaggaagcaaatcacatagtgacaagtccttacagacaccacttctagtaaatctctgtaaatgtggatagaaagctcagtgtgaggcagtgcgtagacctaacgtctacctttacatctgctgttgaacctgggcactacctgttacagatcctgtcaggctgttgaactggaggtgtacctttatcttcctttctagtgtctgaccctgcaagcctaatgttggtttgaacccttttggtttgttcagttgccagcctccatctctcccactgtatggccgtgcctagaccgatggcagccatcgaatattcctctgggctcacggggtgttttccacccccctgcagcaactaagatggtgggggagagggggttagaataaagcatctgaatacagttttcaggacctcaagcagacttcctagagacttgtttctgagacagttctttgccttcacttccctgctagctgggaaagaagagtggagcagagactctgcctggccactgagaacagccaaattcacaaaccctcagtggggctttgtttttggattttctccggactcatcagtaaacctgtagaagtgtcgctttccagccttttgtttctggatcctcaaaactcagaacgtggccgggcgtggtggctcacgcctgtaatcccagcactttgggaggctgaggcaggcagatcacctgaggctaggagttgcagaccagcctggccaacatggcaaaaccccgtctctactaaaaatacaaaaagccgggcgtggtgggcgcctgtaatcccagctgctcaggaggctgaggcaggagaatcgcttgaacccgggaggcagagattgcagtaagctgagatcgtgccactgcactccagcctggtgacagagtgagactccgtctcaaaaaaaaaaaaaaaaactcagcttcttcagagagataaaattgggggaggagcccagggccacataccaagctttgggacatggtgcctcatgctctctgggattgcagaccatccaggtctgtcttcgcccctgttagtgcacatatatccactcacatgtcttccctcaggctatcgggcagggggacttcaccagggggtttatggataggcttcaagagggtctgtgagcccccagaaattgtgtgtgagactgagtatgtgttcttttttccaggaaaggctccagtggttcttacttgatccaaaaaatgtcaagaattaatctaggaggccgggcctggtggctcacacctgtaatcccagctctttgggaggccgaggcgggtggatcactcaaggtcaggcatttgagaccagcctggccaacatagtgaaaccccgtctctattaaaaatacaaaaattagctgggtgtggtggtatgtgcctgtagtctcagctactcaggaggctgagacaggagaatcacttgaaccctggaggtagaagttgcagtgagccaagatcatactactgcactccagcctgggcgacaagagtgaaactccacctcaaaaaaaaaaaaaaaagagttaatctaggagataatgaatggcctagtactagataatatatggccccacaagctcttgacttctgtccttggggaaagccattttgttaaccacactagtgagatttacatgatgcttaatggagaacagagaagatcttgttgcaaaaggtgtattaaatatttgtgctgtttctgtatgagattgagaagcttttcccacctctcacccctatttcctataaggatatccagagaagccaaactgttctgtgggtttgggaatggtcatttcccgggaaaatgcatctggatcgatgactaaacctggcccttttctctgggctgtagtgaagccgcattttcacgctggctggcagtgtgctgagagcctcgaatgctctgcggcgtagtgcccttctgccctgcctgacgatgtatcgaaaagatgagagtgaaggagactttgtgcagcaggaaacgggtaggtgaggtgttgggcagttgtgggaacttctgagagtattacagagtggtagaatcggtaagaactctgatttggacttcgctttggtggaactgtgtgcctatacctgcctgtgtgtgtgcaagtgtgcaggttcctttgtatgtatgtgtacgtgtgggaacctgtgtttgtcatatttttcttcatttcacaaaggctttttttgaagcagtggcagtatgcctttgtttcaagaacacatgaaattcttttaacaccagattagtgtgttaccccaaatgaacggttctagccctctattaagaaataaagggaccataagcattttggctgcttatggctgtgtgttactacttacaagagtcttgaaaattatacagaactttgccttctttttttaatgtcttccacaatgttgtgactgattataaccctgtttcccctcagagaagagctatggctcagggatctgtgttgactctggcatttagtggctttgtgaaggaaagaaaccattaaatgacctgacaaaaactgactcatgtctttaaagtagttgaagccacttttagaatgttactctcggttgcttttgtctaattctaatggcttaaagccaagaaaaccatagtataaatctttttgtgtacctatgctagtgtttaaatggcagttcgttgtgataaagtatcagtcacttcaagttttctgtgaaagtttttaattaggttaaaaataattttggcatacgtctctactcagtttataaagcagttccacaccatgcaaacaaaactctaacagcaaaggttatcttgacctgatgttacttgaatctgagagaaagtcattacttactactgcactcctgcttttgtgggaaaaattttcttcttccccagaagagttaacagttgagtgttcagctcctgacttacctttaatttagaggcaatattattactgtttaagtgattatttgcttaacacaggttttattttgtctttttgctggtagattatacaagggacaactttagtgatgaggcatgtggatgatttggtgggagtaggtatatacttagtggaatggtttattttatggaagagaattcattggaggtgagattgaagtatattgtgaagtgggatttgaacagcacatatgctctggtttgctcaaataactgcagtttatgcttacatctaaattttgtttctgttacctaaacgggagcttctagaattacgaaggccatacctgccacatttataaaataatggttttatccctgcccccaaatcatcaggttcctcgggtttaagagaagtggtctaatagacaggaatagaagttgtggtggaggtgatttgggatagactaggtttccttatgcaagtggatatgagctcctcatagaaaccagacctactgtattagacagtaacctctaacctcacctccaagcccaagtatatggccctgctgggttacctggtgactacatttcccagattcactctaaattcaaggtagtgacccaaataaattgggaaaggagggggtcaaggaggaaaagctgttgaaaatctttctcctatttaagagaaatatatgccctagagctgctccagcacccttggtttctgatttttttaatattgaatatggattagaagaatgaaatcagatgacacctgactgcaaaaatgtttataagcaaatagccttcttacattttggtataaagctgtgaacttcgtaactttgtaaagcaagatataaagcaaatacaagaggaaaataaagtacttttactaattg

SEQ ID NO: 441306 - DNA, 4291 bp, Homo sapiens
atgaatgagtagaatgagtgtgtgtagtagtaggctgtgcactcgggaatgtttggttatagagtttacatgtctatttgcgttctccagatgtttattgaagatacagatcctaattggttacccagtttgaccctaatcatatgtatattttattgatttcagtttgcaatttttaatttatgttcttatgatggtttaaacctatagtcaggcttttaagtacaagtttgtttaagtgccagactttgaggatcagttttaatttctccatttgtaatagctgggtatttaaactggaagcaaatagttttctttcttaacaattatgtgcagtgtgtgtcactgttttcttgctttatagatagagctggctttaagtgctaaaggacacagtagatttttgacaaacagtggctgctctgctgactatcttttaggaattcaggaagcaaatcacatagtgacaagtccttacagacaccacttctagtaaatctctgtaaatgtggatagaaagctcagtgtgaggcagtgcgtagacctaacgtctacctttacatctgctgttgaacctgggcactacctgttacagatcctgtcaggctgttgaactggaggtgtacctttatcttcctttctagtgtctgaccctgcaagcctaatgttggtttgaacccttttggtttgttcagttgccagcctccatctctcccactgtatggccgtgcctagaccgatggcagccatcgaatattcctctgggctcacggggtgttttccacccccctgcagcaactaagatggtgggggagagggggttagaataaagcatctgaatacagttttcaggacctcaagcagacttcctagagacttgtttctgagacagttctttgccttcacttccctgctagctgggaaagaagagtggagcagagactctgcctggccactgagaacagccaaattcacaaaccctcagtggggctttgtttttggattttctccggactcatcagtaaacctgtagaagtgtcgctttccagccttttgtttctggatcctcaaaactcagaacgtggccgggcgtggtggctcacgcctgtaatcccagcactttgggaggctgaggcaggcagatcacctgaggctaggagttgcagaccagcctggccaacatggcaaaaccccgtctctactaaaaatacaaaaagccgggcgtggtgggcgcctgtaatcccagctgctcaggaggctgaggcaggagaatcgcttgaacccgggaggcagagattgcagtaagctgagatcgtgccactgcactccagcctggtgacagagtgagactccgtctcaaaaaaaaaaaaaaaaactcagcttcttcagagagataaaattgggggaggagcccagggccacataccaagctttgggacatggtgcctcatgctctctgggattgcagaccatccaggtctgtcttcgcccctgttagtgcacatatatccactcacatgtcttccctcaggctatcgggcagggggacttcaccagggggtttatggataggcttcaagagggtctgtgagcccccagaaattgtgtgtgagactgagtatgtgttcttttttccaggaaaggctccagtggttcttacttgatccaaaaaatgtcaagaattaatctaggaggccgggcctggtggctcacacctgtaatcccagctctttgggaggccgaggcgggtggatcactcaaggtcaggcatttgagaccagcctggccaacatagtgaaaccccgtctctattaaaaatacaaaaattagctgggtgtggtggtatgtgcctgtagtctcagctactcaggaggctgagacaggagaatcacttgaaccctggaggtagaagttgcagtgagccaagatcatactactgcactccagcctgggcgacaagagtgaaactccacctcaaaaaaaaaaaaaaaagagttaatctaggagataatgaatggcctagtactagataatatatggccccacaagctcttgacttctgtccttggggaaagccattttgttaaccacactagtgagatttacatgatgcttaatggagaacagagaagatcttgttgcaaaaggtgtattaaatatttgtgctgtttctgtatgagattgagaagcttttcccacctctcacccctatttcctataaggatatccagagaagccaaactgttctgtgggtttgggaatggtcatttcccgggaaaatgcatctggatcgatgactaaacctggcccttttctctgggctgtagtgaagccgcattttcacgctggctggcagtgtgctgagagcctcgaatgctctgcggcgtagtgcccttctgccctgcctgacgatgtatcgaaaagatgagagtgaaggagactttgtgcagcaggaaacgggtaggtgaggtgttgggcagttgtgggaacttctgagagtattacagagtggtagaatcggtaagaactctgatttggacttcgctttggtggaactgtgtgcctatacctgcctgtgtgtgtgcaagtgtgcaggttcctttgtatgtatgtgtacgtgtgggaacctgtgtttgtcatatttttcttcatttcacaaaggctttttttgaagcagtggcagtatgcctttgtttcaagaacacatgaaattcttttaacaccagattagtgtgttaccccaaatgaacggttctagccctctattaagaaataaagggaccataagcattttggctgcttatggctgtgtgttactacttacaagagtcttgaaaattatacagaactttgccttctttttttaatgtcttccacaatgttgtgactgattataaccctgtttcccctcagagaagagctatggctcagggatctgtgttgactctggcatttagtggctttgtgaaggaaagaaaccattaaatgacctgacaaaaactgactcatgtctttaaagtagttgaagccacttttagaatgttactctcggttgcttttgtctaattctaatggcttaaagccaagaaaaccatagtataaatctttttgtgtacctatgctagtgtttaaatggcagttcgttgtgataaagtatcagtcacttcaagttttctgtgaaagtttttaattaggttaaaaataattttggcatacgtctctactcagtttataaagcagttccacaccatgcaaacaaaactctaacagcaaaggttatcttgacctgatgttacttgaatctgagagaaagtcattacttactactgcactcctgcttttgtgggaaaaattttcttcttccccagaagagttaacagttgagtgttcagctcctgacttacctttaatttagaggcaatattattactgtttaagtgattatttgcttaacacaggttttattttgtctttttgctggtagattatacaagggacaactttagtgatgaggcatgtggatgatttggtgggagtaggtatatacttagtggaatggtttattttatggaagagaattcattggaggtgagattgaagtatattgtgaagtgggatttgaacagcacatatgctctggtttgctcaaataactgcagtttatgcttacatctaaattttgtttctgttacctaaacgggagcttctagaattacgaaggccatacctgccacatttataaaataatggttttatccctgcccccaaatcatcaggttcctcgggtttaagagaagtggtctaatagacaggaatagaagttgtggtggaggtgatttgggatagactaggtttccttatgcaagtggatatgagctcctcatagaaaccagacctactgtattagacagtaacctctaacctcacctccaagcccaagtatatggccctgctgggttacctggtgactacatttcccagattcactctaaattcaaggtagtgacccaaataaattgggaaaggagggggtcaaggaggaaaagctgttgaaaatctttctcctatttaagagaaatatatgccctagagctgctccagcacccttggtttctgatttttttaatattgaatatggattagaagaatgaaatcagatgacacctgactgcaaaaatgtttataagcaaatagccttcttacattttggtataaagctgtgaacttcgtaactttgtaaagcaagatataaagcaaatacaagaggaaaataaagtacttttactaattg

SEQ ID NO: 441307 - DNA, 4221 bp, Homo sapiens
  misc_feature (33)..(33): n is a, c, g, or t
gcggacgcgtgggtcgacccacgcgtccggaanatacagatcctaattggttacccagtttgaccctaatcatatgtatattttattgatttcagtttgcaatttttaatttatgttcttatgatggtttaaacctatagtcaggcttttaagtacaagtttgtttaagtgccagactttgaggatcagttttaatttctccatttgtaatagctgggtatttaaactggaagcaaatagttttctttcttaacaattatgtgcagtgtgtgtcactgttttcttgctttatagatagagctggctttaagtgctaaaggacacagtagatttttgacaaacagtggctgctctgctgactatcttttaggaattcaggaagcaaatcacatagtgacaagtccttacagacaccacttctagtaaatctctgtaaatgtggatagaaagctcagtgtgaggcagtgcgtagacctaacgtctacctttacatctgctgttgaacctgggcactacctgttacagatcctgtcaggctgttgaactggaggtgtacctttatcttcctttctagtgtctgaccctgcaagcctaatgttggtttgaacccttttggtttgttcagttgccagcctccatctctcccactgtatggccgtgcctagaccgatggcagccatcgaatattcctctgggctcacggggtgttttccacccccctgcagcaactaagatggtgggggagagggggttagaataaagcatctgaatacagttttcaggacctcaagcagacttcctagagacttgtttctgagacagttctttgccttcacttccctgctagctgggaaagaagagtggagcagagactctgcctggccactgagaacagccaaattcacaaaccctcagtggggctttgtttttggattttctccggactcatcagtaaacctgtagaagtgtcgctttccagccttttgtttctggatcctcaaaactcagaacgtggccgggcgtggtggctcacgcctgtaatcccagcactttgggaggctgaggcaggcagatcacctgaggctaggagttgcagaccagcctggccaacatggcaaaaccccgtctctactaaaaatacaaaaagccgggcgtggtgggcgcctgtaatcccagctgctcaggaggctgaggcaggagaatcgcttgaacccgggaggcagagattgcagtaagctgagatcgtgccactgcactccagcctggtgacagagtgagactccgtctcaaaaaaaaaaaaaaaaactcagcttcttcagagagataaaattgggggaggagcccagggccacataccaagctttgggacatggtgcctcatgctctctgggattgcagaccatccaggtctgtcttcgcccctgttagtgcacatatatccactcacatgtcttccctcaggctatcgggcagggggacttcaccagggggtttatggataggcttcaagagggtctgtgagcccccagaaattgtgtgtgagactgagtatgtgttcttttttccaggaaaggctccagtggttcttacttgatccaaaaaatgtcaagaattaatctaggaggccgggcctggtggctcacacctgtaatcccagctctttgggaggccgaggcgggtggatcactcaaggtcaggcatttgagaccagcctggccaacatagtgaaaccccgtctctattaaaaatacaaaaattagctgggtgtggtggtatgtgcctgtagtctcagctactcaggaggctgagacaggagaatcacttgaaccctggaggtagaagttgcagtgagccaagatcatactactgcactccagcctgggcgacaagagtgaaactccacctcaaaaaaaaaaaaaaaagagttaatctaggagataatgaatggcctagtactagataatatatggccccacaagctcttgacttctgtccttggggaaagccattttgttaaccacactagtgagatttacatgatgcttaatggagaacagagaagatcttgttgcaaaaggtgtattaaatatttgtgctgtttctgtatgagattgagaagcttttcccacctctcacccctatttcctataaggatatccagagaagccaaactgttctgtgggtttgggaatggtcatttcccgggaaaatgcatctggatcgatgactaaacctggcccttttctctgggctgtagtgaagccgcattttcacgctggctggcagtgtgctgagagcctcgaatgctctgcggcgtagtgcccttctgccctgcctgacgatgtatcgaaaagatgagagtgaaggagactttgtgcagcaggaaacgggtaggtgaggtgttgggcagttgtgggaacttctgagagtattacagagtggtagaatcggtaagaactctgatttggacttcgctttggtggaactgtgtgcctatacctgcctgtgtgtgtgcaagtgtgcaggttcctttgtatgtatgtgtacgtgtgggaacctgtgtttgtcatatttttcttcatttcacaaaggctttttttgaagcagtggcagtatgcctttgtttcaagaacacatgaaattcttttaacaccagattagtgtgttaccccaaatgaacggttctagccctctattaagaaataaagggaccataagcattttggctgcttatggctgtgtgttactacttacaagagtcttgaaaattatacagaactttgccttctttttttaatgtcttccacaatgttgtgactgattataaccctgtttcccctcagagaagagctatggctcagggatctgtgttgactctggcatttagtggctttgtgaaggaaagaaaccattaaatgacctgacaaaaactgactcatgtctttaaagtagttgaagccacttttagaatgttactctcggttgcttttgtctaattctaatggcttaaagccaagaaaaccatagtataaatctttttgtgtacctatgctagtgtttaaatggcagttcgttgtgataaagtatcagtcacttcaagttttctgtgaaagtttttaattaggttaaaaataattttggcatacgtctctactcagtttataaagcagttccacaccatgcaaacaaaactctaacagcaaaggttatcttgacctgatgttacttgaatctgagagaaagtcattacttactactgcactcctgcttttgtgggaaaaattttcttcttccccagaagagttaacagttgagtgttcagctcctgacttacctttaatttagaggcaatattattactgtttaagtgattatttgcttaacacaggttttattttgtctttttgctggtagattatacaagggacaactttagtgatgaggcatgtggatgatttggtgggagtaggtatatacttagtggaatggtttattttatggaagagaattcattggaggtgagattgaagtatattgtgaagtgggatttgaacagcacatatgctctggtttgctcaaataactgcagtttatgcttacatctaaattttgtttctgttacctaaacgggagcttctagaattacgaaggccatacctgccacatttataaaataatggttttatccctgcccccaaatcatcaggttcctcgggtttaagagaagtggtctaatagacaggaatagaagttgtggtggaggtgatttgggatagactaggtttccttatgcaagtggatatgagctcctcatagaaaccagacctactgtattagacagtaacctctaacctcacctccaagcccaagtatatggccctgctgggttacctggtgactacatttcccagattcactctaaattcaaggtagtgacccaaataaattgggaaaggagggggtcaaggaggaaaagctgttgaaaatctttctcctatttaagagaaatatatgccctagagctgctccagcacccttggtttctgatttttttaatattgaatatggattagaagaatgaaatcagatgacacctgactgcaaaaatgtttataagcaaatagccttcttacattttggtataaagctgtgaacttcgtaactttgtaaagcaagatataaagcaaatacaagaggaaaataaagtacttttactaattg

SEQ ID NO: 441308 - DNA, 4257 bp, Homo sapiens
gggcaagctgctgcgtctagagcaacgttgctcccgagacacgaagtacaggagttgctatgtccgagtctcaaccagctatggagctggacactcatgagtgtactactaacattggatccactggttacgcaggcccaatgttcatgttggtaatgactaggtagaaactatagtcaggcttttaagtacaagtttgtttaagtgccagactttgaggatcagttttaatttctccatttgtaatagctgggtatttaaactggaagcaaatagttttctttcttaacaattatgtgcagtgtgtgtcactgttttcttgctttatagatagagctggctttaagtgctaaaggacacagtagatttttgacaaacagtggctgctctgctgactatcttttaggaattcaggaagcaaatcacatagtgacaagtccttacagacaccacttctagtaaatctctgtaaatgtggatagaaagctcagtgtgaggcagtgcgtagacctaacgtctacctttacatctgctgttgaacctgggcactacctgttacagatcctgtcaggctgttgaactggaggtgtacctttatcttcctttctagtgtctgaccctgcaagcctaatgttggtttgaacccttttggtttgttcagttgccagcctccatctctcccactgtatggccgtgcctagaccgatggcagccatcgaatattcctctgggctcacggggtgttttccacccccctgcagcaactaagatggtgggggagagggggttagaataaagcatctgaatacagttttcaggacctcaagcagacttcctagagacttgtttctgagacagttctttgccttcacttccctgctagctgggaaagaagagtggagcagagactctgcctggccactgagaacagccaaattcacaaaccctcagtggggctttgtttttggattttctccggactcatcagtaaacctgtagaagtgtcgctttccagccttttgtttctggatcctcaaaactcagaacgtggccgggcgtggtggctcacgcctgtaatcccagcactttgggaggctgaggcaggcagatcacctgaggctaggagttgcagaccagcctggccaacatggcaaaaccccgtctctactaaaaatacaaaaagccgggcgtggtgggcgcctgtaatcccagctgctcaggaggctgaggcaggagaatcgcttgaacccgggaggcagagattgcagtaagctgagatcgtgccactgcactccagcctggtgacagagtgagactccgtctcaaaaaaaaaaaaaaaaactcagcttcttcagagagataaaattgggggaggagcccagggccacataccaagctttgggacatggtgcctcatgctctctgggattgcagaccatccaggtctgtcttcgcccctgttagtgcacatatatccactcacatgtcttccctcaggctatcgggcagggggacttcaccagggggtttatggataggcttcaagagggtctgtgagcccccagaaattgtgtgtgagactgagtatgtgttcttttttccaggaaaggctccagtggttcttacttgatccaaaaaatgtcaagaattaatctaggaggccgggcctggtggctcacacctgtaatcccagctctttgggaggccgaggcgggtggatcactcaaggtcaggcatttgagaccagcctggccaacatagtgaaaccccgtctctattaaaaatacaaaaattagctgggtgtggtggtatgtgcctgtagtctcagctactcaggaggctgagacaggagaatcacttgaaccctggaggtagaagttgcagtgagccaagatcatactactgcactccagcctgggcgacaagagtgaaactccacctcaaaaaaaaaaaaaaaagagttaatctaggagataatgaatggcctagtactagataatatatggccccacaagctcttgacttctgtccttggggaaagccattttgttaaccacactagtgagatttacatgatgcttaatggagaacagagaagatcttgttgcaaaaggtgtattaaatatttgtgctgtttctgtatgagattgagaagcttttcccacctctcacccctatttcctataaggatatccagagaagccaaactgttctgtgggtttgggaatggtcatttcccgggaaaatgcatctggatcgatgactaaacctggcccttttctctgggctgtagtgaagccgcattttcacgctggctggcagtgtgctgagagcctcgaatgctctgcggcgtagtgcccttctgccctgcctgacgatgtatcgaaaagatgagagtgaaggagactttgtgcagcaggaaacgggtaggtgaggtgttgggcagttgtgggaacttctgagagtattacagagtggtagaatcggtaagaactctgatttggacttcgctttggtggaactgtgtgcctatacctgcctgtgtgtgtgcaagtgtgcaggttcctttgtatgtatgtgtacgtgtgggaacctgtgtttgtcatatttttcttcatttcacaaaggctttttttgaagcagtggcagtatgcctttgtttcaagaacacatgaaattcttttaacaccagattagtgtgttaccccaaatgaacggttctagccctctattaagaaataaagggaccataagcattttggctgcttatggctgtgtgttactacttacaagagtcttgaaaattatacagaactttgccttctttttttaatgtcttccacaatgttgtgactgattataaccctgtttcccctcagagaagagctatggctcagggatctgtgttgactctggcatttagtggctttgtgaaggaaagaaaccattaaatgacctgacaaaaactgactcatgtctttaaagtagttgaagccacttttagaatgttactctcggttgcttttgtctaattctaatggcttaaagccaagaaaaccatagtataaatctttttgtgtacctatgctagtgtttaaatggcagttcgttgtgataaagtatcagtcacttcaagttttctgtgaaagtttttaattaggttaaaaataattttggcatacgtctctactcagtttataaagcagttccacaccatgcaaacaaaactctaacagcaaaggttatcttgacctgatgttacttgaatctgagagaaagtcattacttactactgcactcctgcttttgtgggaaaaattttcttcttccccagaagagttaacagttgagtgttcagctcctgacttacctttaatttagaggcaatattattactgtttaagtgattatttgcttaacacaggttttattttgtctttttgctggtagattatacaagggacaactttagtgatgaggcatgtggatgatttggtgggagtaggtatatacttagtggaatggtttattttatggaagagaattcattggaggtgagattgaagtatattgtgaagtgggatttgaacagcacatatgctctggtttgctcaaataactgcagtttatgcttacatctaaattttgtttctgttacctaaacgggagcttctagaattacgaaggccatacctgccacatttataaaataatggttttatccctgcccccaaatcatcaggttcctcgggtttaagagaagtggtctaatagacaggaatagaagttgtggtggaggtgatttgggatagactaggtttccttatgcaagtggatatgagctcctcatagaaaccagacctactgtattagacagtaacctctaacctcacctccaagcccaagtatatggccctgctgggttacctggtgactacatttcccagattcactctaaattcaaggtagtgacccaaataaattgggaaaggagggggtcaaggaggaaaagctgttgaaaatctttctcctatttaagagaaatatatgccctagagctgctccagcacccttggtttctgatttttttaatattgaatatggattagaagaatgaaatcagatgacacctgactgcaaaaatgtttataagcaaatagccttcttacattttggtataaagctgtgaacttcgtaactttgtaaagcaagatataaagcaaatacaagaggaaaataaagtacttttactaattg

SEQ ID NO: 441309 - DNA, 4101 bp, Homo sapiens
  misc_feature (33)..(33): n is a, c, g, or t
gcggacgcgtgggtcgacccacgcgtccggaantagttttcgtttcttaacaattatgtgcttccagttttaagatacccagctattacaaatggagaaatttaaactggaagcaaatagttttctttcttaacaattatgtgcagtgtgtgtcactgttttcttgctttatagatagagctggctttaagtgctaaaggacacagtagatttttgacaaacagtggctgctctgctgactatcttttaggaattcaggaagcaaatcacatagtgacaagtccttacagacaccacttctagtaaatctctgtaaatgtggatagaaagctcagtgtgaggcagtgcgtagacctaacgtctacctttacatctgctgttgaacctgggcactacctgttacagatcctgtcaggctgttgaactggaggtgtacctttatcttcctttctagtgtctgaccctgcaagcctaatgttggtttgaacccttttggtttgttcagttgccagcctccatctctcccactgtatggccgtgcctagaccgatggcagccatcgaatattcctctgggctcacggggtgttttccacccccctgcagcaactaagatggtgggggagagggggttagaataaagcatctgaatacagttttcaggacctcaagcagacttcctagagacttgtttctgagacagttctttgccttcacttccctgctagctgggaaagaagagtggagcagagactctgcctggccactgagaacagccaaattcacaaaccctcagtggggctttgtttttggattttctccggactcatcagtaaacctgtagaagtgtcgctttccagccttttgtttctggatcctcaaaactcagaacgtggccgggcgtggtggctcacgcctgtaatcccagcactttgggaggctgaggcaggcagatcacctgaggctaggagttgcagaccagcctggccaacatggcaaaaccccgtctctactaaaaatacaaaaagccgggcgtggtgggcgcctgtaatcccagctgctcaggaggctgaggcaggagaatcgcttgaacccgggaggcagagattgcagtaagctgagatcgtgccactgcactccagcctggtgacagagtgagactccgtctcaaaaaaaaaaaaaaaaactcagcttcttcagagagataaaattgggggaggagcccagggccacataccaagctttgggacatggtgcctcatgctctctgggattgcagaccatccaggtctgtcttcgcccctgttagtgcacatatatccactcacatgtcttccctcaggctatcgggcagggggacttcaccagggggtttatggataggcttcaagagggtctgtgagcccccagaaattgtgtgtgagactgagtatgtgttcttttttccaggaaaggctccagtggttcttacttgatccaaaaaatgtcaagaattaatctaggaggccgggcctggtggctcacacctgtaatcccagctctttgggaggccgaggcgggtggatcactcaaggtcaggcatttgagaccagcctggccaacatagtgaaaccccgtctctattaaaaatacaaaaattagctgggtgtggtggtatgtgcctgtagtctcagctactcaggaggctgagacaggagaatcacttgaaccctggaggtagaagttgcagtgagccaagatcatactactgcactccagcctgggcgacaagagtgaaactccacctcaaaaaaaaaaaaaaaagagttaatctaggagataatgaatggcctagtactagataatatatggccccacaagctcttgacttctgtccttggggaaagccattttgttaaccacactagtgagatttacatgatgcttaatggagaacagagaagatcttgttgcaaaaggtgtattaaatatttgtgctgtttctgtatgagattgagaagcttttcccacctctcacccctatttcctataaggatatccagagaagccaaactgttctgtgggtttgggaatggtcatttcccgggaaaatgcatctggatcgatgactaaacctggcccttttctctgggctgtagtgaagccgcattttcacgctggctggcagtgtgctgagagcctcgaatgctctgcggcgtagtgcccttctgccctgcctgacgatgtatcgaaaagatgagagtgaaggagactttgtgcagcaggaaacgggtaggtgaggtgttgggcagttgtgggaacttctgagagtattacagagtggtagaatcggtaagaactctgatttggacttcgctttggtggaactgtgtgcctatacctgcctgtgtgtgtgcaagtgtgcaggttcctttgtatgtatgtgtacgtgtgggaacctgtgtttgtcatatttttcttcatttcacaaaggctttttttgaagcagtggcagtatgcctttgtttcaagaacacatgaaattcttttaacaccagattagtgtgttaccccaaatgaacggttctagccctctattaagaaataaagggaccataagcattttggctgcttatggctgtgtgttactacttacaagagtcttgaaaattatacagaactttgccttctttttttaatgtcttccacaatgttgtgactgattataaccctgtttcccctcagagaagagctatggctcagggatctgtgttgactctggcatttagtggctttgtgaaggaaagaaaccattaaatgacctgacaaaaactgactcatgtctttaaagtagttgaagccacttttagaatgttactctcggttgcttttgtctaattctaatggcttaaagccaagaaaaccatagtataaatctttttgtgtacctatgctagtgtttaaatggcagttcgttgtgataaagtatcagtcacttcaagttttctgtgaaagtttttaattaggttaaaaataattttggcatacgtctctactcagtttataaagcagttccacaccatgcaaacaaaactctaacagcaaaggttatcttgacctgatgttacttgaatctgagagaaagtcattacttactactgcactcctgcttttgtgggaaaaattttcttcttccccagaagagttaacagttgagtgttcagctcctgacttacctttaatttagaggcaatattattactgtttaagtgattatttgcttaacacaggttttattttgtctttttgctggtagattatacaagggacaactttagtgatgaggcatgtggatgatttggtgggagtaggtatatacttagtggaatggtttattttatggaagagaattcattggaggtgagattgaagtatattgtgaagtgggatttgaacagcacatatgctctggtttgctcaaataactgcagtttatgcttacatctaaattttgtttctgttacctaaacgggagcttctagaattacgaaggccatacctgccacatttataaaataatggttttatccctgcccccaaatcatcaggttcctcgggtttaagagaagtggtctaatagacaggaatagaagttgtggtggaggtgatttgggatagactaggtttccttatgcaagtggatatgagctcctcatagaaaccagacctactgtattagacagtaacctctaacctcacctccaagcccaagtatatggccctgctgggttacctggtgactacatttcccagattcactctaaattcaaggtagtgacccaaataaattgggaaaggagggggtcaaggaggaaaagctgttgaaaatctttctcctatttaagagaaatatatgccctagagctgctccagcacccttggtttctgatttttttaatattgaatatggattagaagaatgaaatcagatgacacctgactgcaaaaatgtttataagcaaatagccttcttacattttggtataaagctgtgaacttcgtaactttgtaaagcaagatataaagcaaatacaagaggaaaataaagtacttttactaattg

SEQ ID NO: 441310 - DNA, 3996 bp, Homo sapiens
  misc_feature (37)..(37): n is a, c, g, or t
taaacaaaaacctacgctaggtacgaggccgggttgngcagtgtgtgtcactgttttcttgctttatagatagagctggctttaagtgctaaaggacacagtagatttttgacaaacagtggctgctctgctgactatcttttaggaattcaggaagcaaatcacatagtgacaagtccttacagacaccacttctagtaaatctctgtaaatgtggatagaaagctcagtgtgaggcagtgcgtagacctaacgtctacctttacatctgctgttgaacctgggcactacctgttacagatcctgtcaggctgttgaactggaggtgtacctttatcttcctttctagtgtctgaccctgcaagcctaatgttggtttgaacccttttggtttgttcagttgccagcctccatctctcccactgtatggccgtgcctagaccgatggcagccatcgaatattcctctgggctcacggggtgttttccacccccctgcagcaactaagatggtgggggagagggggttagaataaagcatctgaatacagttttcaggacctcaagcagacttcctagagacttgtttctgagacagttctttgccttcacttccctgctagctgggaaagaagagtggagcagagactctgcctggccactgagaacagccaaattcacaaaccctcagtggggctttgtttttggattttctccggactcatcagtaaacctgtagaagtgtcgctttccagccttttgtttctggatcctcaaaactcagaacgtggccgggcgtggtggctcacgcctgtaatcccagcactttgggaggctgaggcaggcagatcacctgaggctaggagttgcagaccagcctggccaacatggcaaaaccccgtctctactaaaaatacaaaaagccgggcgtggtgggcgcctgtaatcccagctgctcaggaggctgaggcaggagaatcgcttgaacccgggaggcagagattgcagtaagctgagatcgtgccactgcactccagcctggtgacagagtgagactccgtctcaaaaaaaaaaaaaaaaactcagcttcttcagagagataaaattgggggaggagcccagggccacataccaagctttgggacatggtgcctcatgctctctgggattgcagaccatccaggtctgtcttcgcccctgttagtgcacatatatccactcacatgtcttccctcaggctatcgggcagggggacttcaccagggggtttatggataggcttcaagagggtctgtgagcccccagaaattgtgtgtgagactgagtatgtgttcttttttccaggaaaggctccagtggttcttacttgatccaaaaaatgtcaagaattaatctaggaggccgggcctggtggctcacacctgtaatcccagctctttgggaggccgaggcgggtggatcactcaaggtcaggcatttgagaccagcctggccaacatagtgaaaccccgtctctattaaaaatacaaaaattagctgggtgtggtggtatgtgcctgtagtctcagctactcaggaggctgagacaggagaatcacttgaaccctggaggtagaagttgcagtgagccaagatcatactactgcactccagcctgggcgacaagagtgaaactccacctcaaaaaaaaaaaaaaaagagttaatctaggagataatgaatggcctagtactagataatatatggccccacaagctcttgacttctgtccttggggaaagccattttgttaaccacactagtgagatttacatgatgcttaatggagaacagagaagatcttgttgcaaaaggtgtattaaatatttgtgctgtttctgtatgagattgagaagcttttcccacctctcacccctatttcctataaggatatccagagaagccaaactgttctgtgggtttgggaatggtcatttcccgggaaaatgcatctggatcgatgactaaacctggcccttttctctgggctgtagtgaagccgcattttcacgctggctggcagtgtgctgagagcctcgaatgctctgcggcgtagtgcccttctgccctgcctgacgatgtatcgaaaagatgagagtgaaggagactttgtgcagcaggaaacgggtaggtgaggtgttgggcagttgtgggaacttctgagagtattacagagtggtagaatcggtaagaactctgatttggacttcgctttggtggaactgtgtgcctatacctgcctgtgtgtgtgcaagtgtgcaggttcctttgtatgtatgtgtacgtgtgggaacctgtgtttgtcatatttttcttcatttcacaaaggctttttttgaagcagtggcagtatgcctttgtttcaagaacacatgaaattcttttaacaccagattagtgtgttaccccaaatgaacggttctagccctctattaagaaataaagggaccataagcattttggctgcttatggctgtgtgttactacttacaagagtcttgaaaattatacagaactttgccttctttttttaatgtcttccacaatgttgtgactgattataaccctgtttcccctcagagaagagctatggctcagggatctgtgttgactctggcatttagtggctttgtgaaggaaagaaaccattaaatgacctgacaaaaactgactcatgtctttaaagtagttgaagccacttttagaatgttactctcggttgcttttgtctaattctaatggcttaaagccaagaaaaccatagtataaatctttttgtgtacctatgctagtgtttaaatggcagttcgttgtgataaagtatcagtcacttcaagttttctgtgaaagtttttaattaggttaaaaataattttggcatacgtctctactcagtttataaagcagttccacaccatgcaaacaaaactctaacagcaaaggttatcttgacctgatgttacttgaatctgagagaaagtcattacttactactgcactcctgcttttgtgggaaaaattttcttcttccccagaagagttaacagttgagtgttcagctcctgacttacctttaatttagaggcaatattattactgtttaagtgattatttgcttaacacaggttttattttgtctttttgctggtagattatacaagggacaactttagtgatgaggcatgtggatgatttggtgggagtaggtatatacttagtggaatggtttattttatggaagagaattcattggaggtgagattgaagtatattgtgaagtgggatttgaacagcacatatgctctggtttgctcaaataactgcagtttatgcttacatctaaattttgtttctgttacctaaacgggagcttctagaattacgaaggccatacctgccacatttataaaataatggttttatccctgcccccaaatcatcaggttcctcgggtttaagagaagtggtctaatagacaggaatagaagttgtggtggaggtgatttgggatagactaggtttccttatgcaagtggatatgagctcctcatagaaaccagacctactgtattagacagtaacctctaacctcacctccaagcccaagtatatggccctgctgggttacctggtgactacatttcccagattcactctaaattcaaggtagtgacccaaataaattgggaaaggagggggtcaaggaggaaaagctgttgaaaatctttctcctatttaagagaaatatatgccctagagctgctccagcacccttggtttctgatttttttaatattgaatatggattagaagaatgaaatcagatgacacctgactgcaaaaatgtttataagcaaatagccttcttacattttggtataaagctgtgaacttcgtaactttgtaaagcaagatataaagcaaatacaagaggaaaataaagtacttttactaattg

SEQ ID NO: 441311 - DNA, 3935 bp, Homo sapiens
acaagctctctaaagccattcgtgaggcgcgcgaccctcatgacgtgtcgttgaacatggtcctattctgatttcctactgcatgatccttggtgcattgacatagtcgtctatggtgattacgtgccacgcagctataagaacacctacaccggctggccattcagcagtcgttgtctggtaagaacacttggaggaatggacgcttgtgacaggtactctctagtgggagtctgtcgacccggaggtgctgatgccgattcatctcattatttatatactaactgctcctgagccctgcaagcctaatgttggtttgaacccttttggtttgttcagttgccagcctccatctctcccactgtatggccgtgcctagaccgatggcagccatcgaatattcctctgggctcacggggtgttttccacccccctgcagcaactaagatggtgggggagagggggttagaataaagcatctgaatacagttttcaggacctcaagcagacttcctagagacttgtttctgagacagttctttgccttcacttccctgctagctgggaaagaagagtggagcagagactctgcctggccactgagaacagccaaattcacaaaccctcagtggggctttgtttttggattttctccggactcatcagtaaacctgtagaagtgtcgctttccagccttttgtttctggatcctcaaaactcagaacgtggccgggcgtggtggctcacgcctgtaatcccagcactttgggaggctgaggcaggcagatcacctgaggctaggagttgcagaccagcctggccaacatggcaaaaccccgtctctactaaaaatacaaaaagccgggcgtggtgggcgcctgtaatcccagctgctcaggaggctgaggcaggagaatcgcttgaacccgggaggcagagattgcagtaagctgagatcgtgccactgcactccagcctggtgacagagtgagactccgtctcaaaaaaaaaaaaaaaaactcagcttcttcagagagataaaattgggggaggagcccagggccacataccaagctttgggacatggtgcctcatgctctctgggattgcagaccatccaggtctgtcttcgcccctgttagtgcacatatatccactcacatgtcttccctcaggctatcgggcagggggacttcaccagggggtttatggataggcttcaagagggtctgtgagcccccagaaattgtgtgtgagactgagtatgtgttcttttttccaggaaaggctccagtggttcttacttgatccaaaaaatgtcaagaattaatctaggaggccgggcctggtggctcacacctgtaatcccagctctttgggaggccgaggcgggtggatcactcaaggtcaggcatttgagaccagcctggccaacatagtgaaaccccgtctctattaaaaatacaaaaattagctgggtgtggtggtatgtgcctgtagtctcagctactcaggaggctgagacaggagaatcacttgaaccctggaggtagaagttgcagtgagccaagatcatactactgcactccagcctgggcgacaagagtgaaactccacctcaaaaaaaaaaaaaaaagagttaatctaggagataatgaatggcctagtactagataatatatggccccacaagctcttgacttctgtccttggggaaagccattttgttaaccacactagtgagatttacatgatgcttaatggagaacagagaagatcttgttgcaaaaggtgtattaaatatttgtgctgtttctgtatgagattgagaagcttttcccacctctcacccctatttcctataaggatatccagagaagccaaactgttctgtgggtttgggaatggtcatttcccgggaaaatgcatctggatcgatgactaaacctggcccttttctctgggctgtagtgaagccgcattttcacgctggctggcagtgtgctgagagcctcgaatgctctgcggcgtagtgcccttctgccctgcctgacgatgtatcgaaaagatgagagtgaaggagactttgtgcagcaggaaacgggtaggtgaggtgttgggcagttgtgggaacttctgagagtattacagagtggtagaatcggtaagaactctgatttggacttcgctttggtggaactgtgtgcctatacctgcctgtgtgtgtgcaagtgtgcaggttcctttgtatgtatgtgtacgtgtgggaacctgtgtttgtcatatttttcttcatttcacaaaggctttttttgaagcagtggcagtatgcctttgtttcaagaacacatgaaattcttttaacaccagattagtgtgttaccccaaatgaacggttctagccctctattaagaaataaagggaccataagcattttggctgcttatggctgtgtgttactacttacaagagtcttgaaaattatacagaactttgccttctttttttaatgtcttccacaatgttgtgactgattataaccctgtttcccctcagagaagagctatggctcagggatctgtgttgactctggcatttagtggctttgtgaaggaaagaaaccattaaatgacctgacaaaaactgactcatgtctttaaagtagttgaagccacttttagaatgttactctcggttgcttttgtctaattctaatggcttaaagccaagaaaaccatagtataaatctttttgtgtacctatgctagtgtttaaatggcagttcgttgtgataaagtatcagtcacttcaagttttctgtgaaagtttttaattaggttaaaaataattttggcatacgtctctactcagtttataaagcagttccacaccatgcaaacaaaactctaacagcaaaggttatcttgacctgatgttacttgaatctgagagaaagtcattacttactactgcactcctgcttttgtgggaaaaattttcttcttccccagaagagttaacagttgagtgttcagctcctgacttacctttaatttagaggcaatattattactgtttaagtgattatttgcttaacacaggttttattttgtctttttgctggtagattatacaagggacaactttagtgatgaggcatgtggatgatttggtgggagtaggtatatacttagtggaatggtttattttatggaagagaattcattggaggtgagattgaagtatattgtgaagtgggatttgaacagcacatatgctctggtttgctcaaataactgcagtttatgcttacatctaaattttgtttctgttacctaaacgggagcttctagaattacgaaggccatacctgccacatttataaaataatggttttatccctgcccccaaatcatcaggttcctcgggtttaagagaagtggtctaatagacaggaatagaagttgtggtggaggtgatttgggatagactaggtttccttatgcaagtggatatgagctcctcatagaaaccagacctactgtattagacagtaacctctaacctcacctccaagcccaagtatatggccctgctgggttacctggtgactacatttcccagattcactctaaattcaaggtagtgacccaaataaattgggaaaggagggggtcaaggaggaaaagctgttgaaaatctttctcctatttaagagaaatatatgccctagagctgctccagcacccttggtttctgatttttttaatattgaatatggattagaagaatgaaatcagatgacacctgactgcaaaaatgtttataagcaaatagccttcttacattttggtataaagctgtgaacttcgtaactttgtaaagcaagatataaagcaaatacaagaggaaaataaagtacttttactaattg
